United States Patent Application Publication US 2024/0327476 A1 - sequence listing, part 98

SEQ ID NO: 188282 - DNA, 768 bp, synthetic construct
  misc_feature 1..768: note = Description of Artificial Sequence: Synthetic coding sequence
  source 1..768: mol_type = other DNA
gagcggcagggccagagccgggcccggcggcacggccagtgctgcgaagaatgtgtatcgccggccgggtcatgtagctatgacggcgtggtccgctatcaagatgagatgtggaaaggttctgcttgtgagttttgtatgtgcgaccatgggcaagtcacctgccaaacgggggaatgcgcgaaggtggagtgcgctagggacgaggaactcattcaccttgacggcaagtgctgtcccgagtgcatttctcgcaatgggtattgtgtgtacgaggaaaccggcgaattcatgagctctaacgcttcagaagtcaaacggattcctgaaggcgagaaatgggaggacggcccgtgcaaagtctgcgaatgcagaggagcgcaagtcacctgctatgagccctcttgccccccatgtccagtcgggacactggccctggaagttaagggtcaatgttgccctgattgcactagcgtgcattgtcatcccgactgcctgacctgcagccagtcccctgaccactgcgatctgtgccaggaccccacaaagttgctgcagaacgggtggtgtgtgcattcttgtgggctggggttttaccaggccggcagcttgtgcctcgatgacggattcagccttccagctccggtcttgcacgtctaccagtgggccggtgtgcttatcctccccgcgtccccagcagacgccgctagggctgtgtgtgcgtatctttggggacgcttactgccacgatctccatttctgtgctag

SEQ ID NO: 188283 - DNA, 840 bp, synthetic construct
  misc_feature 1..840: note = Description of Artificial Sequence: Synthetic coding sequence
  source 1..840: mol_type = other DNA
atggtgctgaccatccacctgctgcccagcgaccagcagctgcccgtttttcaagtgactgcccctcggcttgccgtgtcgccaggcggatcaacctcggtcgggttgcaggttgtcgtgagggacgccgaaactgcacctaaggaactattcttcgaactcaggcgtcctccgcagcacggcgtgcttctgaagcacaccgcggagttcagacgcccgatggctacaggagatacttttacctatgaggacgttgaaaagaacgcgctgcagtatatccacgacggcagctccacacgcgaggatagtatggagatttcagtgacggacggtctgactgtgaccatgctggaggtgcgtgtggaagtctccttgtccgaggacaggggacctaggctggccgccggtagttctctctctataacggtggcgagcaagtccacagcaatcattacaagatctcatctggcctacgtggacgactccagtccagaccctgagatctggattcagcttaactacctgccatcttacggcacactgcttcggatctccggttccgaggttgaggagttgtccgaggtctctaacttcacgatggaggacattaacaacaagaagataaggtatagcgccgtgttcgagactgacgggcatctcgtcacagatagcttctacttttccgtctcagatatggatcataaccatctcgataatcagatattcacaatcatgattaccccggctgaaaatcccccaccagtaatcgcatttgccgacctcataacagtagacgaaggggggagggcacccctgtcttttcaccacttctgctattag

SEQ ID NO: 188284 - DNA, 5931 bp, synthetic construct
  misc_feature 1..5931: note = Description of Artificial Sequence: Synthetic coding sequence
  source 1..5931: mol_type = other DNA
atgggcgtgctgaaggtgtggctgggcctggccctggccctggccgagtttgccgttctgcctcaccatagcgagggggcctgtgtgtatcaggattcacttctggctgacgctaccatttggaaacctgatagctgtcaaagttgtcggtgtcacggcgatatagtaatttgcaaaccggctgtgtgcaggaacccccagtgtgctttcgaaaaaggagaagtgctccagattgccgctaaccagtgctgtccagaatgtgtgctccggacgccaggaagctgtcaccatgaaaagaaaatccatgagcatggcactgagtgggctagctctccatgcagcgtgtgctcctgtaaccacggggaggtgcgatgcactccgcagccatgccccccactctcttgtggtcatcaggagctagccttcatacccgaggggagctgttgtcccgtctgtgtgggactcgggaaaccctgtagctacgaaggccatgtcttccaagacggggaggattggcgcctaagtagatgcgcaaagtgcttatgtcgcaatggagtggcccagtgtttcacagcacaatgccagccattattctgtaaccaggacgagacagtggtgagggtgcccggaaaatgttgtccccagtgttctgccaggagctgtagcgcggcgggacaggtgtatgagcacggggaacagtggtcagagaacgcttgcacaacatgcatttgtgataggggcgaggtcagatgccataagcaggcttgtctaccactccgttgtggcaaaggtcagtccagggcacggcggcatggccaatgctgtgaagagtgcgtgagtcctgccggctcctgttcttatgatggtgttgtgaggtatcaggatgaaatgtggaagggatccgcatgtgagttctgtatgtgcgaccacggccaagtgacttgccagactggtgaatgcgctaaagtcgagtgtgcgcgtgacgaggaattgatacacctggacggaaaatgctgtcccgagtgtatttctcgcaatggctactgcgtgtacgaagaaaccggagagttcatgagttctaatgcctccgaggtgaaaaggattcctgaaggtgagaagtgggaggatggaccgtgcaaggtttgcgaatgtaggggagcccaggtaacatgctacgaaccaagctgtcccccttgccctgtgggtacactcgccctcgaggtcaaggggcagtgctgtcccgactgcacctcggtgcactgccacccagattgcttgacctgtagccagtctcccgatcactgcgatctctgccaggacccaacaaaactcctccagaacggatggtgcgtgcacagctgtgggttagggttctaccaggcgggaagcttgtgcctggcatgccagcctcaatgcagcacttgtacctcaggcctggaatgtagcagctgtcaaccccccctcctcatgcggcacggtcagtgcgtgccaacttgcggcgacggcttctatcaggaccggcatagctgcgctgtgtgtcacgaatcctgtgcaggatgctggggcccgacagaaaaacactgcctcgcctgtcgcgacccactgcacgtgctgcgggacggaggctgtgaaagctcatgtggcaaggggttctataaccggcagggcacctgctcagcttgcgaccagtcgtgtgacagctgcggaccttccagtccgaggtgtttgacctgcactgaaaaaaccgtgttgcatgacggcaagtgtatgtctgaatgtccaggcggatactacgctgatgcaacgggaagatgtaaggtgtgccataactcttgcgcgagctgtagcggacccacaccttcacattgtacggcgtgctcaccccccaaggctctgcgccaagggcactgcctgcccagatgtggagaaggattttattccgaccatggagtctgtaaggcttgccactcctcatgcctagcatgtatgggcccggcaccttcccactgtactggctgtaagaagcctgaggaaggcctgcaagttgaacagttgagcgacgtcggcattccctcaggcgaatgtcttgctcagtgtcgagctcatttttatttggagagcacagggatatgtgaggcttgccatcaatcctgcttcagatgtgcaggaaaaagccctcataattgcacagactgtggccctagccacgttcttctagacgggcagtgtctctcccagtgtccagatggatacttccaccaggaagggagctgcacggagtgccatccaacctgccggcagtgtcacggtcctcttgagagtgattgcataagctgttatccacatatttccctgaccaacggcaattgtcgaacatcttgtagggaggaacagttcctcaatctcgttgggtactgtgccgactgccatcatctgtgtcagcactgcgcggccgatttacacaacaccggatccatctgtttgcgctgccaaaacgcacactacctccttctcggcgaccattgcgtacccgactgccccagtgggtactacgcggagcgcggagcttgtaaaaaatgtcacagctcttgcagaacttgtcaaggccgaggcccgttttcgtgctcatcttgtgacactaatctggtgctgtctcatacaggcacttgctccacaacctgcttccctggtcactacctggatgataaccatgtgtgtcaaccttgtaacactcactgcgggtcgtgtgacagccaggcaagctgcaccagttgtagggaccctaacaaggtgctgctctttggggaatgccagtacgagtcctgtgcgccccaatattacttagactttagcaccaacacgtgcaaggaatgcgactggtcttgctctgcttgtagcgggcctcttaagacggactgtctgcagtgcatggatggctatgtactgcaagatggcgcgtgtgttgagcagtgtctgtcatcattttatcaggatagtggcctgtgtaaaaactgtgattcatactgcttgcagtgtcagggacctcatgagtgtacccgttgcaaaggacctttccttttgctggaggctcaatgcgtgcaggagtgcgggaagggatactttgctgaccatgccaaacataaatgcaccgcctgtccccaggggtgtctgcaatgctctcaccgcgaccgctgtcacttgtgtgaccacggatttttcctgaaatccggcctctgcgtttacaattgcgtccccggcttctcagtgcacactagtaatgagacctgcagcggtaaaattcatacgccttccttgcacgtgaacgggagtctgatcctgcccataggatctatcaaaccgcttgatttttccctgctgaatgtccaggaccaggaaggacgtgtggaggatcttctgtttcacgtggtgagcactcctaccaatggtcagctcgtgctctctcgtaatgggaaggaagtgcagcttgacaaggctgggcgcttctcttggaaggacgttaacgagaagaaggtcagattcgtccactccaaagaaaaactaaggaagggctacctatttctcaagatttctgatcaacagttttttagtgaaccccagttaatcaacattcaggcattctcgactcaggctccctatgtgttaagaaatgaggttctgcatatcagtcgtggcgaacgcgccaccatcacgacacaaatgctggatattagagatgacgacaatccacaggacgtggttatcgagattatagatccccccctgcacggtcagttactccagaccttacaaagtcccgccacgcccatctatcagtttcagctcgacgaactgagccgcgggctgttacattatgctcatgacggatccgacagcaccagcgatgtggccgtcttgcaggccaatgacggtcatagcttccacaacattctttttcaggtcaaaacagtgccgcagaacgaccggggcctacagttagttgcaaattctatggtgtgggtgcctgaggggggtatgctccagatcacaaatcggattctccaggcagaagccccaggagcctctgcggaagagattatttacaagatcacacaggactaccctcagtttggtgaagttgtcctcttagttaatatgcccgccgactcgcctgctgacgagggccagcacctccccgacggccgtactgccaccccaacctcaacctttactcaacaggatattaacgaggggatcgtttggtacagacactctggagcccccgcccagagcgattccttccgcttcgaagtaagtagcgcaagcaacgcccagaccagactggagagtcatatgtttaatatcgccattctaccacagacgcctgaagcaccaaaagtgtcgttagaggcatctctacatatgacagcgcgcgaagatgggctgactgtgattcagccccattccctgtcttttatcaactctgaaaagccttccggaaagattgtgtacaatatcacacttcccctccatcctaaccaggggattatcgagcaccgagaccatcctcattcaccaatcaggtattttactcaggaggatatcaaccaggggaaagtcatgtacagacctccacctgcagctccgcatctgcaggaattaatggccttctccttcgcgggcctccctgaaagcgtaaagttccattttacagttagcgacggagaacatacctccccagagatggtgttgacaatccacctcctccctagtgatcagcagcttcccgtctttcaggtaactgctcccagactagcggtgagccccggtggaagtacgtcggttgggctgcaagttgtggtgagagatgccgagactgcacctaaggaactgttctttgagcttcgcagaccacctcagcacggtgtgttgctgaagcataccgccgagttccggcgcccgatggcgactggggacacattcacatacgaagatgtggagaagaacgcccttcagtatattcatgacgggtcaagcactcgcgaagattctatggaaatttccgtgacagacggtctaacggtaacgatgttggaagtgcgggtggaggtctccttgtccgaagaccgcggtccacgcctcgcggcaggcagtagcctttctatcactgtggcaagcaaatccaccgcaattataactcgatcacatttggcctatgtagacgattcatctcccgatcccgagatctggatccagctaaattatctgccgtcatacggcaccttactgcgaatttctggatcggaagtggaggagctgtcggaggtgtcgaattttacaatggaagatattaacaataagaaaattcgatatagcgcagtgttcgaaaccgacggacatctcgtgacggacagcttttactttagcgtctccgatatggaccataatcacctcgataaccagatattcacaataatgatcacgcctgccgaaaaccccccgccagtaatagcattcgcggacctgatcaccgtcgacgagggggggagagctccgttaagcttccatcatttctttgctaccgatgacgacgacaatctccagcgcgacgccattatcaagctatctgcgcttccgaaatatgggtgcattgaaaacaccggaaccggggaccgctttggcccggagaccgctagcgatcttgaagcttcattcccaattcaggacgtgctcgagaattacatttactacttccaatctgtacacgagagcattgagcccacacacgacatcttttccttctacgtgtcagatggaacctcacgcagtgaaattcattctatcaacatcaccattgaagtcaagaccctggaggtcggtaaggtagagcccctaaccaccatcttccacacgattagagaactttcgctgtag

SEQ ID NO: 188285 - DNA, 633 bp, synthetic construct
  misc_feature 1..633: note = Description of Artificial Sequence: Synthetic coding sequence
  source 1..633: mol_type = other DNA
atgtggaccctgggccggcgggccgtggccggcctgctggccagccctagccccgcacaagcacaaaccctgactcgggtgcctaggccggccgaacttgcgccattgtgcggcagacgagggctgagaaccgacatagatgccacctgtacaccacgccgagcttccagcaatcagagagggctcaatcagatctggaatgtcaagaagcagagtgtgtacctcatgaatctccgtaaaagcgggacactgggacatcctgggtcactcgatgagacgacctacgagagattagcagaagagaccctggatagcctggccgaattctttgaggatctcgcagataaaccttatacgttcgaggattacgatgtgtcattcggctctggggttctaacagtgaagctaggaggtgacctgggcacctacgtaatcaataaacagacacccaacaaacagatttggctgtcctctccttctagcggacctaagcgatatgattggaccggcaagaattgggtttactctcatgatggcgtgtctctgcatgaactactggctgccgaattaaccaaggcattaaaaactaaactcgatctgtcgtccttagcatacagcgggaaagatgcttag

SEQ ID NO: 188286 - DNA, 516 bp, synthetic construct
  misc_feature 1..516: note = Description of Artificial Sequence: Synthetic coding sequence
  source 1..516: mol_type = other DNA
atgtggaccctgggccggcgggccgtggccggcctgctggccagcccttctcccgcccaagcccagaccctcacccgagtgcctcgccctgcggagcttgcacccctctgtggcaggcggggactgagaacagacatagacgccacatgtaccccgagaagagccagctccaatcagcgggggcttaaccagatttggaatgtgaagaagcagtccgtctatctgatgaatctgaggaaatccgggacactgggacatccaggctctttagatgaaactacatatgaacgactggctgaggagacactggatagcctggccgagttttttgaggacctggctgacaagccatacacctttgaggactatgacgtttcctttggttccggagtgcttacagtgaaactgggcggcgaccttggaacttatgtaataaacaagcagacgcccaacaagcagatctggctgagttctccatccagactcacctggttactctggctctttcacccatag

SEQ ID NO: 188287 - DNA, 591 bp, synthetic construct
  misc_feature 1..591: note = Description of Artificial Sequence: Synthetic coding sequence
  source 1..591: mol_type = other DNA
atgtggaccctgggccggcgggccgtggccggcctgctggccagcccttccccagctcaagcacagactctgaccagggtgcctagacccgctgaacttgccccactatgtggtcggcggggacttaggactgacatcgacgctacctgcactccacgccgcgcttcttctaaccagcgcggactgaatcaaatctggaacgtgaagaaacagagcgtgtatctgatgaatctgagaaaaagcggcaccctgggtcacccgggaagcctggatgaaaccacttatgagagactggctgaagagacgctggattccctcgctgagtttttcgaagacctggccgacaagccttatacatttgaagattacgacgtcagtttcggctctggtgtgctcacagtgaaactcggaggcgaccttggaacctacgtcatcaataagcagacaccaaacaagcaaatatggctatccagccctagccggtacgtagtagatcttagtgtcatgactgggctgggcaaaaccggttgtaccccaacaaccgcgtgcccaagtatgtcttgctggccacagtctagcctgaaaccctag

SEQ ID NO: 188288 - DNA, 702 bp, synthetic construct
  misc_feature 1..702: note = Description of Artificial Sequence: Synthetic coding sequence
  source 1..702: mol_type = other DNA
atgccctgccggcgggaggaggaggaggaggccggcgaggaggccgagggggaggaggaggaggatgactcgttcctgttactgcagcagtcggttacactaggttcaagtggtgaagtggaccgactggtcgcacagatcggggaaactttgcagctcgacgcggcccaagattcacccgctagtccctgcgcgccaccaggtgtgcctttacgagctcctggacctctggctgctgcagtgcctgcggacaaggctaggccaccggccgtgcctctgctcctgcctcctgcctccgccgagacagtcggcccagccccatctggagcccttcgttgcgccctaggagatcgtggtcgtgtacggggccgcgccgccccctactgcgtggccgaggtcgccgccggcccatctgcactgccaggaccttgccggaggggatggctacgagatgctgtgaccagcaggagactgcagcagcgaagatggactcaggccggggcaagggctggagatgacgacccccaccgactactgcaacaactggtgcttagcggcaatctgataaaggaggccgtccggcgcctccaacgcgccgtggccgctgtagctgccaccgggccagctagtgcgcctggtcccggcggaggtagaagtgggcccgatcgaatagccttacagccctccggctccttgctgtag

SEQ ID NO: 188289 - DNA, 1161 bp, synthetic construct
  misc_feature 1..1161: note = Description of Artificial Sequence: Synthetic coding sequence
  source 1..1161: mol_type = other DNA
atggagggcggcctggccggcgagcgggcccgggagagccccgtggattgctcagtgtctaaatgttcaaagctcgtggggggcggcgagagtaacccgatgaactacaattcttatatggatgagaaaaacgggcctccacccccaaatatgacaaccaatgagagacgcgtgattgtgcccgccgaccccaccctgtggacacaggagcatgtaaggcagtggttagagtgggctatcaaggaatacagtttaatggagattgacacaagcttctttcagaatatggatggcaaggaactttgtaagatgaacaaggaggactttctacgggccaccactctttacaatactgaggtgttgctgtctcatctgtcctaccttagagaatcatcattgctcgcatataatactaccagccacactgaccagagctccagactctcggtcaaagaggaccccagctatgattccgtgagacgaggggcatggggcaataacatgaattcaggactgaataaatctccccccttaggtggggctcagacgataagcaagaatactgagcaacggccgcagccagatccatatcagatactcggccctaccagctcacgactagctaaccctggcagtggccagatccagctgtggcaatttctgcttgaactgctatccgacagcgcaaatgccagttgcatcacctgggaggggacaaatggcgagttcaagatgacagatcctgatgaagttgcacgtaggtggggggagaggaagtctaaaccaaatatgaactatgataaacttagcagggcactaagatactattatgataaaaacattatgaccaaagtgcacggaaagaggtacgcatacaaattcgactttcatggcattgctcaggcactccagccacaccccacagagtccagtatgtataagtacccttcagacatttcctatatgccttcttatcacgcacaccagcagaaggtcaattttgtgcctccccacccctccagtatgcccgtgactagttcttccttcttcggcgctgcctctcagtattggacgagtccaacagggggtatttaccctaatcccaacgtgccacgccatcccaacactcatgtgccttcccatttgggctcttactattag

SEQ ID NO: 188290 - DNA, 1260 bp, synthetic construct
  misc_feature 1..1260: note = Description of Artificial Sequence: Synthetic coding sequence
  source 1..1260: mol_type = other DNA
atgaccgccagcggcagccccgactacggccagccccacaagatcaatcctctccctcctcaacaggaatggatcaaccagcccgttagagttaatgtgaagcgcgagtacgaccacatgaatggctcgcgcgagtcgccggttgattgttctgttagtaagtgtagcaagttagtgggaggcggcgaatctaatccaatgaactataatagctacatggacgaaaaaaacggacctcccccacctaatatgaccactaacgagcgacgggtaatagttccagccgacccaacactgtggacacaggaacacgtgagacagtggctcgaatgggcgatcaaagaatattcattgatggagattgatacttctttcttccaaaatatggatggtaaagaactgtgcaaaatgaacaaagaggatttcctaagagccacaaccctctataacacagaggtcctcctctcacatctcagttacctgcgagagtcgagcctgctggcctataatactacttcccatactgaccagagttctagactgtctgtgaaagaagatccatcttatgattctgtccgccgaggggcatggggtaataacatgaattcaggactcaacaaatcacctccattgggtggcgcccaaacaataagcaagaacacggaacagcggccccagcctgatccctatcagatccttggtcccactagttctcgactcgctaatcctgggagcggacagattcagctgtggcagtttttactcgaactgctaagcgatagcgccaatgcttcgtgtatcacatgggagggtacaaacggcgagttcaagatgactgaccccgacgaggtcgcccgccgttggggggagcgaaagtcaaaacctaacatgaattacgataagctgtccagggcgctacgttactattacgacaagaatataatgacaaaggtgcatggcaaacgctacgcctacaagttcgacttccatggcatcgcccaggcattacagccccatccaacggagagtagcatgtataaatatccttcagatattagttacatgcccagttaccatgcacaccaacagaaggtcaacttcgtgcccccccacccctcttctatgccggtgaccagtagctcattcttcggggctgcttcccaatattggacgagccctacaggagggatttaccccaaccctaacgtgccacgtcaccctaatactcatgtacctagccatcttggaagctactactag

SEQ ID NO: 188291 - DNA, 1359 bp, synthetic construct
  misc_feature 1..1359: note = Description of Artificial Sequence: Synthetic coding sequence
  source 1..1359: mol_type = other DNA
atggacggcaccatcaaggaggccctgagcgtggtgagcgacgaccagagcctgtttgacagcgcctacggtgccgcggcgcacttgccaaaagctgatatgacggcaagcggcagtcctgactacggccaacctcataagataaacccgctgcccccccagcaagagtggataaatcagccggtcagggtgaacgtgaagagggagtatgatcacatgaatggatctcgcgagagccctgtcgattgttcggtgagtaagtgcagtaagcttgtagggggcggagaatccaacccaatgaattacaacagctatatggatgagaaaaacgggcctccccccccaaacatgaccaccaacgagaggagggtgattgtgcccgccgacccaaccctttggactcaagaacatgtgcgtcagtggcttgagtgggccataaaggagtactcacttatggaaatagatacaagtttcttccagaacatggacggaaaagagctgtgcaagatgaataaagaagactttcttagagcaaccacgctgtataacacagaagtgttgctttctcacttgagctacttgagggaaagctccttgctagcctacaacacaacttcccataccgaccaatcttctcgactgtcggttaaagaggaccctagctacgactctgttcgaaggggcgcttgggggaacaacatgaactctgggttgaataaatcccctcccctgggtggagcacagacaatcagcaaaaacaccgagcagcggccccaaccagacccttaccaaatcctgggccctaccagtagtaggctggcgaaccccgggtctgggcaaattcaactttggcagtttttactcgagctactcagcgacagtgccaatgcgagttgtattacgtgggaagggacgaacggagagttcaagatgaccgaccccgacgaggtcgctcgcaggtggggcgagagaaaatcgaagcccaacatgaactacgacaagctctctagggccttaaggtactactatgacaaaaatatcatgactaaggtgcacgggaaacggtatgcttacaaattcgatttccacgggattgctcaagcgctgcaaccgcaccccacggaatccagcatgtacaagtatccgtccgatatctcttacatgccatcataccatgcgcatcagcaaaaggtcaacttcgtgcctcctcatccatcttcaatgcccgttaccagtagctcttttttcggagctgcctcacaatattggacaagccccactggcggaatatatcctaatcctaacgtgccacgccaccccaatactcacgtaccttcacacttaggcagttactactag

SEQ ID NO: 188292 - DNA, 780 bp, synthetic construct
  misc_feature 1..780: note = Description of Artificial Sequence: Synthetic coding sequence
  source 1..780: mol_type = other DNA
atggaccccggcagcctgctggcctacaacaccaccagccacaccgaccagtcatcgagactatccgtgaaggaggacccatcatacgactctgtgcgtaggggcgcctggggaaataacatgaactctgggctgaacaagagccctcctctagggggtgcacagaccatctccaagaacactgagcagcggccacagcccgatccataccagatcctgggcccaacctcaagtaggttagccaatccaggctccggtcagattcagctgtggcagtttctcctcgagctactgtctgattcagcgaacgctagctgcattacatgggaaggcactaacggggagttcaaaatgacagatccagatgaggtcgctaggaggtggggggaacggaaatctaaaccaaatatgaactatgacaaattgtccagagccctgcggtactattatgacaagaacattatgactaaggtgcatgggaaacgatacgcttataagtttgatttccatgggatcgcccaagctctgcagccacatccaaccgagtcgagcatgtataagtacccctcagacatatcatacatgccatcttaccacgctcaccaacagaaagtaaattttgttcccccacacccctccagtatgcccgttacctcatcttccttcttcggcgctgcctcacagtattggacgagccctaccggcggcatttatcccaatcctaatgtgcctagacaccccaatactcacgttccatctcaccttggctcatactactag

SEQ ID NO: 188293 - DNA, 1944 bp, synthetic construct
  misc_feature 1..1944: note = Description of Artificial Sequence: Synthetic coding sequence
  source 1..1944: mol_type = other DNA
atggccgaggaggaggcccccaagaagagccgggccgccggcggcggggcctcctgggaactgtgtgcaggtgctctatctgctcggctcgcggaagagggatctggagacgctggcggccgtcggagacccccggtcgatcctcgacggctggcgagacagctgctcctgctgctgtggcttcttgaggcacctctcctgcttggcgttcgcgcacaggctgccgggcaggggccaggccagggcccaggaccaggccagcaaccacctcccccccctcagcagcaacagtccgggcagcagtacaatggggagagggggatctcggtgccagatcatggttactgtcaaccaatcagtatcccactgtgcactgatattgcatataaccagaccattatgcctaatctattaggccatacgaaccaggaggatgccggcctggaggttcaccagttctatccattggttaaagtacagtgctccgcggagctgaaattcttcttatgtagcatgtacgcaccagtgtgcaccgtgttagagcaggcacttcccccttgcaggtccctgtgcgagagagctcgacaggggtgcgaggcccttatgaacaagtttgggtttcagtggccggataccctcaaatgcgagaagttccccgtgcacggtgccggagagctgtgtgtgggacagaatacttcggataaaggcactcctacccctagtctcttaccggagttttggacatcaaatccccaacatggcgggggaggccataggggcggatttcccggcggcgctggtgctagcgagagaggaaaattcagttgccccagggccctgaaagtaccctcatatctcaattaccacttcctgggggaaaaagattgtggggccccttgtgagcccaccaaagtttacggtcttatgtattttggccctgaagagctgcgcttctcacgcacttggattggcatatggtctgtgctatgctgtgccagtaccctctttacagtgctgacctacttggtcgatatgagaagattttcttacccagaacggcctatcatattcctctctggctgttacacagctgttgccgtcgcatatatcgccggattcctcctggaagaccgcgtggtatgcaacgataaattcgcagaggacggagcccggacagtggcccaagggactaaaaaagaaggctgcaccattcttttcatgatgctgtacttcttctcaatggcctccagcatttggtgggtgattctgagcctgacttggttcctggctgccgggatgaaatgggggcatgaagcaatcgaggctaactcacagtactttcatctggccgcttgggccgttccagcaattaaaaccattaccatactagctcttggtcaggtagacggggatgtcttaagtggtgtctgcttcgttggactaaacaatgtggacgctcttcgaggttttgttctggctcccctctttgtttacctcttcatcgggacttctttcctcctagccggcttcgtgagcctgtttcggattcggaccataatgaagcatgacggcaccaagacggaaaagcttgaaaagctgatggtgagaatcggagtcttttcagttctttatacagtaccagctacgatcgtgatcgcctgctacttctatgagcaggcctttcgggatcagtgggagcgatcgtgggtggctcaatcctgtaagagctacgcaatcccatgccctcatcttcaggcgggagggggcgcaccaccccacccgccaatgtccccggattttacggttttcatgatcaaatatctgatgaccctcatcgttggaattacctcaggcttctggatctggtcaggcaaaaccctcaatagttggcgaaaattttatacacgcctgacaaattccaagcagggagaaacgacggtttag

SEQ ID NO: 188294 - DNA, 1284 bp, synthetic construct
  misc_feature 1..1284: note = Description of Artificial Sequence: Synthetic coding sequence
  source 1..1284: mol_type = other DNA
atggaggccatggccgccagcaccagcctgcccgaccccggcgactttgataggaacgtgccgaggatctgcggggtatgtggagatcgcgctactggattccatttcaacgccatgacctgcgaagggtgtaaaggcttctttaggaggtctatgaaaaggaaagccttattcacatgcccttttaacggggactgtaggatcaccaaggataatcggagacattgccaggcctgcaggctgaaaaggtgcgtagacatcggcatgatgaaggagttcatactcacggacgaagaagtccagcgaaaaagagagatgatcttgaagcggaaggaggaggaagcactgaaggattctctgcgacccaagctgtccgaagagcagcaaagaatcatcgccattctgctagatgcacaccataagacttatgaccctacctatagtgatttctgtcaatttaggccacctgtgagagtgaatgatggcgggggatcgcacccttcccgccccaatagtcgccatactccatccttttctggcgactcctcatcctcatgtagcgatcactgcattacctcttcagacatgatggattcaagcagtttcagcaaccttgacctgtccgaggaagattcagatgacccctccgtgacactggaactcagtcagctgagtatgcttccccacctggcagatttagtgtcatattctattcagaaggtgatcgggttcgccaaaatgatccctgggtttagggaccttacatctgaggaccagattgtgcttctcaagagtagcgcgattgaggtcatcatgctacgtagcaatgagagtttcacaatggatgacatgagttggacatgcggtaaccaggactataaataccgggtgtccgatgttaccaaggccggccactcattagaattaattgagcctctgattaaatttcaagtgggtctgaagaagctcaatctgcatgaggaggaacatgttttgctgatggctatttgtatcgtgagcccagatcggccgggtgttcaggatgctgcactgatagaggctatccaggatcgtctgagtaatactctccagacgtatattcggtgccggcatcccccccccggcagtcacttactgtacgccaagatgattcagaagctcgcagatttgaggtcactcaacgaggagcattcaaagcaatatagatgtctgagcttccagccagagtgctctatgaaattgacccccttggtgctggaggtgttcggaaatgaaatcagttag

SEQ ID NO: 188295 - DNA, 1365 bp, synthetic construct
  misc_feature 1..1365: note = Description of Artificial Sequence: Synthetic coding sequence
  source 1..1365: mol_type = other DNA
atgcccgcccaccgggaccccgacgtgcagggccaccggctgcagcatgactcttacgcccaaccggatggacccagggagcctgcccgcgggagccatccagtggccagagtcagggcagctggcggagtacgtctgcctaggccaccgccgttgctgcccgtcctggctgtgcgcgcagacgtgcaccgcgcaggactgtatcctcatcctcgcctgccgggccacgtcagagctggacctgcccaggtgctgcccgactatggagctgtccagcttcaggtggccaggctgcccggcctgccggaaacccctcaacaggagcgaccgcagctgcccgtgcacgggggcgcccagcagcgcctcgggagggcacatccggggctcgggccagtgcccgcagcggttcccgccgctgctgcaccccagagggcaggggcccctgccgaggggagaggccctcgtgcgcggcggcttcgtcaaccgggccaggttccccctcggggcgaagagagggtcgtacgcgcagcactgcacgctagacgcgggagggtgctcgagccaaggggccaggctctgcgctctgggctggctggccacctgggtggcgccgtcctgcttttacagcggcttcatcgggcccacctcccacacagacctggccctctaccccttcccagagccccacatcacttgccactgcacgtgctgcttagacttctgcgaggccttccacatccgcctctccggcggaggagagaacataggcttcgccccggccagcgtcccgccctgtgccaccctggtgggacaggcgagcacagactgcacgccggtctcccaggcccactcttgctgcgccacggccagctcgccgtggttgggggcccacatgctcacttagttccaggtcggcggcaggaagtgggccctcgcgggcatcggtcacaacagcagcttttacccccgggatcccttggtcaccctggaggggaggatcacccagaccccgggcatgcccagggtggcggcgggcgtgctcaccggggcttgttaagggggcagcatggcaggcagcgtgcacatcgtctccgagcacacagtcctggccttctgcccgggcacagacatgtattgcacccgttagggttacgcggacccgtccctcacccagaaggcgacgaggatggacgacgcgagcacggacaggctggcgaggcgcatggagcatatcgagctctgttatgcgcggtgcaccgcgcagggcatctgtgtgacaggctcctactgcttaggaccccccagcatggtctcctggaggatcccggaggggccgcacaagtccagaatgaacagccagactag

SEQ ID NO: 188296 - DNA, 1698 bp, synthetic construct
  misc_feature 1..1698: note = Description of Artificial Sequence: Synthetic coding sequence
  source 1..1698: mol_type = other DNA
atgcggccccggagcgccctgccccggctgctgctgcccctgctgctgcttccagctgccggtcctgcccagttccatggcgagaaggggattagtatacctgatcatgggttttgtcagcccatctccattcccctgtgtacagacatcgcttataatcagacaataatgcctaatttgctaggacacaccaaccaagaagacgccggcctcgaggtccaccagttttaccccctggtgaaggtgcagtgtagccctgaactgcggtttttcctgtgtagcatgtacgcaccagtctgtaccgtgctggagcaggcaatacctccctgtagaagtatttgcgaacgggccagacaaggatgtgaagccctgatgaacaagttcggctttcagtggccagagcggttgcggtgtgaacatttcccgagacacggggccgagcagatctgcgtgggtcaaaatcacagtgaggacggtgccccagcgcttcttacgacagcccctcctcccggtcttcagcctggggcagggggaacccccggcggaccaggcggcggaggcgcccctcctagatatgcaacgctggaacatcctttccactgtccacgagtactaaaagtcccaagttatctgagctacaagtttctgggcgagcgggactgtgctgcgccttgcgagcctgccagaccagatggatctatgtttttttcgcaggaggaaactaggtttgcccggctgtggattctgacgtggtcagtgctgtgctgcgcttctacctttttcacagtaactacatatctggttgatatgcagagatttagatatcccgagcgaccgatcatcttcctctccggctgctataccatggtgtcagtagcctatatagcagggtttgtcctgcaggaacgggtcgtctgtaacgaacgatttagtgaagatggctatcgcactgtagtccaaggtacaaagaaagaagggtgcaccattttgtttatgatgctgtattttttcagtatggcgtctagtatttggtgggtgatcttatcgctgacctggtttctcgctgccggcatgaagtggggccacgaggcgatcgaggccaatagtcagtatttccaccttgccgcctgggcagttcccgctgtgaagacaatcacaattctggccatgggccagatcgacggagacttactgtccggagtgtgcttcgtgggactcaatagtctggaccctttacggggctttgtgttagcgccactgttcgtttacctgttcataggtactagcttcctactggccgggtttgtaagtctgttcagaattagaacaattatgaagcatgatggaaccaaaacagagaagctggagcgactgatggtccgcatcggagtgttctccgtcctatatactgttcccgctaccattgtcattgcatgttacttctacgaacaagccttccgcgagcattgggagaggtcatgggttagtcagcactgcaagtcactggctataccctgcccggcccactacacaccccggatgagccccgacttcacagtatacatgatcaaatatcttatgacgctgatcgttggtataacttccggcttttggatttggtcgggaaagacattgcatagttggaggaagttctatacgcgtttgacaaattccagacacggagagaccactgtttag

SEQ ID NO: 188297 - DNA, 1926 bp, synthetic construct
  misc_feature 1..1926: note = Description of Artificial Sequence: Synthetic coding sequence
  source 1..1926: mol_type = other DNA
gcccggggcgtgagcggctgcagcgtgcggccccggcaggccagcgggcaagcacaccggcctctcccacgtccagccagtccaactctgcgcccccgggtgaagtttgcaaaaaggagaggaagaaggcaaccgcagagaggaggcggaggagaagaagcccaaagccctggctggggacggggacgtggaggtcgacaaggcgctggctggggtgcggcggcctctatgcgacctcggtctgcactgcctcgcctgctgctgccccttctgctgttacccgcggctgggcctgcccagttccacggggaaaagggcatatcaatccctgaccacggtttttgccagccaatttcaattccactgtgtaccgatatcgcatacaaccaaacgataatgcccaatctgctgggtcacacaaatcaggaagatgccgggctggaggtacaccagttctaccccctcgtcaaggtgcagtgcagccccgaactccggtttttcttgtgcagtatgtatgccccggtgtgcacggtgttagagcaggcgatccctccttgtaggtctatctgtgagcgggctcggcaggggtgtgaggctctgatgaataagttcggctttcagtggcctgagcgactcagatgtgaacactttcccagacacggagctgaacaaatctgcgtcggccagaatcatagtgaggatggggcacccgccctgctaaccaccgcacctccacctgggctgcagcctggggccgggggaacccccggcggccccggagggggcggtgctcctcccaggtacgctacactggagcacccctttcactgccccagagtcctcaaagtgccctcctatctgagttataagtttttgggcgagcgcgattgtgctgccccgtgcgagcccgctaggccagatggaagtatgttcttctctcaagaggagactagatttgccaggctgtggattctgacctggagtgttctgtgctgtgcatcgactttttttactgtcaccacctatctggtagacatgcagcgattcaggtatccagagcgacctattatcttcctgtcgggttgctatactatggtgagtgttgcctacattgcaggatttgttctgcaggaaagagtggtgtgtaacgaacgatttagtgaggatggctacagaacagtggtgcagggtactaagaaggaaggatgtaccatcctgttcatgatgttatacttcttttcaatggcgtctagcatatggtgggttatcttgtcccttacctggttccttgccgccggcatgaagtggggtcatgaagccatcgaagctaactctcagtattttcatctggctgcttgggccgtcccagccgtgaagactatcacaattctggccatggggcagatagacggcgatctgttgtcgggggtctgcttcgttgggttgaattcactggatccacttaggggcttcgtgctggctccactcttcgtctatttgtttattggcacgagcttcttgcttgccgggtttgtaagcctcttccgcatccggacaattatgaaacatgacggcaccaagacagagaagcttgaacgcttaatggttagaatcggggtgtttagcgtcctctacacagtcccagccacaatagttatagcttgctatttctatgagcaggcctttagagaacattgggaaaggagttgggtgtcccagcattgcaaatctctggcaattccttgccccgctcattatacaccgcgaatgtcccccgacttcaccgtctatatgatcaagtacctaatgaccttgattgtggggattacctctgggttttggatatggtccggcaagacattgcacagctggaggaagttttatactaggctgacaaactccagacacggtgagactaccgtatag

SEQ ID NO: 188298 - DNA, 2001 bp, synthetic construct
  misc_feature 1..2001: note = Description of Artificial Sequence: Synthetic coding sequence
  source 1..2001: mol_type = other DNA
atggccatgacctggatcgtgttcagcctgtggcccctgaccgtgttcatgggacacattggaggtcattccttattttcatgcgagccaataacactgcgaatgtgccaggaccttccatataatacaaccttcatgccaaacttgctgaaccactacgatcagcaaaccgctgcacttgcgatggagccctttcaccccatggtgaatctcgactgttctcgggatttccggcccttcctgtgcgctctatatgcaccaatttgcatggaatacgggcgggtaaccttgccttgtcggagactgtgccagagggcatactccgaatgttccaaacttatggagatgtttggagtgccttggcctgaggatatggagtgctctcgattcccagactgtgatgagccctatcccagactggtcgatctgaatctggctggagaacccactgagggggctcctgtggccgtgcaaagagactatgggttttggtgtccacgggaactgaaaattgatcccgatctgggttacagctttctgcatgttagggattgttccccaccttgtccaaatatgtatttcaggcgcgaggagctgtcgttcgcccgttattttatcggcttgattagcattatctgcttatcagctaccctgtttacgtttttaacattccttattgatgtcacacgttttcgctatcccgagcggcctataatcttctatgccgtgtgctatatgatggtgagtctcatttttttcattggatttctcctcgaagatagagtagcctgcaacgcttcaatccccgcccagtataaggcatcgacagtcacccaaggcagccacaacaaggcctgcacgatgctgtttatgatcctgtactttttcactatggccgggtcagtttggtgggtcatcctcaccattacatggtttttggctgccgtccccaagtggggtagtgaagcaattgagaaaaaagccctgctcttccacgctagtgcctggggaatccccggtactctgaccatcatactcctggctatgaataagatagaaggtgacaacatttctggagtatgctttgtgggtctgtatgacgttgacgctctccgctactttgtattggccccactctgtctctacgtggtggtaggcgtaagcctgctgctggctggaatcatttcccttaatcgggtgcggatcgaaatccctctggaaaaagaaaaccaggacaaactcgtgaagtttatgataaggataggggttttttccattctctatctggtcccccttttggtagtcattggctgctacttttacgagcaggcctatcgcgggatttgggaaacaacttggattcaggagcggtgccgcgagtaccacatcccttgtccataccaggtgactcaaatgtcccggccggatcttattctttttctaatgaagtatctgatggcacttatcgtgggcatcccatccgtgttttgggtggggtccaagaagacgtgcttcgaatgggcgagcttctttcatgggaggcgtaagaaagagattgtgaatgaatcccgccaggttctgcaagagcctgacttcgctcagtcgctactgcgggatcctaacacaccaattatacgaaaaagtcgggggacctccacccaggggacttcaacccacgcatcttctacgcaattggccatggtggacgaccaaaggagcaaggccggaagcattcatagtaaggtctcctcttatcatggcagcctccatcgctcccgtgacgggagatacaccccctgcagttatcggggcatggaggagaggcttcctcacggatccatgtctcggcttactgatcactctagacacagctcctcacacagactgaacgaacagagtcggcactccagtatcagggacttatcgaacaatccaatgacgcacatcactcatgggacctctatgaatcgcgtcattgaagaagacggcaccagcgcttag

SEQ ID NO: 188299 - DNA, 108 bp, synthetic construct
  misc_feature 1..108: note = Description of Artificial Sequence: Synthetic coding sequence
  source 1..108: mol_type = other DNA
atggccatgacctggatcgtgttcagcctgtggcccctgaccgtgttcatgggtcatataggaggccattcacttttctcatgcgagcctatcacactccgcatgtag

SEQ ID NO: 188300 - DNA, 2001 bp, synthetic construct
  misc_feature 1..2001: note = Description of Artificial Sequence: Synthetic coding sequence
  source 1..2001: mol_type = other DNA
atggccatgacctggatcgtgttcagcctgtggcccctgaccgtgttcatgggccacattggcggccatagtcttttttcgtgtgagcccataactctgcggatgtgccaagacctgccctataataccacttttatgccaaacctcttgaaccattatgatcagcagactgcagctctggctatggaacccttccatccaatggtgaacctcgactgttctagggattttcgtccctttctgtgcgctctctacgcgcctatttgcatggagtatggaagggtgactctgccctgcaggcgcctgtgtcagcgagcctacagcgaatgcagcaaattgatggaaatgtttggcgttccatggccagaagatatggagtgcagcagattcccagactgcgacgaaccgtaccctcggctggtggatctgaacctcgccggagagcccactgaaggcgctcccgtcgctgttcagagagactatggcttctggtgtccgagagagctgaaaattgatccagatctgggctactctttcctacatgtgagagattgctctcccccatgtcctaatatgtattttaggcgcgaagaactcagttttgctcggtattttattggtctgatatctatcatttgtctcagcgcaaccttattcacattcctcacttttctgatagatgtcacaagattcagatacccagagagacctatcattttctatgcagtttgttatatgatggtatccctgatcttttttatcggattcttgttagaagaccgcgtggcctgtaatgcatcaatccctgcgcagtacaaggccagcactgtgacacagggaagccataataaagcctgcacgatgctgttcatgatactttatttttttaccatggccggaagtgtgtggtgggttattctgactattacctggtttctagcagccgtgcccaagtggggatctgaagccattgaaaagaaagcactgctgttccacgcatccgcttgggggatcccaggtacactgacaattatactgctggctatgaacaagattgagggggataacatatcgggcgtttgttttgtcggcctctatgatgtggatgctctgcggtatttcgtgctggcccctctgtgcctgtacgtcgtggtcggcgtatctctgctactggccggaattattagtctgaacagagtcagaatcgaaatcccgttggagaaagagaaccaagacaagttggtaaagttcatgatccgcatcggagtatttagcatcctttaccttgtgcccttgctggtggtaattggatgttacttttatgaacaggcgtatcggggcatttgggagacaacatggattcaggagcgctgtagggaataccacataccctgtccttatcaggtgacccaaatgtctaggccagatctcatcttgttcctcatgaaatatttgatggcactgatcgtgggaatacccagcgtattttgggtggggtccaagaagacctgtttcgagtgggcatcctttttccatggcagacgaaaaaaggagattgtgaatgagtctcggcaagtgcttcaggagccagacttcgcccagtctttgctacgggaccctaacacaccaattattcgcaaaagccgcggcactagcacacagggaacctctacccacgcttcttctacccaactggccatggtagacgaccagcgctccaaggcaggctctatccactctaaggtctccagctaccatggcagtctacatagaagccgggacgggaggtacacgccttgcagttataggggcatggaagagcgcctgcctcatggatccatgtcccgactgactgaccattcacggcattcctcttcccatcgactgaacgagcagagccggcattccagtatcagggatctgtccaataaccctatgacacacattacccacggtaccagtatgaatcgcgtaatagaggaagacggcacctctgcctag

SEQ ID NO: 188301 - DNA, 1614 bp, synthetic construct
  misc_feature 1..1614: note = Description of Artificial Sequence: Synthetic coding sequence
  source 1..1614: mol_type = other DNA
atggcctggcggggcgccggccccagcgtgcccggcgcccccggcggggtcggcctctccttaggccttctgctgcaattactgctgctgctagggccagcaagaggttttggagacgaagaggaacgtcgctgcgacccaattagaatatcaatgtgtcagaacctgggctataatgtcactaagatgcctaaccttgtaggccatgaacttcaaaccgacgcagaactgcaactgacgacatttactcctttgattcagtatgggtgctcttcccaactgcagtttttcctgtgttccgtgtacgtgccaatgtgcaccgagaaaatcaatattcccatcggcccttgcggtgggatgtgcttatctgtgaagcgccgatgcgagccggtgctcaaggaattcgggttcgcttggccagagagcctgaactgtagtaaattccccccacagaatgatcataatcatatgtgcatggagggaccaggggacgaggaggttccgttaccgcacaaaacacccattcaaccaggcgaagagtgccattccgtggggacaaactcagaccagtacatctgggtgaaacgctccctcaactgcgtcctgaagtgcgggtacgacgccgggctgtacagcagaagtgctaaagaatttaccgacatttggatggcagtgtgggcgtcactgtgcttcatcagcacagccttcacagtgcttacctttctgattgactcttcccgattctcctaccctgagcgacctatcattttcctcagcatgtgttataacatatacagcatcgcttacattgtgcgattgacagtcggtcgcgaacgtattagttgtgattttgaagaggcagcggagccagtgttaatccaggaggggctcaagaacaccggctgtgcgattatttttctcctaatgtatttcttcggtatggcaagctcaatttggtgggtgatcctgacactgacgtggttcttagccgccggtttaaagtgggggcatgaagccatcgagatgcactcttcttacttccatatagcggcttgggccattcccgcagtgaagacaatagtcatcctaatcatgcggcttgtggacgctgacgaactgacgggactttgctacgtggggaaccagaacttagatgccctcacagggttcgtggttgcgccactgtttacttatctggtcattgggactctgttcatcgcagctggcctggtggcccttttcaaaattaggtccaacttacagaaagacggaaccaagacggataaacttgagcgtttgatggtgaagataggtgtgttcagcgtgctctacactgtccctgcaacatgtgtgattgcttgttatttctatgagatctccaactgggcccttttcaggtattcggctgatgactctaacatggcggtggagatgctaaagatcttcatgtccctgttggttgggatcaccagcggcatgtggatttggtctgctaaaacactccatacttggcagaaatgctcaaataggctcgtgaatagcggcaaagtgaagcgcgaaaaacgtgggaatgggtgggtgaagcccggcaaaggttccgaaactgtcgtgtag

SEQ ID NO: 188302 - DNA, 2121 bp, synthetic construct
  misc_feature 1..2121: note = Description of Artificial Sequence: Synthetic coding sequence
  source 1..2121: mol_type = other DNA
atggagatgttcaccttcctgctgacctgcatcttcctgcccctgctccgtgggcatagtctgtttacttgtgagcctattaccgtgccccgttgcatgaaaatggcatacaatatgacattctttcccaacttgatggggcactacgaccagagcattgccgccgtcgaaatggaacattttctacccctggcgaacctggaatgcagcccgaacatcgagacctttctctgcaaggcttttgtccccacctgtattgagcagattcatgtggtgccaccttgcagaaagctatgtgaaaaagtttattctgattgcaagaagctgatagataccttcggaattcgttggcctgaggagctggaatgtgaccgactgcaatattgcgatgagacagttcccgtgaccttcgatcctcacactgaattcctgggaccgcaaaagaaaacagaacaggtgcagcgagatattggattctggtgccccagacacctaaagacatctggagggcagggttacaagtttttgggtatcgaccaatgcgctcccccgtgccccaatatgtacttcaaatccgacgaattagaatttgccaaatccttcataggaaccgtgagtatcttttgcctatgtgcaacgttgttcaccttccttaccttcctgattgatgtacgacggtttcgatatcccgaacggccaattatctactactctgtgtgttattcgatcgtgtccctgatgtattttattggatttctactaggggacagtaccgcttgcaataaagccgatgaaaaactggagctaggggatacagtcgtgctaggaagccagaacaaggcttgtacagtgttgttcatgctgctgtatttcttcacaatggcaggcaccgtttggtgggttatactcacaatcacctggtttctggctgcagggaggaaatggagctgcgaggcgatagaacaaaaggcagtttggttccatgccgtggcatggggaacgcccggcttcttgacagtaatgctcttggccatgaataaggtggagggcgataacatttccggcgtctgcttcgtcggactgtatgacctggacgcctctcgctatttcgtgttactgcccctgtgtctctgcgtgtttgtcggcttgtccctcttgttggctggcatcatctctctaaaccatgtacgccaagtgatccagcatgatggccgcaaccaggaaaaactcaaaaaatttatgatccgaatcggggtcttcagcgggttgtatctggttccgctagtaaccctgttgggctgttatgtgtacgaacaggtcaatcgtatcacatgggagatcacctgggtgagtgaccattgccggcagtaccatattccctgtccataccaggccaaggctaaggctagaccagaattggccctgttcatgatcaagtatcttatgacgctgatagtgggcattagcgccgtgttctgggtgggcagcaagaagacttgtacagaatgggcaggattctttaagaggaaccggaaaagggaccccatatctgagagcagaagagtcctgcaggaaagctgcgagttctttctaaagcacaattccaaagtgaaacacaaaaaaaaacactacaaaccttcttcccacaaactcaaggtcatttctaaatccatgggcacgagcactggagccacagctaatcatgggactagcgccgtagcgattacaagtcatgattatctgggacaggaaacactgaccgaaatccagacttctccagagacgagcatgcgggaagtgaaggccgacggagcttcaacaccaagattacgggagcaggactgcggcgaaccagctagtccagccgcatccattagcaggctgagtggggagcaagtggacggaaagggccaggccgggagcgtctcagagagcgcgcgttcagaagggaggatcagccccaaaagtgacatcaccgataccggacttgcacagagcaataacctgcaagtcccaagcagctctgaaccttccagcctgaagggaagtaccagcctactggtgcatccggtaagtggcgtgcgcaaggaacaggggggcgggtgccattctgatacatag

SEQ ID NO: 188303 - DNA, 2121 bp, synthetic construct
  misc_feature 1..2121: note = Description of Artificial Sequence: Synthetic coding sequence
  source 1..2121: mol_type = other DNA
atggagatgttcaccttcctgctgacctgcatcttcctgcccctgcttcgaggacacagtctttttacttgcgagccaataacagtgcctcggtgtatgaagatggcctacaacatgacatttttccccaatctgatgggccattatgatcaatccatagcagcagtagagatggagcacttccttccattggcaaatctagaatgttcaccgaacatagaaaccttcctgtgcaaagcatttgtaccaacatgtattgaacaaattcatgtagttcctccttgtcggaagttatgtgaaaaggtgtattccgactgtaagaagcttattgatacattcggaatccggtggcccgaggagttagaatgtgatcggttacagtattgcgatgaaaccgtgcccgtaacctttgatccccacactgaattcttgggcccacagaagaagactgagcaggtacagcgagatatcggcttttggtgcccacgacatttgaagacctccggaggacaaggctataagtttttgggaattgaccagtgcgcaccaccttgtccgaacatgtatttcaaatcagacgaactggagtttgcaaagtcttttataggaacagtgtctattttctgcttatgtgccaccctattcaccttcctgacctttcttatagatgttcggaggtttcgctatcctgaacggcctatcatctattacagcgtttgctattcgattgtgtcactgatgtattttatcggatttctattgggagatagtacagcctgcaataaagccgacgagaagcttgagttgggtgatactgtggtcttaggatcccagaacaaggcttgcactgttttgttcatgctgctgtacttctttaccatggccggcaccgtgtggtgggtgattctgactatcacctggttcctggcggccggcaggaagtggtcatgcgaggctatcgaacagaaagcagtctggttccacgcggtggcgtggggcacccccggctttttgacagttatgctcctggctatgaacaaagtcgagggtgacaatatttcaggcgtatgcttcgtggggctttatgatctcgatgcatcccgctatttcgttctgcttccactgtgtctctgcgtcttcgtagggctcagcttgctgttggctggaattatcagcctgaatcatgtgcgccaggtcatacagcacgatggccggaatcaggagaagctgaaaaaatttatgatcaggattggtgtgttttccggcctctacctggtgcctctcgtgacactgttaggttgttacgtttatgaacaagtgaaccgcatcacttgggaaattacctgggttagcgaccactgccggcaatatcatatcccatgcccctaccaggctaaggctaaagctcgcccagagttagcacttttcatgatcaaatatttgatgaccctgatcgtgggaataagcgctgtgttctgggtggggtctaaaaagacctgcacagagtgggcagggttttttaaacggaacaggaaacgggaccctataagcgagagccggagggtattacaggaatcatgtgagttcttcctgaaacacaacagtaaggttaagcacaagaagaaacactataaaccctcttcacacaagctgaaggtaatttccaagtccatgggtaccagcactggggctacagcgaatcatggtacctccgccgtcgcgataacctcacacgattatctcggccaggagacacttaccgagatccagacatctcccgagaccagcatgagggaagtcaaggcggatggtgcttctactccccgattgagggaacaggattgtggggaaccggcgtcccctgcagcaagtatctctaggttgagcggtgaacaggtggacggtaagggccaggcaggaagcgtgtctgagagcgctcgaagcgagggcagaatctcccccaaaagcgatataacggacaccggactggctcagagcaataacctccaagtacctagctcatctgagccttcgagtttgaagggttcgacgtcgctccttgtgcacccggtgtctggcgtacgcaaagaacagggaggcggatgtcatagcgacacctag

SEQ ID NO: 188304 - DNA, 2025 bp, synthetic construct
  misc_feature 1..2025: note = Description of Artificial Sequence: Synthetic coding sequence
  source 1..2025: mol_type = other DNA
atgaagatggcctacaacatgaccttcttccccaacctgatgggccactatgatcagagcattgccgcagtcgagatggaacacttcttaccgctggcaaacctggaatgcagccccaacatagagacgttcctttgcaaagccttcgtacctacttgtatagagcagattcacgtggtccctccatgccggaagctctgtgaaaaggtgtattcagattgtaagaaactgatcgacacctttggcattcggtggcctgaggagttagagtgtgacaggctgcagtattgcgatgagaccgtgcccgtgactttcgaccctcacacagagtttctgggtcctcaaaagaagaccgagcaggtccaaagagatattgggttctggtgtcctagacacttaaaaacttcagggggccaagggtataagttcctgggaattgatcagtgcgcaccaccgtgtccaaacatgtactttaaatccgacgaactggagttcgcaaagagctttatcggaacagtatccattttttgtctctgtgccaccctgtttaccttcctcactttcctgattgatgtgcggcggttccgctatcccgagaggccgatcatctactactccgtgtgttattctattgtctccctcatgtacttcattggctttctcctgggcgattccactgcctgtaataaggcagacgagaaactggagctgggggataccgtggtcttgggctcgcagaataaagcttgcacagtgctgttcatgctgttatatttttttactatggctggaacagtgtggtgggtgatcctgactatcacctggttcctggccgccggcaggaaatggtcctgcgaggccatagagcagaaagcagtctggttccacgcagtggcctggggtaccccagggttccttaccgtgatgttgcttgccatgaacaaagtggagggtgataacatttccggagtgtgtttcgtgggactgtatgatctggatgctagcaggtactttgtgctgctgcctctgtgcctctgcgtctttgtcggtctgtctctcctactggccggaatcatctccctgaatcacgtgaggcaggtcatccagcatgatggtcgcaatcaggagaaacttaagaaatttatgatcagaatcggcgttttttctggcttgtatctggtgcccctcgtcaccttactcgggtgttatgtgtacgaacaggtaaataggattacctgggagattacatgggtgagtgaccattgccgtcagtaccatatcccatgcccctatcaggcaaaagctaaagcccgcccagaattggccctttttatgatcaaataccttatgacactgattgtggggataagcgctgtgttttgggtcggatcaaagaagacatgtaccgagtgggcaggattttttaaacgcaaccggaagcgggacccaatttcggagagccggcgcgtgctgcaggagtcctgcgagtttttcctgaaacataatagtaaggtaaagcacaagaagaaacactataagccctcctcacataagctgaaagttataagcaaatcaatggggacctcaaccggcgcaactgccaatcatggcacgagcgctgtggctattacctcacatgactaccttgggcaggagacactgactgaaatccaaactagccccgagactagtatgcgggaagtgaaggctgacggcgctagtactcctcgcctgcgcgaacaggattgcggagagccagcgagtccagccgcttcgatttcacgcctgtctggcgagcaggtggatggtaaaggccaggctggttccgtgtccgaatccgcccggtccgagggccgcatctcaccaaaaagcgacatcaccgatacaggacttgctcagagcaacaatctgcaagtgccgtccagctccgaaccctcctccctgaaaggaagtaccagccttctagtccaccccgtctcaggggttcgcaaagagcaggggggcggttgccacagcgacacttag

SEQ ID NO: 188305 - DNA, 1956 bp, synthetic construct
  misc_feature 1..1956: note = Description of Artificial Sequence: Synthetic coding sequence
  source 1..1956: mol_type = other DNA
atgctggcccagcacttcctgcccctggccaacctggagtgcagcccaaacatcgaaaccttcctctgtaaagcattcgtgccaacatgtatagaacaaatccatgttgtgcctccctgccgaaagctttgcgaaaaggtatatagcgactgtaagaagctcatcgatacattcggaattagatggccggaagagctcgagtgcgataggctgcagtattgcgacgagactgtgcccgtgacattcgacccgcacactgagtttctcggtccacagaagaaaactgaacaagtgcagcgggatattggcttctggtgtccccgccatctgaaaacaagcgggggccagggctacaagttcttaggtatcgatcagtgtgcaccaccctgccctaatatgtattttaagagtgacgagctggagttcgccaagtcattcattggtacagtatctatcttctgcctatgcgcgactctgtttacctttcttacttttttgatcgacgtgaggcgctttcgatatccagagcgacccattatctattattctgtgtgctactccatcgtctctttaatgtatttcatagggtttctcctcggtgactcaacggcctgtaataaggctgacgagaaattggagctcggtgatactgtggttctgggatcccagaataaggcctgtacagtcctcttcatgctcctctacttcttcaccatggcaggaacagtatggtgggtgatcttgacaatcacttggttcctcgctgccgggaggaagtggtcctgtgaggccattgaacagaaggctgtgtggtttcatgccgtggcctggggaaccccaggttttctaactgtcatgctcctggccatgaacaaggtggagggcgacaacatatcgggagtgtgtttcgttggactgtacgatcttgacgcttctagatattttgtacttctacctctgtgtttatgcgttttcgttggactcagcctcctactagccggtattatcagtttaaatcacgtcaggcaggtgatccagcacgacgggcggaaccaagagaagctgaagaagttcatgatccgaataggggtttttagcggcctataccttgtccctctcgtgacactcttggggtgttacgtatacgagcaggtgaatcgaatcacctgggagattacttgggtttcagaccactgccgacaatatcacatcccttgtccctatcaggccaaagccaaggcaaggccggagttggcgctttttatgatcaagtatttgatgaccttaattgtggggatctccgctgtgttttgggtgggctcaaagaagacatgcacagagtgggctggctttttcaagcgaaaccggaagcgagacccaataagtgaatcgagacgcgtcctgcaggaaagctgcgaattttttttaaagcacaattctaaggtgaagcataagaagaagcattacaagcctagttctcacaagctaaaagtgatcagcaagagcatggggacttccacaggtgcaaccgcaaaccatggtaccagcgccgtggcaatcacctcccatgactatcttggccaggagaccctgaccgaaattcagacgtctcctgagaccagcatgcgggaagtgaaggcggacggtgctagtactccacgcctgagggaacaggattgcggcgaaccagccagtcctgctgcaagcatttctcggctctccggagagcaggtagacggtaaaggccaagctggatccgttagcgagagcgccaggtccgaaggccgcattagtccaaagagcgacatcaccgataccgggctcgcacagagtaacaacctgcaggtaccaagcagtagcgagccatcgagcctgaaaggttcgacgtccctgctcgtacaccccgtatccggcgtgcgaaaggaacagggcggcggctgccacagcgacacttag

SEQ ID NO: 188306 - DNA, 1206 bp, synthetic construct
  misc_feature 1..1206: note = Description of Artificial Sequence: Synthetic coding sequence
  source 1..1206: mol_type = other DNA
atgacccgggtgctgccccggtggaagtggagctgcgaggccatcgaacagaaggcggtatggttccacgcagtcgcctggggcacacctggattcctgactgtaatgctgctggctatgaacaaggtggagggagacaatatttccggggtgtgcttcgtgggtctttacgacctggacgcgtctaggtatttcgtcttattaccactctgcctctgcgttttcgtggggctctctttactgctggctggtatcatttcactgaatcatgtgaggcaggtgattcaacatgacgggcgaaatcaagagaagctgaaaaaattcatgatcagaattggcgttttttctggtctctatctggtgccattagtgactctgctgggctgctacgtgtacgagcaagtaaatagaatcacatgggaaattacgtgggtgtctgatcactgtagacagtaccacataccctgcccctatcaggctaaagcgaaggctcgccctgagcttgctctgtttatgattaagtaccttatgaccctgatcgtaggcatcagcgctgtgttctgggtggggtcaaagaagacctgcacggaatgggccggatttttcaagagaaatcggaaacgagaccctatctctgagagcagacgagtcctacaggagagctgcgagttcttcttgaagcacaatagcaaggttaagcacaaaaaaaaacactacaagcctagctcccataaattgaaagtcatctcaaagtcaatgggcacaagcactggtgcaacagctaaccatggaacaagcgcagtggctataacatcacatgattacctgggccaggaaacccttaccgaaatccagacatcaccagaaacttccatgcgtgaggtcaaagccgatggtgccagcaccccccgccttcgtgaacaggactgcggagagccggccagtcctgcggccagtataagccgtctgagtggtgagcaggttgatggaaaaggacaggccggatcggtttccgaatcggcacggagtgagggccggatcagccctaagtccgacatcacggatactggcctggcacagagcaacaatcttcaggtgccatcgagctccgaaccatctagcctaaagggttcaacatcattgctggtccaccccgtgagtggggtcagaaaagagcaaggcggcgggtgccacagcgatacttag

SEQ ID NO: 188307 - DNA, 2085 bp, synthetic construct
  misc_feature 1..2085: note = Description of Artificial Sequence: Synthetic coding sequence
  source 1..2085: mol_type = other DNA
atggagtggggctacctgctggaggtgaccagcctgctggccgccttggcactactccaacgaagcagcggagctgccgcagcatctgcgaaggagctggcttgtcaagagatcaccgtgcctttgtgtaaagggatcggatataattacacatacatgcctaatcagttcaatcacgacacgcaagatgaggctgggctggaagttcatcagttctggcctctggtcgaaattcagtgcagtcccgatctgaagttttttctctgtagcatgtatactcctatatgcctcgaggattacaagaagccactgcccccctgtaggtccgtctgcgaacgggctaaagctggctgcgctccgttgatgcgacagtacggatttgcttggcctgatcgaatgcgctgcgatcgcctcccagaacaggggaaccccgacaccttgtgcatggattacaaccggactgatctgaccactgcggctcctagtccaccacggcgcctgcctcctcctcctccaggcgagcaaccgccatcagggagcggacacggccggccacctggcgctaggcccccgcatcgtggcggagggcgcgggggggggggaggggacgcggcagccccccctgccaggggtggtggcgggggggggaaggcgcgcccacctggtgggggcgctgccccctgcgaacccggctgccagtgtcgtgccccaatggtgtccgtgtcctccgaaagacaccctctgtacaatcgcgtgaaaaccggccagattgccaattgcgcactcccttgccacaatccgttcttctctcaggacgagcgtgctttcacggtcttttggattgggctctggagtgtattatgctttgttagtacctttgccaccgttagcacttttctgatcgatatggaaaggtttaaataccctgagagacctataatttttctgagcgcttgctacctgtttgtcagtgttggttacctggtgagactggtggctggccacgaaaaagtagcctgttccggaggtgcgcctggcgccggaggagccggcggcgccggtggagcggccgccggggcaggggcggctggagccggagcaggtgggcccggtgggcggggcgagtatgaggaactgggggcggtcgagcagcacgtgaggtacgagactacgggtccagctctctgtacagttgtgttcctgctggtatacttctttgggatggctagttctatctggtgggtgattctttcactgacctggttcctggccgccggcatgaaatggggcaacgaagccattgccggatactcgcagtactttcatctggccgcatggctggtccccagtgtgaaaagtattgctgtgcttgccctgagctcagtagacggagatcccgttgccgggatttgctatgttggaaatcagtccttagataatttaaggggattcgtgctagctcccctcgtcatttacttgtttatcgggaccatgttccttcttgccggcttcgtgtccctctttcggattcgctctgtaattaaacaacaggacggacccaccaagacccacaagctggaaaagttaatgatccgactcggcctcttcaccgtattatacacggttccagccgccgttgtcgtggcatgtcttttttacgagcaacacaacagaccaagatgggaagcgacccacaattgcccatgcctgcgggatctgcaacccgaccaggctaggcgcccagactatgccgtgtttatgctcaaatacttcatgtgtttagtcgtcgggataaccagcggcgtttgggtttggtccgggaagactcttgagtcctggcgctccttatgcacaagatgttgttgggcctcaaaaggagctgctgtgggtgggggcgcaggggctacagctgccggcgggggcggaggccctggcgggggaggcggaggagggccaggaggcggcggaggaccagggggcggtggcggaagcctgtatagtgacgtgagcacaggactgacctggcgaagtggcacggcctccagcgtgagctatcccaagcagatgccattgtcccaggtttag

SEQ ID NO: 188308 - DNA, 1776 bp, synthetic construct
  misc_feature 1..1776: note = Description of Artificial Sequence: Synthetic coding sequence
  source 1..1776: mol_type = other DNA
atggccgtggcccccctgcggggcgccctgctgctgtggcagctgctcgctgcaggaggggccgcccttgaaattggtaggtttgaccctgaaaggggaagaggagcagcaccatgccaagccgttgaaatccctatgtgccggggaattggttacaatctcacgcggatgcctaatttgctcgggcatacttcccagggggaagctgcagccgagctcgcagagttcgcccctctggtacagtacggatgccactcgcaccttcgctttttcctttgctcactgtatgcccccatgtgtactgaccaggtgtctacaccgatccctgcatgtcgtccaatgtgcgagcaggcacggctgcgctgcgctcctataatggaacaatttaactttgggtggccagatagcttggactgtgcaaggcttcctacaagaaatgacccacacgcactgtgtatggaagcgccagagaacgccacggccgggcctgccgagccccataagggcctcggcatgctgcccgttgctcctagacctgctagaccccctggcgacctgggcccaggagcaggaggttctggaacatgcgagaatcccgaaaagtttcaatatgtggagaaatctcggagctgcgctccgcgctgtggtccgggagtggaggtcttctggagtaggagggataaggattttgccctggtgtggatggccgtgtggtctgctttgtgcttttttagcaccgcgtttactgtactcactttcctgctcgaaccccaccgtttccaatatccagaaaggccgattatattcctgagcatgtgctacaacgtatatagcctggcattcctgatcagagccgtcgcaggggcccagagcgtggcgtgtgatcaagaagcaggggctctttacgtaatccaagaagggttggaaaacacgggatgcacgctggtctttttgctcctgtattacttcggcatggccagcagcctgtggtgggtcgtgctgactctgacgtggtttttggcggctggtaagaagtgggggcatgaagcgatagaagcgcacggtagctactttcatatggctgcctggggactgcccgcccttaaaaccatagtgattctaacgctcagaaaagtggctggggatgagctgaccggtctgtgctatgtagcctctactgacgcagctgcattgacgggctttgttctggttcccctgagcgggtacttggtgctaggttcttcatttctgttaacaggattcgtggccttgtttcatattaggaagattatgaagaccggaggtaccaacacggagaagctggaaaagttgatggtgaagattggtgtcttcagcatactgtacacagtacccgctacctgtgtcatcgtgtgctatgtgtacgaaaggctcaatatggacttctggcgcctgcgcgccacagaacagccttgtgccgccgccgccgggcccggtgggcgacgggattgcagcctgcctggcggatctgttccgacagttgccgtcttcatgttaaagatattcatgtccctggtcgtggggattacctccggggtatgggtatggtcatccaagacgtttcagacttggcagtcgctgtgctataggaagatcgcagctggccgagcccgtgctaaagcatgcagggcccccgggagttacggtcgcggaacacattgccactataaggcccctactgtcgtgcttcacatgaccaagacagaccctagcttggagaaccccacccatctctag

SEQ ID NO: 188309 - DNA, 978 bp, synthetic construct
  misc_feature 1..978: note = Description of Artificial Sequence: Synthetic coding sequence
  source 1..978: mol_type = other DNA
atggtgtgcggcagccccggcggcatgctgctgctgcgggccggcttattggccctggcagcgctgtgtctgctccgagttcctggcgcacgagcagctgcctgcgagcctgtgagaattccattgtgcaagagccttccttggaacatgacaaagatgcctaaccatctgcaccactctacccaagccaatgcaattctggctattgaacaatttgaaggccttctgggaacacactgctctccagacctcctcttcttcctgtgcgcgatgtacgccccaatctgcacaatcgatttccagcacgaacctataaaaccttgtaaatccgtgtgcgagagagcccgccaagggtgtgaaccaatcctcatcaagtaccggcactcatggccggaaaaccttgcttgtgaggaacttccagtgtacgaccgcggcgtgtgcatctcacccgaggcgatagttaccgccgatggtgctgactttccaatggacagcagcaacggcaattgcagaggggccagctcagagaggtgcaagtgtaagcctattcgcgcaacacaaaaaacctactttcgcaacaattataactacgtgattcgtgctaaagtcaaggagataaagaccaaatgccacgacgtgacagctgtcgtggaggttaaggaaatcctgaaaagtagcctggttaatataccccgcgacacagtgaacctgtacacgtcatccggatgcctgtgccctcccttgaacgtgaacgaagaatacattataatggggtatgaggacgaggaacggtctcggctgttgttagtggaagggagtatcgcagaaaagtggaaggacagacttgggaagaaggtaaagaggtgggatatgaaactgcgccaccttggactctcgaaaagtgacagtagcaactctgacagcacccagtctcaaaagagcggccggaattctaatcctaggcaggcccgcaactag

SEQ ID NO: 188310 - DNA, 930 bp, synthetic construct
  misc_feature 1..930: note = Description of Artificial Sequence: Synthetic coding sequence
  source 1..930: mol_type = other DNA
atggaggagctgctgcggcgggagctgggctgcagcagcgtgcgggccactggccactccggcggaggctgcatttcacagggcagatcctacgacactgaccaaggtcgcgtatttgtaaaggttaaccctaaagctgaggctagacgcatgtttgagggggagatggcaagccttacagcaattcttaagacaaacacggtgaaagtgccaaagcctataaaagtcctagatgctcccggcggcggatctgtgcttgtcatggaacacatggacatgagacatctgtccagtcatgccgccaaactcggtgctcagctggccgacttacatctggacaataagaagctgggggagatgagactcaaggaggctggcacagtaggaagagggggcggccaagaagaacgaccatttgtcgccagattcggattcgacgtggtcacctgctgtggttatctcccgcaggttaacgactggcaggaagactgggtggtgttctacgcccggcagcggattcagcctcagatggatatggtcgaaaaggaatcaggtgacagggaagccctacaattgtggagtgcacttcagttaaagattcctgatctgttccgagacttggaaataatccctgccttattacacggggatctctggggtggcaatgtggccgaggatagcagtggacctgtaatattcgatcctgcatccttctacgggcatagtgagtacgagttagcaatagctgggatgttcggaggtttctcttccagcttttactccgcgtatcacggaaaaatccccaaggcccccggctttgagaaaagactgcagctgtaccagctgttccattacttgaatcactggaatcactttggtagtggctaccgcggatcctcgcttaacataatgaggaatttggtgaagtag

SEQ ID NO: 188311 - DNA, 780 bp, synthetic construct
  misc_feature 1..780: note = Description of Artificial Sequence: Synthetic coding sequence
  source 1..780: mol_type = other DNA
atgttcgagggcgagatggccagcctgaccgccatcctgaagaccaacaccgtgaaggtccccaagcccattaaagtccttgatgctcctggaggaggttccgtgctggtgatggagcacatggatatgcgccacctgtcgtcgcatgcagcgaaactcggggcccaactggcggacctgcatctagacaataagaaactcggagaaatgagactgaaagaagcaggtaccgtaggaaggggaggcggacaggaggagcggccctttgttgcacgttttgggttcgatgtggtgacatgttgtggctaccttcctcaggtgaatgattggcaggaagactgggtcgttttttacgcacgccagaggattcagccccagatggacatggtggagaaggagtccggagatcgcgaggccctacagctctggagcgctctgcaactgaagattcccgacctatttcgcgatctcgagattattccggccttactccatggagatttatggggaggcaatgtggctgaggactcctctggccccgtaatattcgatcctgcttctttctacgggcattccgaatacgaactcgctattgccggtatgttcggaggattctcaagcagcttttatagtgcctatcatggaaagatccctaaagcaccgggcttcgagaagcgcctccagctctatcagctgttccattacctgaaccactggaatcatttcggctcaggctacagagggtcttccctaaacatcatgagaaacctggtgaagtag

SEQ ID NO: 188312 - DNA, 1017 bp, synthetic construct
  misc_feature 1..1017: note = Description of Artificial Sequence: Synthetic coding sequence
  source 1..1017: mol_type = other DNA
atggccgaccaggcccccttcgacaccgacgtgaacaccctgaccaggtttgtcatggaggagggccgcaaggccaggggcaccggggaacttacccagctcttgaactccttatgcaccgccgtgaaggctatctcttcggctgtcaggaaggccgggattgcacacttgtatggcattgccggaagtacaaacgtgaccggcgatcaggtcaaaaagctggacgtcctgtcaaacgatctagtaatgaatatgctcaaatccagcttcgccacctgtgttcttgtgagtgaagaggacaaacacgcaataatcgtggagcccgaaaagcggggcaagtatgtcgtgtgctttgaccctttagatggtagctccaacattgattgtctcgtttcggtgggcacaattttcggtatatatagaaagaagtcaacagatgaaccatccgagaaagatgcactgcaacccggcaggaatttggtagccgcgggctacgccttgtacgggagcgctactatgttggtgctagccatggattgtggtgtcaactgttttatgctggatccagctatcggcgagtttattctcgtcgataaagatgtcaaaatcaagaaaaaggggaagatctacagcctcaatgagggatacgcgagggactttgaccccgcggtgacagaatatatccagcggaagaagttccctcccgacaatagtgcgccatatggagcccggtatgtggggagcatggtagctgatgtgcacagaacgctcgtttatggggggattttcttatacccggctaataagaagtcacctaacggaaagttgcggctactttatgagtgcaatcccatggcctacgtgatggagaaggctggtggtatggcaacaactggcaaggaggccgtgcttgatgtcatccctactgatatccaccagcgcgcccccgtcatcctcggatcccccgatgatgttctggagttcctcaaggtatacgagaagcatagcgctcagtag

SEQ ID NO: 188313 - DNA, 456 bp, synthetic construct
  misc_feature 1..456: note = Description of Artificial Sequence: Synthetic coding sequence
  source 1..456: mol_type = other DNA
atgctgaagagcagcttcgccacctgcgtgctggtgagcgaggaggacaaacacgccatcatagttgaacccgaaaaaagaggcaaatacgtagtctgctttgaccctctcgacggatcttccaacatcgactgtcttgtttcggtggggacaatcttcggaatttataggaaaaagagcacagatgaaccctccgagaaggatgctctgcaaccaggccgaaaccttgtggccgcgggatatgctctctatggatccgcgacaatgctggttttggccatggactgtggggtcaactgtttcatgcttgacccagcaattggcgagttcatcctggttgataaagatgtaaaaataaaaaagaagggcaagatctattctctgaacgaaggctacgccagagatttcgacccggctgttaccgagtacatacagcgcaagaagtttcccccttag

SEQ ID NO: 188314 - DNA, 1017 bp, synthetic construct
  misc_feature 1..1017: note = Description of Artificial Sequence: Synthetic coding sequence
  source 1..1017: mol_type = other DNA
atggccgaccaggcccccttcgacaccgacgtgaacaccctgaccaggtttgtgatggaggaaggccgaaaagccaggggcacgggagagttgacccaacttctcaattccctatgcaccgctgtgaaggccataagctcagccgtgcgcaaggccggcatcgcgcacctgtacggaatagcagggtctacaaacgtgaccggcgatcaggtgaaaaagctggacgtgctctctaatgacctcgtaatgaatatgttgaaaagctcattcgctacctgcgttctggtgagtgaggaggacaagcatgccatcatcgttgagccagaaaaaagagggaaatacgtggtgtgttttgacccacttgatggtagcagcaatatcgattgcctggtgtcagtgggcacaatattcggaatttatcgcaaaaaatccacagatgaaccctccgagaaggatgctctgcagccaggcagaaacctcgtggctgccgggtatgcactatatgggagcgctacaatgctcgtccttgccatggactgtggagttaattgttttatgctggacccagccatcggcgagttcattctcgttgacaaggatgtgaagatcaaaaagaagggaaaaatttacagtttgaacgaagggtatgctcgcgacttcgacccagctgttacagagtatatccagagaaagaaatttcccccagataactcagcaccatatggtgccaggtacgtcggcagcatggtagccgatgtgcatcgaacactagtctacggtgggatatttctgtaccctgctaataagaaatcgccaaacggtaagctgagactcctgtatgagtgtaacccgatggcctatgttatggagaaagccggcgggatggccacaacaggcaaggaggcagtgctcgatgtgatacccaccgatatccatcagcgcgccccagtgatattaggttcacctgacgatgttctcgaattcctgaaggtatatgaaaaacacagcgctcagtag

SEQ ID NO: 188315 - DNA, 1020 bp, synthetic construct
  misc_feature 1..1020: note = Description of Artificial Sequence: Synthetic coding sequence
  source 1..1020: mol_type = other DNA
atgaccgaccggagccccttcgagaccgacatgctgaccctgaccaggtacgtgatggaaaaaggtcggcaggctaagggcaccggcgagctgacccagctgcttaattccatgttaaccgccattaaggctatctctagtgccgtgaggaaagccggattggcccacttatacgggattgcaggctccgttaacgttaccggcgacgaagtgaaaaaactggatgtcctgagcaatagtctggtgatcaacatggtgcagagcagttatagcacctgcgtcctagtgtcagaggaaaataaagatgctattatcaccgcaaaggaaaagaggggcaagtatgtggtgtgcttcgacccactcgatgggagctcaaatattgattgcctggcatctatcggcaccatatttgcaatttatagaaaaactagcgaggacgagcctagcgagaaggatgccctgcagtgtgggcgcaacattgtcgcagctgggtacgccctatatggatcagccacactggtcgccctctccactggacaaggggtggatttattcatgctggaccccgcccttggcgagttcgtgctggtggaaaaggacgtaaagattaagaagaaaggcaagatctactctctgaacgaggggtatgctaagtatttcgacgccgcaaccacagagtatgtgcaaaaaaagaagttccctgaagatggctccgcaccttatggcgcgaggtatgttggctcaatggtggccgatgtgcacagaaccttagtctacggaggcatcttcctttatccagcaaaccagaagtcaccgaagggaaagctcagattactgtacgaatgtaatcccgtggcgtatattatcgaacaggccgggggcctggctacaaccggaacgcagcccgttctggacgttaaacctgaggccattcatcagcgcgttcctctcattctcgggtcccctgaggacgtgcaagaatacctgacgtgcgtccagaaaaatcaggctgggtcatag

SEQ ID NO: 188316 - DNA, 837 bp, synthetic construct
  misc_feature 1..837: note = Description of Artificial Sequence: Synthetic coding sequence
  source 1..837: mol_type = other DNA
atgggcaagggcaacgaggacagcgacctgcactgcagcagcatccagtgcagtaccgaccaacctccttttcagcaaatctcctttacagaaaagggcagcgacgaaaagaagccctttaaggagaagggaaagaccgccttttctcactcctctgaaaaacacattcagcggcagggaagtgagccaaaccctaacaaagaaaatagcgaggagactaagcttaaagccgggaattcgaccgctggatcagaacctgaatcaagctcctaccgagaaaattgtaggaaaaggaaaatgtcaagtaaggactcatgtcaggataccgcaggaaactgtccggagaaggaatgctcactgtccctaaataaaaaatctcgttccagcaccgctgttcacaattcagagatccaggagacttgcgatgcgcaccaccgggggcactccagggcctgtaccggccacagcaaaagacaccgaagcagggctctgggggttcaaacgccttcaataagaaaaagtctcgttacatctgtccgggccatgtccgaagccgtgtatcaggacctggcacaggtgtgggcccagcagatccacagcccacttacttgtgagcagttaacgctgttgactcgactgaggggtccactgtgcgcacaggttcaaacactttacagcatggctacacaggctgcgtacgtgttccctgccgagagttggctagtaccagctaccctaccgggtcctggcgaatccgccctcgacagagaagcccacccattccccggccaggaaattaccgagactgtttcaggttccgacgaagctaagctttag

SEQ ID NO: 188317 - DNA, 984 bp, synthetic construct
  misc_feature 1..984: note = Description of Artificial Sequence: Synthetic coding sequence
  source 1..984: mol_type = other DNA
atgggccggaccagcaaggacaagcgggacgtgtactaccggctggcaaaggagaatggatggcgtgcaaggtccgctttcaagttactgcagctggataaggagtttcagctgtttcaaggcgttactcgggctgtggacttgtgcgcagcaccaggctcttggtcccaggtattaagccagaaaatcggcggacaaggatccggccacgtggtcgccgttgatctgcaggctatggcacctttgccaggtgtggtgcagatccagggtgatattacccagctgtctaccgccaaggagataatccaacatttcaagggctgtccggcggatctggtggtttgcgatggagctccggacgtaactggcctgcatgacgtagacgagtatatgcaggcacagctgttattggcagccctaaatattgccacccacgtgctgaagccgggaggttgcttcgtggcaaagatctttcggggaagagatgtgaccctgctttattcccagcttcaggtgttcttttcatccgttttatgcgcgaaaccgcgatccagccgaaattcttctatcgaagcctttgctgtttgtcagggctacgatcccccggaaggctttattcccgacctctcgaagcctctgctggaccattcctatgattttaatcaactagacggcccaaccagaataatcgtcccttttgtgacatgcggtgacctcagtagttacgactccgatagatcgtatcctttggatttagaaggtgggtcagaatataagtacaccccccctacacaaccacctatcagtccaccctatcaggaagcctgtactttgaagcgcaagggacagcttgccaaagagattcggccacaggattgtcctatcagccgcgtcgatacattcccccagcccctagcggcccctcaatgtcacacacttctagcaccagagatggaggataacgaaatgtcctgttctccttag

SEQ ID NO: 188318 - DNA, 990 bp, synthetic construct
  misc_feature 1..990: note = Description of Artificial Sequence: Synthetic coding sequence
  source 1..990: mol_type = other DNA
atgggccggaccagcaaggacaagcgggacgtgtactaccggctggctaaggagaacggttggcgggctcgttcggctttcaaactgttacaactggacaaagaatttcagctgtttcagggggtgacaagggccgttgacctttgcgcagccccggggtcgtggtcgcaggtcctgagccaaaagatcggtggccagggttccggccacgtggttgctgtggacctgcaggcaatggcccctctacccggtgtcgttcagattcaaggggatattacccagttaagcacagccaaggaaattattcaacattttaagggatgccccgcggaccttgtggtgtgtgatggtgctccggacgtaaccggcttgcacgatgttgacgaatatatgcaggcccagcttctgcttgccgccctgaatatagccacccacgtactgaaacccggaggatgcttcgttgcaaaaatatttcgaggccgggatgtgacactgctgtattctcaactgcaggtgtttttctcttccgtcctgtgcgctaaacctcgaagcagccgcaacagttccatcgaggcgtttgctgtatgccaagggtatgacccaccggagggttttatcccagacctatccaagcctctcctggatcacagttatgatccagactttaaccagctggatggacccacacggattatcgtcccttttgttacctgcggagacctgagttcgtatgattccgatcggtcttaccccctggatcttgaaggtgggagtgagtataagtacacccctcctactcagcctccgatcagcccgccataccaggaggcgtgtacacttaaacggaagggtcaattggcaaaagagattcggccccaagactgcccaatctcacgggtggacacatttccacagccgttggccgctccacagtgccacaccttgctggctccagaaatggaggataatgagatgtcttgtagcccttag

SEQ ID NO: 188319 - DNA, 579 bp, synthetic construct
  misc_feature 1..579: note = Description of Artificial Sequence: Synthetic coding sequence
  source 1..579: mol_type = other DNA
atggccctgaacatcgccacccacgtgctgaagcccggcggctgcttcgtggcaaagatcttcagggggcgggacgtgacacttctgtattctcagctgcaggtattcttctcttccgtactgtgcgcaaagccgcgtagcagtaggaatagctcaatagaagcctttgcggtttgccagggttacgacccaccagaggggtttattcccgatctctctaaacctcttttagaccacagctatgacccagacttcaatcaacttgatggacccacgcggattatcgtgcctttcgtgacctgtggggatctttcttcttatgatagcgatcgcagctaccccttagatctcgaagggggttcggaatacaaatatacaccccctacacaacccccaatttcacccccttatcaggaagcttgcacactgaaacgcaagggccaactggcgaaggagatccggccccaggattgtcccatttcacgggtagataccttcccacaacctcttgcggcgccacagtgtcatacccttctcgccccagagatggaagataacgagatgtcgtgcagtccatag

SEQ ID NO: 188320 - DNA, 984 bp, synthetic construct
  misc_feature 1..984: note = Description of Artificial Sequence: Synthetic coding sequence
  source 1..984: mol_type = other DNA
atgggccggaccagcaaggacaagcgggacgtgtactaccggctggctaaggagaatggatggagggcgcggtctgcttttaagctgctgcaactggacaaggagtttcagttattccagggggttacacgggccgtcgacctctgtgctgcccccggcagctggtctcaggtgctgagtcagaagattgggggccaagggagcggccacgtggttgccgtagatctccaggcgatggccccccttcctggggtcgtccagattcagggcgatatcacacagcttagcaccgccaaagagattatccagcattttaagggatgtccagccgacttggtggtctgcgacggagctcctgacgtcacaggattacacgacgttgatgaatatatgcaagcccagttgctgctggcagccttaaatatcgcgacgcacgtcctgaaacctggcggatgtttcgtagctaagatcttcagggggagggatgtcactctgctctattcacagcttcaggtattctttagctccgtgctgtgtgctaaacctcgcagtagcaggaatagctccatagaggcttttgccgtgtgccagggttacgacccgcctgaggggttcattcctgacctgagcaaaccgctccttgaccatagctacgacttcaaccagctggacgggccaacacggatcatcgtcccatttgtcacttgtggagacctaagttcctatgattccgatagaagttatcccctcgatctggagggcggttccgagtataagtatacccccccgacacaaccgcccattagccctccttaccaggaggcctgtaccctcaaaagaaagggccagctcgcaaaggaaattagaccccaggactgccctatctctagggtggatacattccctcagcccctcgctgccccgcagtgccatacgttgctcgcacctgaaatggaggacaatgaaatgtcatgttctccttag

SEQ ID NO: 188321 - DNA, 741 bp, synthetic construct
  misc_feature 1..741: note = Description of Artificial Sequence: Synthetic coding sequence
  source 1..741: mol_type = other DNA
atggccggctacctgaagctggtgtgcgtgagcttccagcggcagggatttcacaccgtcggaagccgctgcaaaaacaggacgggggcagagcatctttggcttacccggcacctgcgcgaccctttcgttaaagccgctaaagtcgagtcttatagatgcaggagcgcgttcaagttgctcgaagtgaacgaaaggcaccagatcctgcgccccggacttagggtgttggattgcggagcggctccaggagcctggagccaggtcgccgtacaaaaagtgaacgccgcagggaccgatccaagtagccctgtggggtttgttctcggggtggatctcctgcacatcttcccactcgaaggagcgacctttctatgtcccgctgacgtgacagaccctagaacctcacagaggatacttgaggtccttcctgggcgccgggctgatgtaatcctgtcggatatggccccaaacgcaactggctttcgcgatctagaccacgatcgcctcatctctctatgcctcacgttactgtcggtgactcccgatattctccaacccgggggcaccttcctgtgcaaaacctgggcaggcagtcaatcccgcaggttgcagcggcgcctgaccgaggaatttcaaaatgtgagaatcattaaacccgaggctagtcggaaagaaagcagcgaggtgtactttttggcaacacaataccacggaagaaagggaactgtcaagcagtag

SEQ ID NO: 188322 - DNA, 438 bp, synthetic construct
  misc_feature 1..438: note = Description of Artificial Sequence: Synthetic coding sequence
  source 1..438: mol_type = other DNA
atggccggctacctgaagctggtgtgcgtgagcttccagcggcagggatttcacactgtcgggagtaggtgtaagaatagaacaggagctgagcacctctggctgactagacatctcagagaccccttcgtgaaggcggcaaaggtcgaatcctatcgctgtaggagcgcgtttaagctgcttgaagtgaatgagaggcaccagatattaaggccaggactacgagtgctggactgcggcgcagctccaggagcatggagccaggtcgccgtccagaaggtgaacgctgctggcaccgatggcgtcagcctgctaccaaggctgcaatgcaacggcgttatcagtgcacactgtaacttgtgtctgcctggctccagcgactcccctgcgtcggctagccaaatccccgcccttctgttggcgagctgtttaggttag

SEQ ID NO: 188323 - DNA, 768 bp, synthetic construct
  misc_feature 1..768: note = Description of Artificial Sequence: Synthetic coding sequence
  source 1..768: mol_type = other DNA
atgcccgagctgtacgacctggtgaacagctacaagcccgacctgatttggtctgacggcgagtgggagtgtccagatacctactggaactctaccaactttctgagttggctgtacaacgattcacccgtgaaagatgaggttgttgtgaatgatagatggggacagaactgtagttgtcaccacggcggctactacaactgtgaagataaatttaaaccgcagagtctgcctgatcacaagtgggagatgtgcacatctatagataagttcagctggggataccgcagagacatggcgctcagtgacgtcacagaggaatcagaaatcattagcgagcttgtgcagactgtgtccctaggaggcaattacctgcttaacatcggtccgacaaaggacggactcattgtccccatcttccaggagagattgttggcagtaggaaaatggctcagcatcaacggggaagcgatctacgcttctaagccatggagagtacagtgggagaaaaatactacttctgtatggtacacgtcgaaaggttctgccgtgtatgcaatcttcttgcactggcccgagaatggagtgctcaacctagagagtcctatcactacgagcacaaccaagatcacaatgcttggcatccagggagacctcaaatggtctacagatcccgataagggactattcatctcccttcctcagttgcccccttctgctgtccccgccgagtttgcgtggaccatcaaacttacaggagttaagtag

SEQ ID NO: 188324 - DNA, 1401 bp, synthetic construct
  misc_feature 1..1401: note = Description of Artificial Sequence: Synthetic coding sequence
  source 1..1401: mol_type = other DNA
atgcgggcccccggcatgcggagccggcccgccggccccgccctgctcctgctattactattccttggggccgccgagagcgtgcgtcgagcccagccccctcgcaggtacacgcccgactggccctcactcgattcaaggcctctccccgcatggttcgacgaagctaagtttggagtgttcatacattggggggttttctcggtgcccgcctggggatcagagtggttttggtggcactggcaaggggaaggacgccctcagtaccagcgcttcatgcgtgataattatccacctggattctcatacgcagactttggccctcagttcactgcccggttcttccacccagaagaatgggcagatctcttccaggcagcaggcgccaagtatgtagtcttaactactaaacatcacgagggattcaccaactggccctcccccgtgagttggaattggaattccaaagacgttggacctcaccgtgatctggtaggagaattgggcacagccctgcggaagcggaacattcgctacggactgtaccactccttactggaatggttccatcccctgtatctgctcgataagaagaatggattcaaaactcagcatttcgtctccgccaaaaccatgccggaactgtatgatctggtgaatagctacaagcctgacctaatctggtccgatggtgagtgggaatgtccagacacctactggaatagcactaacttcctctcttggctgtataacgacagtcctgtgaaagacgaggtagtggttaacgatagatggggacagaattgcagctgtcaccatggcgggtactacaattgtgaggataaatttaagccccagagtctgcctgaccacaaatgggagatgtgtacttccattgataaattcagctggggttataggcgtgacatggctctgtccgacgtcaccgaggagtcggagattatctcagagctggtacagaccgttagcctgggaggcaactacctgctcaatatcggccccaccaaggatgggctgatcgttccaatcttccaggaacgtcttctggctgttggtaaatggctgtctataaacggggaagcaatttacgccagcaagccttggcgtgtgcagtgggagaagaacactaccagcgtttggtacacatccaagggttcagccgtctatgccatttttctacattggccagagaacggcgtgcttaatctggagtctccgattactacgagcaccaccaagataactatgttgggaatccagggcgatcttaaatggagcacggaccctgataaagggctctttatctccctgccacagctaccaccatccgcagtgccagctgaattcgcctggactatcaagcttactggggtcaagtag

SEQ ID NO: 188325 - DNA, 1404 bp, synthetic construct
  misc_feature 1..1404: note = Description of Artificial Sequence: Synthetic coding sequence
  source 1..1404: mol_type = other DNA
atgcggccccaggagctgccccggctggccttccccctgctgctgctgctgttgctgctgcttcccccacccccctgcccggcgcactccgccacccgcttcgaccctacttgggaatcactcgatgcacgtcagctccctgcctggtttgaccaggccaaatttggtatctttattcactggggtgttttcagcgtgcccagctttggatcagagtggttctggtggtattggcagaaggagaagatccctaagtacgtagagttcatgaaggacaattaccctccctcttttaaatatgaggattttggcccgctctttacagctaaattcttcaacgccaatcagtgggccgacatctttcaggcttctggcgctaaatatatcgtgctgacgagcaagcatcacgagggctttaccctctggggtagcgaatactcatggaattggaacgccatcgacgaggggcctaaacgagatatcgtgaaggagctcgaggtcgccattagaaatcggaccgatcttaggttcgggttgtattacagtctcttcgaatggttccacccgctattcttagaggacgagtccagtagctttcacaaacgtcaattccccgtatctaaaacgctgccggagctatatgagctggtgaacaattatcagcccgaggtcttatggtccgacggagatggcggcgcgcctgaccagtattggaacagtaccggatttctggcatggttgtataacgagtcgcccgtgcgcgggacagtggtgaccaacgacaggtggggtgccggctcgatctgtaagcacggtggtttctatacctgttctgatagatacaatcctggccatctactgcctcataagtgggaaaactgtatgacaatcgataagctttcgtgggggtaccgtagagaggcagggatctccgattacttaacgatcgaggagctggtgaaacagctcgtggaaacagtgtcttgtggcggaaatctgctgatgaacattggccccacactagatggcacaatcagcgtagtgtttgaagaacggctgcgccagatgggaagttggctgaaggtaaacggcgaggctatttatgagacacacacatggcgatcccagaatgacactgtgactcccgatgtatggtatacgagcaagccgaaggaaaagttggtctacgctatcttcctgaagtggcctacatccgggcagctgttcctcggacatcccaaggccatcctgggggccaccgaagtgaagctactcggccatggacagccactgaactggatatccctggagcagaacggtattatggtggaactgccccagctgacaattcaccagatgccctgtaagtggggatgggccttggcccttacaaatgttatctag

SEQ ID NO: 188326 - DNA, 498 bp, synthetic construct
  misc_feature 1..498: note = Description of Artificial Sequence: Synthetic coding sequence
  source 1..498: mol_type = other DNA
atgcggccccaggagctgccccggctggccttccccctgctgctgcttctgctcctcctcctcccccccccgccctgtccagctcatagcgccactagattcgaccccacctgggagtcactggatgccagacagctcccagcttggttcgaccaagccaagtttggcattttcatacactggggcgtgttcagcgttccgtctttcggcagtgagtggttttggtggtactggcaaaaggaaaagataccaaaatatgtggagtttatgaaagacaactaccctccttcgttcaagtatgaggacttcggcccactttttaccgctaaattttttaacgccaaccagtgggctgacatctttcaggccagcggggccaagtatatcgtgctaacatctaagcatcacgaagcaacttgtcgcgactcttttatgtggcgtaaatcttttgacgagtactgggcacatactcgctggcaccatttttgctccttttag

SEQ ID NO: 188327 - DNA, 498 bp, synthetic construct
  misc_feature 1..498: note = Description of Artificial Sequence: Synthetic coding sequence
  source 1..498: mol_type = other DNA
atgcggccccaggagctgccccggctggccttccccctgctgctgctccttctgctgctgctgccccctcccccctgtcccgcgcactctgctactaggttcgaccctacgtgggaatcgctcgatgcccgccagctgcctgcctggttcgaccaggccaagtttggtatatttatacattggggcgtgttctctgtgccttccttcgggtctgaatggttctggtggtattggcaaaaggaaaagatacctaagtacgtcgagtttatgaaggataattatccaccctcttttaagtacgaagattttggaccattgttcacagccaagttcttcaacgccaatcagtgggccgacattttccaggcatctggcgccaagtacatcgttctcacgagtaagcaccatgaagccacctgccgggattcttttatgtggcgcaagtcattcgatgaatactgggcacacacacggtggcaccatttctgcagtttttag

SEQ ID NO: 188328 - DNA, 330 bp, synthetic construct
  misc_feature 1..330: note = Description of Artificial Sequence: Synthetic coding sequence
  source 1..330: mol_type = other DNA
cagctggtggagaccgtgagctgcggcggcaacctgctgatgaacattggccctaccttggacggcactatcagcgttgtttttgaggagagactcaggcagatggggagctggctgaaagtgaacggagaggcaatatacgagacgcacacttggcggagtcaaaatgatactgtgactcccgatgtgtggtacacctccaagccgaaagaaaagcttgtctacgctatctttttgaaatggcctaccagcggacagctttttctggggcaccctaaggctattttgggcgctactgaggtgcgcggaaactttacactcttcctgtag

SEQ ID NO: 188329 - DNA, 1098 bp, synthetic construct
  misc_feature 1..1098: note = Description of Artificial Sequence: Synthetic coding sequence
  source 1..1098: mol_type = other DNA
atgtggctgcggagccaccggcagctgtgcctggccttcctgctggtgtgtgtgctgagtgtcatcttctttctgcatattcatcaagactcttttccccatggtctggggttgtctatcctttgccccgatcggagactggtcacgccaccagtagccatattttgcctgcctggaaccgcaatgggcccgaatgcctcctcctcatgtcctcagcaccctgcgtcactgagtggaacctggaccgtgtacccgaatggacgctttgggaatcagatggggcaatatgcgaccctactggcacttgcacaattgaacggacggcgggcttttatccttcctgctatgcatgccgcgctggcccctgtcttccggatcacactcccagtgctggccccggaggtggacagtaggaccccatggcgtgagctgcagctgcacgactggatgtccgaagagtatgctgatcttcgcgatccatttcttaaactttctgggttcccatgctcgtggaccttctttcatcacctgagagagcaaatacgacgggagttcactctgcatgaccacctccgggaggaggcccaaagtgttctcgggcagcttaggttgggaagaacgggcgatagaccgagaacattcgtgggagtacatgtgcggagaggagactacctgcaggttatgcctcagagatggaagggggtcgtcggggactcagcgtaccttaggcaggccatggactggttccgggctcggcatgaggcacctgtattcgtggtcacaagcaatggcatggaatggtgtaaggaaaacatcgatacgtctcagggcgatgtcactttcgctggtgatgggcaagaggccacaccttggaaggacttcgctttgctcacacaatgcaaccacactattatgacgattggcacttttggattctgggctgcctatcttgcgggcggggatacagtttatttggccaactttacattacccgatagtgagttcctcaagatctttaagccagaagccgctttcttgcctgaatgggtgggcattaacgccgatttaagccccctgtggactctggcgaaaccttag

SEQ ID NO: 188330 - DNA, 1068 bp, synthetic construct
  misc_feature 1..1068: note = Description of Artificial Sequence: Synthetic coding sequence
  source 1..1068: mol_type = other DNA
atgtggctgcggagccaccggcagctgtgcctggccttcctgctggtgtgcgtcctctctgtgatcttcttcctgcacatacaccaggatagctttccacacggtctgggattaagcatattgtgccctgacagacggttggtgactccacctgtggcgatcttctgcctgcctgggaccgccatgggaccgaacgcttcttccagttgtccacagcaccctgcgagcctgtccggtacttggaccgtgtatcccaacgggaggtttggcaaccagatgggacaatatgccaccctcttggctttagcccagttaaacggccgccgagccttcattctacctgccatgcacgctgccctagcccctccagaagtagactctcgtacaccatggcgtgaactgcagctccatgactggatgagtgaggagtacgccgacttacgcgacccgttcctcaaactaagcggatttccctgctcatggacattctttcatcatctaagggagcagattcggcgcgaattcaccctccatgaccacctacgggaggaggcccagtccgtgctcggacagttacggctgggtcgcaccggtgataggcctcggacttttgtcggtgtgcatgtccggaggggcgactacttacaggtgatgccacagcgttggaagggcgtagttggagattctgcctacctgcggcaggccatggactggtttcgcgcgcggcacgaagcccccgtgtttgtagtgacaagtaacggtatggaatggtgtaaagagaatattgacacctcccagggtgatgttacattcgctggtgacggacaagaggctacaccctggaaggatttcgccctcctcacacaatgtaaccacaccatcatgacgatcggcacttttggattttgggcggcatacctggccgggggcgacaccgtgtacctggcaaactttacgcttccagactccgagttcctcaaaatatttaagcctgaagcagcatttctcccggagtgggtgggaattaatgcagacctatccccactgtggaccctggccaagccatag

SEQ ID NO: 188331 - DNA, 1032 bp, synthetic construct
  misc_feature 1..1032: note = Description of Artificial Sequence: Synthetic coding sequence
  source 1..1032: mol_type = other DNA
atgctggtggtgcagatgcccttcagcttccccatggcccacttcattcttttcgtattcacagtgtctacaatttttcatgtccagcagcggttggcaaaaatacaagccatgtgggagttgccggtgcagattcccgtgcttgcctctaccagcaaagccttgggcccctcacaactcagaggcatgtggacaatcaacgcgatcggaaggctcggaaaccaaatgggagaatacgcgacactgtacgccttagccaaaatgaacggaagacccgcattcataccggcacagatgcactctacgctggctccaatttttagaattactctcccagtccttcatagcgccacggcctcacgaatcccatggcagaactatcacttgaacgactggatggaagaggaatatcgacatatacccggagaatacgtccgctttacagggtatccctgctcttggactttttaccatcacctgagacaggaaattctgcaggagttcactctgcacgatcatgtgcgcgaagaggcacagaagttcctccgtggcctccaagttaacggctcaagaccaggcacttttgttggagtacatgtgcgccggggcgactacgtccacgttatgcctaaagtgtggaaaggagtcgtggccgaccggagataccttcagcaggcactagactggtttagagctcgctatagctcgctgatctttgtggttacatctaatggcatggcctggtgtcgcgagaacattgacacaagtcatggggatgtcgtctttgctggggacgggatcgagggctcccctgcaaaagatttcgctctgctcactcaatgcaaccataccattatgacgatagggacctttgggatttgggccgcatatctgactggaggggacacaatctatctagctaactacacattgcctgactcccccttcctcaaaattttcaaaccagaagccgcctttctgcccgagtggacggggatcgcagcagatctgtccccacttctcaagcactag

SEQ ID NO: 188332 - DNA, 1032 bp, synthetic construct
  misc_feature 1..1032: note = Description of Artificial Sequence: Synthetic coding sequence
  source 1..1032: mol_type = other DNA
atgctggtggtgcagatgcccttcagcttccccatggcccacttcattctgtttgtttttacagtctctaccatattccatgtccagcagcgtttagccaaaatacaggccatgtgggaactgcccgtccagatccctgttttggcatcaacctccaaggcgctgggtcccagccagttaagaggaatgtggacaattaacgccataggacggctcgggaaccaaatgggcgagtacgcaaccctatacgcattggctaagatgaatggaagaccagcctttatcccggcccagatgcatagtacgctggcccctatattccgcatcacccttcctgtgctgcattccgcgaccgcgagcaggataccttggcagaactaccaccttaatgattggatggaggaggagtatcggcacataccaggggaatacgtccgatttacaggttatccatgcagctggaccttctatcaccatcttcgccaggagattttgcaggaattcactcttcacgaccacgtacgagaggaggcacagaagtttttaagggggctgcaggtgaatggttccagaccgggcaccttcgtgggcgtgcacgttcgacgaggggattacgttcatgtcatgcctaaggtatggaaaggagtggtcgccgatcggagatatctccaacaggctctggactggtttcgtgcacgctattccagtctgatattcgtggttacgtctaatggcatggcctggtgcagggaaaacattgatacttcgcatggggacgttgtcttcgcaggcgatggaatcgagggtagccccgcaaaagacttcgctctgttgacacaatgtaatcatacaatcatgacgattggaacttttggaatctgggccgcttatcttaccggcggcgataccatatacctggccaactacacactgcctgactcacccttcctgaaaatatttaagcctgaagcagccttcttgccagagtggacggggatcgctgccgacctgtcacccttactgaaacactag

SEQ ID NO: 188333 - DNA, 663 bp, synthetic construct
  misc_feature 1..663: note = Description of Artificial Sequence: Synthetic coding sequence
  source 1..663: mol_type = other DNA
atgctggtggtgcagatgcccttcagcttccccatggcccacttcattctcttcgtgtttaccgtgtcaacgatcttccacgtgcagcagcgcctggccaagattcaggccatgtgggaactgcctgtgcagatccctgtgctggcttccacctcaaaggctttaggtccttcccagttaaggggcatgtggacaatcaatgcaattgggcgtctaggaaaccagatgggggaatatgccacgctgtatgccctggcgaaaatgaatggaaggcctgcattcattcccgcccaaatgcatagcacactggcccctatatttcgcattaccctgccagtgctacacagcgctacagcaagccggatcccctggcagaactatcatctgaacgattggatggaagaggagtatagacacattcctggcgaatatgtaaggtttaccggctacccatgcagctggactttttatcaccatttgagacaggaaatcctccaggaatttactctgcacgatcatgttcgggaggaggctcagaagttcttaagaggcctgcaggtgaacgggagccggcccggcacatttgtcggggtgcacgtgaggcggggggattatgtgcatgttatgcctaaggtctggaagggggtcgttgctgacaggtag

SEQ ID NO: 188334 - DNA, 1086 bp, synthetic construct
  misc_feature 1..1086: note = Description of Artificial Sequence: Synthetic coding sequence
  source 1..1086: mol_type = other DNA
atggaccccctgggcgccgccaagccccagtggccctggcggcggtgcctggccgctcttttgtttcaactcctggtggctgtgtgcttttttagctacctgagagtgagcagggacgacgcaaccgggtccccacgcgcaccatcaggatcttcccgccaggatactacccccacacgccccaccttgctgatacttctgaggacatggccattccatatcccagtggccctgagcaggtgcagcgaaatggtgcctggaactgccgactgccatatcacagccgaccgtaaggtctatccccaggcagatatggtgatagtgcaccactgggacatcatgagtaaccccaaaagccgcctcccgccttctccccgacctcaggggcagagatggatctggttcaacctggagccaccgcctaactgtcagcatcttgaggcccttgaccggtactttaatcttacgatgagttaccgtagcgattctgacatcttcaccccttacggctggctagaaccttggagcggccaaccagctcatcctccgctgaacctgtctgccaagaccgaactggtggcctgggctgttagcaactggaaaccggacagcgctcgggttcgatactaccaaagcctgcaggctcacctgaaggtggatgtgtatggacgttcacacaaacccctacctaaaggcacaatgatggaaacactgtcacgatataaattctatctggcatttgagaatagcttgcatccagactacatcacagagaagttgtggcgcaacgccctggaagcttgggccgtgccagttgttctgggacccagtaggtcaaattacgagcgcttcttgccacccgacgcctttattcacgtcgacgactttcagagtccaaaagatttggctagatatttgcaagagttggacaaggatcacgcccgctatctctcctactttaggtggagagagacgttacgccccaggagttttagctgggcgctcgatttttgtaaagcctgttggaagctgcaacaagaatctcgctaccagacagtccgatccatcgccgcatggtttacctag

SEQ ID NO: 188335 - DNA, 1086 bp, synthetic construct
  misc_feature 1..1086: note = Description of Artificial Sequence: Synthetic coding sequence
  source 1..1086: mol_type = other DNA
atggaccccctgggcgccgccaagccccagtggccctggcggcggtgcctggcagccttactcttccagttacttgtggccgtgtgtttcttctcttaccttcgcgtgtctagagacgacgcaactggatcccccagggcaccgagtggctcatcgagacaagacacaacccccacgcggccgacattgttgatcctgctacgcacttggccatttcacattccagtggcgctgagtcgttgcagcgaaatggtgcctggaaccgcggactgccacatcaccgcagatcggaaggtctaccctcaggccgacatggtaatcgtgcaccactgggatattatgtcgaatcctaagagtcgattgccccctagcccccggccccagggccaacggtggatctggttcaacttggaacctccacccaactgccagcacctcgaggccctggatcgctattttaatttgactatgagttatagatcggactctgacattttcactccatatggatggctggagccgtggtctggccagcccgctcacccacctctgaacttgagtgctaagaccgagctggtcgcatgggctgtctctaattggaagcccgatagtgcacgcgttagatactaccaaagtctccaagcgcatctgaaggtggatgtatatggccggtcccacaagccactgccaaagggcacaatgatggaaaccttgagtcggtacaaattctatcttgccttcgagaacagcctgcatcctgactatatcacagagaagctctggcggaatgctctcgaggcatgggctgtgcctgtggttttggggccatctcgatctaattacgaacgcttcctgccacccgacgcctttatccacgtggatgatttccagtcaccgaaagacctggccagatatctgcaagagctggataaggaccacgctaggtacctgtcttactttcgatggagagagactcttagaccccgctcattctcctgggccctggacttttgcaaggcctgttggaagctccagcaggagtcacggtaccagactgtgcgtagtatcgccgcctggtttacttag

SEQ ID NO: 188336 - DNA, 1086 bp, synthetic construct
  misc_feature 1..1086: note = Description of Artificial Sequence: Synthetic coding sequence
  source 1..1086: mol_type = other DNA
atggaccccctgggcgccgccaagccccagtggccctggcggcggtgcctggccgcattgttgttccagctgctggtcgctgtctgtttcttttcatatcttcgcgtgtccagagacgacgccactggaagcccaagggccccctctggtagcagccggcaagatactacacccacacggcctaccttgctgattttactgcggacgtggccctttcacatccctgttgcgttgagtcgttgcagcgagatggttcctggcaccgcagactgccatattacagcagacaggaaggtttaccctcaggccgatatggtgatcgtccatcattgggatattatgagtaatcctaagtcaaggctgcccccatctccaaggccacaaggacagcgctggatttggtttaacttggagccgccacccaactgtcagcacctcgaggccctcgacaggtattttaatttgaccatgtcttatcggtccgattccgatatatttactccttatgggtggctcgagccatggtcgggacagcccgcacaccccccactgaatctgtcagcaaagaccgaactggtcgcctgggctgtttctaattggaagcctgacagtgccagagtccgctattaccagagtctgcaggcccacttaaaggtggacgtttacgggaggtcgcataagccactgcctaagggaaccatgatggagaccctgtctaggtataagttctatttagcgtttgagaattctctccaccctgactatatcaccgagaagctgtggcgtaacgctctggaagcctgggccgtgccggtggtgctggggcctagtaggtctaactatgaacgtttcctgcccccggacgcattcatccacgtggacgatttccagtcacccaaagatctagccaggtacctacaggagcttgataaggatcatgcccgatatctgtcttattttcgatggcgcgagacattgagaccccggtccttctcctgggcactggacttttgcaaggcttgttggaagctccaacaggaaagtcgctatcagacggttcgttccattgccgcatggttcacatag

SEQ ID NO: 188337 - DNA, 1086 bp, synthetic construct
  misc_feature 1..1086: note = Description of Artificial Sequence: Synthetic coding sequence
  source 1..1086: mol_type = other DNA
atggaccccctgggcgccgccaagccccagtggccctggcggcggtgcctcgctgctctcttatttcaactgctggtggctgtctgtttcttcagctatcttcgggtgtcccgcgatgacgcgaccggcagcccccgagcccctagcggcagtagccggcaagacactacacctacacgacccactctcttgattctgctgaggacttggccgtttcacatacctgtggcactgagccgatgctctgaaatggtccccggcacggctgactgccatataaccgctgaccgtaaggtgtacccccaggcagatatggttattgtgcatcattgggatataatgtccaacccaaaatcccgtttgccgccatcccctcgaccacagggccagcgctggatctggtttaatcttgagcccccccccaattgccaacatttagaagccctcgacagatacttcaatctcactatgagttatagatccgactcggacatctttacaccatacgggtggctcgaaccttggtcaggtcagccagctcacccaccgttaaacctcagcgcaaagaccgagctggtggcttgggccgtctccaattggaaaccggactcagctcgcgtccgctattaccagagtctgcaggcgcatctgaaggtggacgtctacggtcgctcccataagccgttgccaaagggaaccatgatggagactctctcaaggtacaagttctacttggccttcgaaaatagcctgcatccagattatattacagaaaagctgtggcggaatgccctggaggcttgggcagtcccagtagtgctggggccatctcgctctaattacgaaaggttccttccgcccgacgccttcattcacgtcgacgattttcagtcaccaaaggacctcgctaggtatctgcaggaactcgataaagaccacgcgagatatctgtcatatttccgctggagggagactctgcggcctagatcattttcatgggctctagatttctgtaaggcttgttggaagctgcagcaggagtctagatatcagacggtgaggagcatagccgcatggttcacttag

SEQ ID NO: 188338 - DNA, 1593 bp, synthetic construct
  misc_feature 1..1593: note = Description of Artificial Sequence: Synthetic coding sequence
  source 1..1593: mol_type = other DNA
atgcggcggctgtggggcgccgcccggaagcccagcggcgccggctgggagaaggagtgggcagaagcaccccaggaggcaccaggagcctggagcgggaggctagggccggggagatcaggtcgtaaaggccgggccgtgccaggctgggccagttggcccgcccacttggcacttgcagctaggcccgcacgccatctcggcggcgcagggcaggggcctagaccactgcatagtgggactgcgcccttccactctagggcttccggtgagcgtcagaggcgcctggagcctcagctgcagcacgagagcagatgtagatcctctactcctgcggacgcctggcgtgcggaagcagctttgcctgtgagggccatgggagctccatgggggtctccaacggcggccgcaggtggccgccgcgggtggagaagggggaggggcctgccatggacagtctgcgtgctggcagcggccggtctgacgtgcacagccctgattacatacgcctgctggggtcagctgccacctctgccttgggcctcgcctacccccagcagacctgttggcgtgctgctctggtgggagcctttcggtggaagagatagtgccccgcggccgcctccagattgccgactaagatttaatatctctgggtgccggctactcaccgatcgtgcttcctacggcgaggcccaggctgtgctgtttcaccaccgggatctggtgaaaggaccaccggattggcctcctccttggggaatccaggcacacacagcggaagaggtggacctgcgggttctggactatgaagaggccgcagcagctgccgaagccttagcaactagttcaccacgccctccagggcagcgatgggtctggatgaacttcgaaagtccgtcccatagccccggcttacgcagcttagcgtcaaacctgttcaactggaccttgagctaccgcgcagactctgatgtcttcgtgccttatggctacctgtaccctcgtagccatcctggagatcccccatctggtctggcgcccccattgtcgcgaaagcaggggctagtggcctgggtggtttcacattgggatgaaaggcaggcaagagtgagatattaccaccaactctcccagcacgtcacagtggacgtgtttgggcgtggaggtccaggacaacccgtccccgagattggactcctacacaccgtagccaggtacaagttctatctcgcgttcgagaacagtcagcacctggattacatcacagaaaaactgtggagaaatgctcttctcgccggcgctgttccagttgtgctcgggcccgaccgagcgaattatgagcggttcgttcctcgtggcgcttttatccacgtagatgacttccctagtgccagctcactcgcttcgtatctgctgtttctagataggaatcctgccgtgtaccgaaggtattttcactggcggaggagctacgctgtgcatattacatcattttgggatgagccatggtgtagggtgtgccaggcagtccaacgtgcaggagacaggcccaagagtattcgtaatctggcgtcctggtttgaacgctag

SEQ ID NO: 188339 - DNA, 1125 bp, synthetic construct
  misc_feature 1..1125: note = Description of Artificial Sequence: Synthetic coding sequence
  source 1..1125: mol_type = other DNA
atggaccccctgggccccgccaagccccagtggctgtggcggcggtgtttggctgggcttctgttccagttactggtcgccgtctgcttttttagttaccttcgggtttcacgagatgacgccacaggttcacctcgaccgggcctgatggccgttgagccagtgaccggggcgcctaatgggtctaggtgccaggatagcatggctactcccgcacaccctacgctgcttattttgctctggacatggccttttaacacgccggtcgccctcccaagatgttcagagatggtcccgggggctgcagactgcaacatcaccgccgatagcagcgtatacccacaggcagacgcagtcattgtacatcactgggacatcatgtacaatccatctgcgaacctgcctccccccactagaccccagggccagcgttggatttggtttagcatggaaagcccaagtaattgcagacacctcgaggcactggatgggtacttcaatttaactatgtcttatcggtccgattcagacattttcaccccatatggctggttagaaccttggagcggccaacccgctcatcctcccctcaatttatccgctaaaactgagctcgtcgcctgggctgtgtctaactggaagccagattccgcccgtgtccgctactatcaatctctgcaagctcacctgaaggtggatgtgtatggccgcagccacaaacctcttcccaaagggacaatgatggaaacactcagccgctacaaattctatcttgccttcgagaacagcctccaccccgactacatcacggagaagctatggagaaacgcattagaggcttgggcggttcccgtagtgctcggtccatctagatccaactacgagcgatttctgccacctgacgccttcatccatgttgacgactttcaatctcccaaagatttggcgaggtatctgcaagagctcgataaggatcatgctcgctacctgtcatacttccattggagagagacactgcgcccgagaagcttctcgtgggctttggcattttgtaaagcctgttggaaattgcagcaagagtcacggtaccagaccgtcagatctattgcagcctggttcacgtag

SEQ ID NO: 188340 - DNA, 1125 bp, synthetic construct
  misc_feature 1..1125: note = Description of Artificial Sequence: Synthetic coding sequence
  source 1..1125: mol_type = other DNA
atggaccccctgggccccgccaagccccagtggctgtggcggcggtgcctggccggtctgctgttccagctgctggtggcagtgtgctttttctcttacctgagggtgtctcgggatgacgccaccggctccccaagaccggggttgatggcggtggagcccgtgaccggtgcaccaaacggatcaagatgccaggatagcatggcgacacccgcccatcccactctcctcatcctgctgtggacttggccctttaacactcctgtggctctgcctaggtgtagcgagatggtgcccggggcggctgattgcaacattactgcagacagctccgtataccctcaggctgacgcggtcatagtccaccattgggacatcatgtacaacccttccgcgaaccttcccccacctacccggccacaaggacaacggtggatctggttctccatggaatcaccctcaaactgccgacacctggaggcactcgatggctacttcaatcttaccatgagctacagaagcgactctgacattttcaccccctatggttggctggagccatggtcaggccagcctgcacacccccctctcaacctctccgcaaagaccgaattagtggcttgggcggtaagcaactggaagcccgactcggcacgcgtgagatattatcaaagtctacaagctcacctgaaggttgacgtttatggacggagtcacaaaccactgccaaaagggaccatgatggaaactctctctaggtacaagttttatctggcttttgagaacagccttcatccagactacattactgagaagttgtggagaaatgccctggaggcctgggctgttcccgttgtgctcggtccttctcgctccaattacgaaagatttcttccaccggatgcctttattcacgtggacgacttccagagtcctaaggacctagctagatacctgcaggagctcgataaggatcacgcccggtatctgtcctatttccactggcgagagacattgcgccccagatccttctcctgggcgttagcgttttgcaaggcttgttggaaattacagcaagagtctagataccaaactgtgaggagtatcgctgcctggttcacctag

SEQ ID NO: 188341 - DNA, 1080 bp, synthetic construct
  misc_feature 1..1080: note = Description of Artificial Sequence: Synthetic coding sequence
  source 1..1080: mol_type = other DNA
atggaccccctgggccccgccaagccccagtggagctggcggtgctgcttgaccaccctgctgtttcagctcctgatggcagtatgcttcttctcatacctgcgcgtgtcccaggacgatcctacggtctatcctaatggaagcagatttcccgattctactggaactccagcccattcaattcccttgattctgctgtggacttggccattcaacaagcccattgcactacctcgctgcagcgagatggttcccgggaccgccgattgtaacataaccgctgatcggaaggtctacccgcaagctgacgctgtcatcgtccatcatcgtgaagtgatgtacaacccaagcgcccagttaccacgcagcccgcgccgccaaggacagagatggatttggttttcaatggagagtccaagccactgttggcagttaaaggcaatggacgggtattttaacctgacaatgagctaccggtctgacagtgatatcttcaccccatacggatggctcgagccatggtcgggacagcccgcccatcctcctcttaacctctcagcaaaaacggagctagtcgcgtgggccgtgtccaactgggggcccaactccgctcgagtgaggtattatcagagtctgcaagcccacctcaaagtggatgtctacggaagaagccacaaacccctcccacagggtactatgatggagaccctgtctcgatataaattttacctggccttcgagaactccctgcatcccgattacatcaccgagaaactgtggagaaatgccctggaagcttgggcagtaccggtggtcttggggcccagcagatctaactacgaaaggttccttccgccagatgccttcatccacgttgatgactttcagagccctaaagaccttgccagatatttgcaggagcttgacaaggatcacgctcgatacctctcatattttagatggcgggagacccttcgcccccggtcatttagctgggccctcgctttctgtaaagcgtgctggaagttacaggaagagtcacgatatcagacacgcggtatcgcagcatggttcacctag

SEQ ID NO: 188342 - DNA, 1080 bp, synthetic construct
  misc_feature 1..1080: note = Description of Artificial Sequence: Synthetic coding sequence
  source 1..1080: mol_type = other DNA
atggaccccctgggccccgccaagccccagtggagctggcggtgctgtctaacaaccctcctgtttcagctgcttatggctgtgtgttttttttcttacctgagagtgtcacaggatgaccccacagtgtatcctaacggaagtagattcccagattcaacaggcacccccgctcactccattcctctcattctgctgtggacctggccattcaacaagcccatagctctcccccgctgctcagaaatggtgcccggtacagccgattgtaatataactgctgacaggaaggtttacccacaggcagatgccgtgattgttcaccacagggaggtcatgtacaacccctctgcacaattgcctcgctccccacgccggcaggggcaaaggtggatctggttctctatggaatcaccatctcattgctggcagctcaaggccatggacggatattttaatttgacaatgtcttatagaagtgatagtgatatattcaccccgtatggatggctggaaccatggtcagggcagccagctcacccccccctcaacctgagcgcaaaaacagagttagtcgcgtgggctgtgagtaattggggtccgaactccgcccgagttagatattaccagtctctccaggcacacctgaaagtggatgtctacggcaggagccacaagccccttcctcaggggactatgatggagactctgtctagatacaagttctatctggcatttgaaaactcactgcatccagactacatcactgaaaagctctggaggaacgcactcgaagcatgggccgttcccgtggtactgggaccgtcgagatcaaattatgagaggtttttgccccctgacgcctttatccatgttgacgacttccagtcccccaaagacctggcccgataccttcaggagttggataaagaccacgcaagatacctcagttattttcgctggagggagacattgagaccacgtagcttcagctgggccctggccttttgtaaggcctgctggaaactccaagaggaatcccggtaccaaactagaggaatagctgcctggtttacctag

SEQ ID NO: 188343 - DNA, 1098 bp, synthetic construct
  misc_feature 1..1098: note = Description of Artificial Sequence: Synthetic coding sequence
  source 1..1098: mol_type = other DNA
atggaccccctgggccccgccaagccccagtggagctggcggtgctgcctcacaacactactgtttcaactattgatggccgtgtgctttttctcatacctacgcgtatcccaggatgatcctacagtgtatcccaacgggtcccgttttccagacagcactggaaccccagcccacagtatccctctgattctgctatggacatggccattcaataagcccatcgctctgccccgatgcagcgaaatggtccctggcacagccgactgtaacatcaccgccgaccggaaagtctatccacaggctgacgccgttattgtgcaccatcgggaagtgatgtataacccctcggcccagctccctcgcagtccccggcggcagggccaacgatggatctggtttagtatggagtcgccgtcccactgttggcagcttaaagctatggacggatattttaacctgacaatgtcgtatagaagtgactccgatattttcaccccttatggctggctcgagccttggagcggacaaccagcccaccccccattgaacctttcagccaagaccgaacttgtagcttgggccgtatctaattggggacccaatagtgcacgggtgagatactaccagtcactccaggctcacctgaaggttgacgtctatggacgaagtcacaagccactgccccaggggactatgatggagacgcttagccggtataagttctacctggcattcgaaaattccctgcacccggattatatcactgaaaaactgtggcgcaatgccctggaagcttgggctgtgcctgttgtgctcggccctagtaggtcaaattatgaacgttttttacccccagatgccttcatacatgtggacgatttccagtcccccaaggacctcgcgcgctacctgcaagaactcgacaaagaccatgcccgctatctctcttatttccgctggagagagaccctccggcccaggtcattctcatgggccctggccttttgcaaagcctgttggaagctgcaagaggagtcgcggtcaggtggactgatttatttgagaacgaggcttcccgaggcttcgcctgcctag

SEQ ID NO: 188344 - DNA, 1080 bp, synthetic construct
  misc_feature 1..1080: note = Description of Artificial Sequence: Synthetic coding sequence
  source 1..1080: mol_type = other DNA
atggaccccctgggccccgccaagccccagtggagctggcggtgctgtcttactactctccttttccagctccttatggcagtgtgcttctttagctacctcagggtttcccaagacgacccaaccgtgtaccccaatggctcacgctttcccgactccaccggtactcctgcccacagcattcctctgatcctcctttggacgtggccattcaacaaacctatcgcgctacctaggtgtagcgaaatggtcccggggactgccgactgcaacattaccgcagataggaaggtctatccccaagcagacgctgtgatagtgcatcatagagaggttatgtataacccttcagcccagctccccagaagcccccggcgccaagggcaacgatggatctggttctctatggagagcccttcccattgctggcagctgaaagccatggacggttattttaatttaactatgtcctaccggagtgattcagacatttttaccccttacggctggcttgagccttggtccggacagccagcacacccacccctgaacctgtctgctaaaaccgaactggtggcctgggctgtgtcaaactggggcccgaactccgcccgcgtgaggtattatcaatctcttcaagcccatctgaaggtagacgtctatggccgctcccacaagcctttgccgcaggggacgatgatggaaacactatccaggtataagttctacttggcctttgagaacagcctccacccagactatatcacagaaaagctgtggcggaacgccctggaggcctgggctgtccctgtagtgctcggacccagccggtcaaattacgaaagattcctaccaccggacgctttcatccatgttgacgatttccaatctccaaaagatcttgctcggtatctccaggagctggataaggaccatgccaggtatctgtcctattttagatggagggagacccttcgacctcgttctttctcctgggcccttgccttctgtaaggcctgctggaagcttcaggaggagagccgctaccagactcgcggcattgcagcctggtttacgtag

SEQ ID NO: 188345 - DNA, 1080 bp, synthetic construct
  misc_feature 1..1080: note = Description of Artificial Sequence: Synthetic coding sequence
  source 1..1080: mol_type = other DNA
atggaccccctgggccccgccaagccccagtggagctggcggtgctgcctgactaccctgttattccaacttctaatggccgtctgcttctttagttacctcagggtttcgcaagatgacccaacagtatatccaaacgggagtaggttccccgactcaacaggcactcctgcccactccataccactaatcctgctgtggacctggccgtttaacaagccaatcgcccttccgcggtgttctgagatggttcccggcactgcagattgtaacatcactgctgaccgaaaagtgtatccccaggccgatgctgtgatagttcatcatcgggaggttatgtacaaccccagcgcccagctccccaggtcacccaggagacagggccagagatggatctggttcagcatggagtcaccgtcacactgttggcaactgaaggcgatggatggttattttaacttaacgatgtcctatcgaagcgactccgacatttttacaccttacgggtggttagagccttggtccggacagcctgctcaccctccactgaatctctccgctaaaaccgagttagtggcatgggccgtctcgaactggggaccaaattcggcccgtgttaggtattaccagtctctgcaggcccacttgaaggtggatgtatacgggagaagccacaagcccctcccgcagggtactatgatggagacgctgagcagatacaaattctatctagcatttgagaactccctgcaccctgactacattacagagaaattgtggcggaatgctcttgaagcttgggccgtgcccgttgtgctaggaccatctaggtccaactacgaacggttccttccacctgatgcttttatccatgtcgacgatttccagtcaccgaaagaccttgcaaggtatttgcaggagttggacaaggaccacgcccgctatctttcctacttccgatggagggagacactccgacctaggtctttctcgtgggcgctcgcattttgcaaggcgtgctggaagcttcaggaggagtctcgttaccaaactagaggtattgccgcctggtttacatag

SEQ ID NO: 188346 - DNA, 93 bp, synthetic construct
  misc_feature 1..93: note = Description of Artificial Sequence: Synthetic coding sequence
  source 1..93: mol_type = other DNA
atggaccccctgggccccgccaagccccagtggagctggcggtgctgtctcaccaccctgttgttccagctgctgatggcggtgtgcttttag

SEQ ID NO: 188347 - DNA, 414 bp, synthetic construct
  misc_feature 1..414: note = Description of Artificial Sequence: Synthetic coding sequence
  source 1..414: mol_type = other DNA
atggaccccctgggccccgccaagccccagtggagctggcggtgctgcctaacaaccctgctcttccagctgcttatggcagtttgcttcttcagttatctaagagtctctcaagacgatcccaccgtctaccctaatggcagccgctttcctgacagcaccggaactccggcacacagtatcccactgattttgctttggacgtggccctttaataaaccaattgccctgcctaggtgctcagagatggtacctggtaccgcagattgtaacatcaccgcggatcgcaaagtttacccccaggctgacgccgtcatcgtccatcatcgggaggttatgtataatccatccgcccagttgcctagaagccctcgcaggcagggacagagatggatctggttctctatggagtag

SEQ ID NO: 188348 - DNA, 210 bp, synthetic construct
  misc_feature 1..210: note = Description of Artificial Sequence: Synthetic coding sequence
  source 1..210: mol_type = other DNA
atggaccccctgggccccgccaagccccagtggagctggcggtgctgcctgactactcttctgttccagcttttgatggctgtgtgctttttttcatacctgcgtgtgagccaagatgacccgacagtctatcctaatggttcaaggttcccagatagtactgggacccccgcacatagcataccgttgatccttctatggacctggtag

SEQ ID NO: 188349 - DNA, 201 bp, synthetic construct
  misc_feature 1..201: note = Description of Artificial Sequence: Synthetic coding sequence
  source 1..201: mol_type = other DNA
atggaccccctgggccccgccaagccccagtggagctggcggtgctgtcttacgaccctgttattccagcttttgatggcggtgtgcttcttctcctacctcagggtgtcccaggacgaccccaccgtgtacccaaatggatcaagattccccgactccacgggaactccagcacactccatcccactgatcctgctctag

SEQ ID NO: 188350 - DNA, 138 bp, synthetic construct
  misc_feature 1..138: note = Description of Artificial Sequence: Synthetic coding sequence
  source 1..138: mol_type = other DNA
atggaccccctgggccccgccaagccccagtggagctggcggtgctgtttaacaaccttactgttccaactcctcatggctgtctgttttttttcatacttgagggtgtctcaggacgatcctactgtctatccatag

SEQ ID NO: 188351 - DNA, 1029 bp, synthetic construct
  misc_feature 1..1029: note = Description of Artificial Sequence: Synthetic coding sequence
  source 1..1029: mol_type = other DNA
atgaacaacgccggccacggccccacccggcggctgcggggcctgggggtactggcaggagtggctcttctagccgccctctggctcctgtggctactcggtagtgctccccgaggcactccagcgccccaaccaactatcaccatattggtgtggcattggccctttactgaccagccacccgaattgccaagcgacacttgcactaggtatgggatcgctcgatgccacttaagtgctaatcggagcctgctcgccagcgcggatgcagtggtgttccatcatcgcgagctgcagacccgcagaagtcacctgcccctagcccagcgacctagaggacagccttgggtgtgggcctcaatggagtccccctcccacactcacggattgagccacctgcgaggaatctttaactgggtgctcagctataggagagatagtgatatatttgtgccatacggaaggctggaaccacactggggaccctccccccccctgcctgctaaaagccgtgttgctgcctgggtggtgtctaactttcaagaacggcaacttcgggctcgcctctaccgacagctggcacctcacttgagggttgacgtgttcgggagagccaatgggcgcccattgtgcgcttcctgcctggtgccaacagtggctcagtatcgcttttacctcagctttgagaatagccagcaccgcgactacattacagaaaaattctggcgcaatgcgctcgtggctgggacagtgccagtggtgttaggacctcctcgtgccacgtatgaggcctttgtgcctgctgacgcattcgtgcacgtggacgactttggttcagctcgcgagcttgcagcatttctgaccggcatgaacgagtcacgctaccagcgcttcttcgcatggcgggatcggctaagggtgagactgttcactgactggcgcgagcgcttctgcgcgatctgtgaccggtaccctcaccttccgaggagtcaggtttacgaggatctggaaggatggtttcaggcatag

SEQ ID NO: 188352 - DNA, 1728 bp, synthetic construct
  misc_feature 1..1728: note = Description of Artificial Sequence: Synthetic coding sequence
  source 1..1728: mol_type = other DNA
atgcggccctggaccggcagctggcggtggatcatgctgatcctgtttgcttggggaacactgctgttctacatcggcgggcatctcgtcagggacaatgaccaccctgaccactcatcacgagaactcagcaagatactggctaaattggagcggctgaagcaacaaaacgaggatctgagaaggatggcagaaagcctgcgtatacctgagggccctatagatcaaggaccagccatcgggcgggtgagggtccttgaggagcagctggtgaaggctaaggagcagatcgagaattataagaaacaaacgcgaaatggtctaggaaaggatcacgagattttgcggagaaggatagagaacggggccaaggaactgtggtttttcttgcagagcgaactaaaaaagctcaagaatctggaaggcaatgagctacagagacacgccgacgagtttttacttgatctgggacatcacgaaaggagcatcatgaccgatctctattacctgtctcaaaccgacggtgcgggcgactggagggaaaaggaagccaaagacctgactgagctggtgcagagacgcattacctatctccaaaatcctaaagactgtagtaaagccaagaaactggtatgcaacatcaacaagggctgtggctacggttgccagttacatcatgtggtatactgtttcatgattgcctacggaacacagaggaccctcatcttggagtcccagaattggcggtacgcaactggcggctgggagacagtgttccgcccagtgagcgaaacctgcaccgatcgcagcggcatcagcacaggccattggtctggggaagttaaagacaaaaatgtgcaagtagtggaattgccaatcgttgactccctgcaccctaggccaccttacctcccccttgccgtcccagaagatttggcagatagactcgtgagagtgcatggagaccccgccgtttggtgggtctcacaattcgtaaaatacctcattagacctcagccttggctggaaaaggagattgaagaggccactaaaaagcttggctttaaacatccagtcattggtgtgcacgtgcgtcggacagataaagtcgggacggaggcagcctttcaccctatcgaggagtacatggtacacgtggaggagcacttccagctgcttgctcgacggatgcaagtcgataaaaagcgggtctaccttgccacagatgatccctccctgctgaaagaagcaaagacaaagtacccaaattacgaattcatttcagataattctatcagctggagcgcagggctgcataataggtacactgaaaattctctgcggggcgtgatcctggacattcacttcctgagccaggccgattttctggtctgcaccttttcttcccaggtttgcagggtggcatacgaaattatgcagaccctgcaccccgatgctagtgccaattttcacagcctagacgacatctattatttcggtggacaaaacgcacataatcagatcgctatctatgcccaccagccacgcactgcagatgaaatacctatggaaccaggcgatatcatcggtgttgcaggtaaccattgggacggctattctaagggtgtaaatcgcaagttgggacgcacaggcctttacccatcatacaaggtaagggagaaaatcgagacagttaagtaccctacctatccggaggctgaaaaatag

SEQ ID NO: 188353 - DNA, 1728 bp, synthetic construct
  misc_feature 1..1728: note = Description of Artificial Sequence: Synthetic coding sequence
  source 1..1728: mol_type = other DNA
atgcggccctggaccggcagctggcggtggatcatgctgatcctgttcgcctggggtacactgctgttctatatcggggggcatctggtgagggacaatgaccaccctgatcattccagccgcgagctgtcgaagattctagccaagctggagcgtttgaaacagcagaacgaggaccttcgacgtatggccgaatcattgcggatacccgaagggcctattgaccagggcccagccatcggcagggttcgtgtgctcgaagaacaattggtcaaggcaaaggagcagattgaaaactataaaaagcaaacaaggaacggccttggaaaggatcatgagatcctgaggcggcggatcgaaaacggcgcgaaggaactgtggttctttctgcaatccgaactgaagaaactgaaaaatctggagggaaacgagcttcaaagacatgccgatgagtttctgctggatctggggcatcatgaaagatccatcatgacagatctgtattacctctcccagacagacggcgccggggactggagggaaaaggaagctaaagatctcacagaactcgtacagcgaaggattacttacttacagaaccccaaggactgtagtaaagctaagaaattagtatgtaacattaataagggctgtggttacggctgccaactgcaccacgtcgtctactgtttcatgatagcatatggaactcagcggacattgatcttagagagtcagaactggagatatgcgactggagggtgggaaactgtattcagaccagtgtctgagacatgcacagaccgcagcggaatttcaactggccactggagtggggaagtgaaagacaagaacgtgcaggtcgtcgagctcccaattgtggactccctgcacccacggccgccttacttacctctcgcagtcccagaagacctggcagatagactggttagagttcacggcgatcccgcagtatggtgggtcagccaatttgtgaaataccttattcgccctcagccatggcttgagaaggaaatcgaagaggccacaaagaagctgggattcaagcacccggtcatcggagtacacgttcggcgcactgataaggtgggtaccgaagccgcttttcatcccatcgaagagtatatggtgcacgtggaggaacactttcagctgttggctagaagaatgcaagtggataaaaagcgcgtgtacctcgccaccgacgatccctccctactgaaagaggccaaaaccaagtacccgaattatgagtttattagtgacaacagtataagctggtcggcggggttgcacaaccgttacaccgaaaattcactcagaggcgtgatactcgatatacactttctctctcaggccgactttctggtgtgtacgtttagtagccaggtttgtagagtggcctatgagattatgcagaccctgcatcccgacgccagcgctaactttcatagcctggacgacatctattattttggaggccaaaatgcacacaatcagattgcaatttatgcacatcaaccccgtactgcagacgaaattcccatggagccgggtgatataataggagtggccggcaaccactgggacgggtacagcaagggagtaaatcgaaaactggggaggactggactctacccaagttacaaggtgcgggagaagatagagacagtcaaatatccgacctacccagaagccgagaagtag

SEQ ID NO: 188354 - DNA, 1728 bp, synthetic construct
  misc_feature 1..1728: note = Description of Artificial Sequence: Synthetic coding sequence
  source 1..1728: mol_type = other DNA
atgcggccctggaccggcagctggcggtggatcatgctgatcctgtttgcttgggggacattgctgttctacataggcggccacctggtgagagataacgaccatcccgatcatagtagcagagaactgagtaagatcttggccaagcttgagcggctgaaacaacaaaacgaggacctgagaaggatggctgaatctctgcggatcccggaaggcccgattgaccaaggtcccgctataggcagagtccgggtcctggaggaacagctcgtgaaggcaaaggagcaaatagaaaattataaaaaacaaacccgtaacggcttgggcaaggaccacgagatcctgcgtcggaggatagagaacggtgcaaaggaactctggttcttcctgcagtcggaactgaagaaactgaaaaacctggaaggtaatgaactacaaaggcatgcggatgagtttctcctggatctcgggcaccacgagaggagtataatgaccgatctttattatctgagtcagacagacggagcaggtgactggcgggagaaggaggcaaaggatttgacggaacttgtgcagaggcggatcacctatttgcaaaacccaaaggattgttccaaagctaaaaagctggtatgcaatattaacaagggctgcggatacggctgccagttacaccatgtggtgtattgcttcatgattgcctacggaactcaaaggactctcatactcgaatcacagaactggaggtacgccaccgggggctgggagacagtttttagacccgtgagcgagacctgcaccgataggtcgggaatcagcaccggtcattggtcaggagaggtgaaagacaagaatgtacaagttgtggaactccctatcgtggactccctgcacccacgtccaccgtatctgccactggcagtcccggaagaccttgcagaccgcctcgtgcgcgttcacggggatcctgcggtgtggtgggtttcccagtttgtcaagtatctgatacggcctcaaccgtggcttgagaaagaaatcgaggaggctaccaaaaaattggggttcaaacatcctgtcatcggggtgcacgttcgaaggactgataaagtgggtaccgaagccgccttccaccccatcgaggagtacatggtgcacgtcgaagagcatttccagctcctggcacgacggatgcaagtcgataagaagagggtgtatttggcaactgatgacccttcactcctgaaggaggctaaaacaaagtacccgaactatgaattcattagcgacaatagcattagctggagcgctggcttgcacaatcgatatacagagaatagtcttcgaggggtgattcttgatattcacttcttaagtcaggccgactttctggtgtgcaccttctcaagccaggtctgtagggtggcctacgaaatcatgcagactctgcacccggatgcctctgccaattttcacagtctggacgacatttattattttgggggccagaatgcgcataatcagatcgcgatctatgctcatcagccaagaaccgcagacgagattcccatggaaccgggcgacattattggggtggccggcaaccattgggatgggtactccaaaggagtgaatcggaaactgggaagaaccgggctgtacccttcttataaagtacgggagaagatcgaaaccgttaagtaccccacttacccagaagccgaaaaatag

SEQ ID NO: 188355 - DNA, 510 bp, synthetic construct
  misc_feature 1..510: note = Description of Artificial Sequence: Synthetic coding sequence
  source 1..510: mol_type = other DNA
atgcaccggcagatctggcacctgcactggaccctggtgcggtaccccaactacgagtttatcagtgacaactcaatcagctggagcgccggactgcataatcgatacaccgaaaatagcctgaggggtgtgatcctggacattcactttctgtcccaagctgactttctagtgtgcaccttttcttcacaggtttgcagagtagcgtatgagatcatgcagacgctccatccggatgcatctgcaaatttccactctctcgatgatatctactacttcgggggacagaatgcacataaccaaatcgctatctacgcacatcagcctcggactgcggatgaaattcctatggagcccggcgatattatcggcgtagcagggaaccattgggacggatactcaaagggagtgaacagaaaactcggaagaaccggcttataccctagctataaagtgcgagagaagatagaaaccgtgaaatatccgacgtatccagaagcagagaagtag

SEQ ID NO: 188356 - DNA, 48 bp, synthetic construct
  misc_feature 1..48: note = Description of Artificial Sequence: Synthetic coding sequence
  source 1..48: mol_type = other DNA
atgcggccctggaccggcagctggcggtggatcatgctgatcctgtag

SEQ ID NO: 188357 - DNA, 135 bp, synthetic construct
  misc_feature 1..135: note = Description of Artificial Sequence: Synthetic coding sequence
  source 1..135: mol_type = other DNA
atgcggccctggaccggcagctggcggtggatcatgctgatcctgtttgcgtggggcaccctactcttttacattggcggccacctggtgcgagataatgaccatccggaccatagctctcgagagctgtcctag

SEQ ID NO: 188358 - DNA, 141 bp, synthetic construct
  misc_feature 1..141: note = Description of Artificial Sequence: Synthetic coding sequence
  source 1..141: mol_type = other DNA
atgcggccctggaccggcagctggcggtggatcatgctgatcctgttcgcctggggcactctgcttttctacatcgggggtcatctcgtgagagataatgaccacccagaccattcttctcgtgagctttcaaagatttag

SEQ ID NO: 188359 - DNA, 126 bp, synthetic construct
  misc_feature 1..126: note = Description of Artificial Sequence: Synthetic coding sequence
  source 1..126: mol_type = other DNA
atgcggccctggaccggcagctggcggtggatcatgctgatcctgttcgcatggggcacacttttattctacattggagggcatctggtcagagacaacgaccaccccgatcactctagtcgttag

SEQ ID NO: 188360 - DNA, 93 bp, synthetic construct
  misc_feature 1..93: note = Description of Artificial Sequence: Synthetic coding sequence
  source 1..93: mol_type = other DNA
atgcggccctggaccggcagctggcggtggatcatgctgatcctgtttgcctggggcaccctcctattctacatcggaggccatctggtatag

SEQ ID NO: 188361 - DNA, 1239 bp, synthetic construct
  misc_feature 1..1239: note = Description of Artificial Sequence: Synthetic coding sequence
  source 1..1239: mol_type = other DNA
atgaccgacctgtactacctgagccagaccgacggcgccggcgactggcgggagaaagaggccaaagacctgaccgagcttgtacagagaagaataacgtatctgcagaatcccaaagactgtagtaaggctaagaagctagtatgcaacataaacaaggggtgtggctacggttgtcagctgcatcacgtggtgtactgctttatgatcgcctacggtacacagcgcaccctcattctggagtcccagaactggcggtatgctacgggagggtgggagacagtgttcagaccagtgtcggagacttgcactgacaggagcggaatctctactgggcactggtcaggcgaggtgaaggacaaaaacgttcaggtggttgaactgcctattgttgatagcctgcatccccgcccaccatacttgcccctggctgttccggaggacctggcggaccgcctggtgcgggtgcatggcgacccagcagtatggtgggtatcccagtttgtcaagtaccttatcaggccacagccctggctcgagaaagagatagaggaagcaactaaaaagctcggattcaaacaccctgtcatcggggttcacgtgaggagaacggacaaagtgggcacagaggctgcatttcacccaatcgaggagtacatggtgcacgtcgaagagcacttccagcttttggctaggcgcatgcaggtcgacaagaaacgcgtatatctagccacggatgatccctctttgctcaaagaggcaaaaaccaagtacccgaactacgagttcatttccgacaattctatctcctggtccgctggccttcacaaccgttacacagagaacagcctcaggggtgtgattttggatatccacttccttagccaggccgactttctggtctgcacgttctcaagccaagtatgcagggtggcatacgaaatcatgcagaccctgcatcctgacgcctcggcgaatttccattcactggacgacatctactatttcgggggacaaaatgcacacaatcagatagccatctatgctcatcagcccaggacagctgacgaaatacccatggaacctggagacattattggcgtcgcgggcaatcactgggacggatattccaaaggcgtgaaccgaaaacttggccgcactggactgtacccttcctataaagtgagagagaagatcgaaaccgtgaagtatcccacgtacccagaggcagaaaagtag

SEQ ID NO: 188362 - DNA, 153 bp, synthetic construct
  misc_feature 1..153: note = Description of Artificial Sequence: Synthetic coding sequence
  source 1..153: mol_type = other DNA
atgcggccctggaccggcagctggcggtggatcatgctgatcctgttcgcctggggcacgctgttgttttacatcggtggacacctcgtccgtgacaacgaccatcccgatcatagttctcgggagctttctaagatactcgcaaagctttag

SEQ ID NO: 188363 - DNA, 1080 bp, synthetic construct
  misc_feature 1..1080: note = Description of Artificial Sequence: Synthetic coding sequence
  source 1..1080: mol_type = other DNA
atgaccagcaccagcaagggcatcctgcggcccttcctgatcgtgtgtatcattttgggatgcttcatggcatgtttgctgatctacataaagcccaccaactcatggatcttctcaccgatggagagtgcctcatcagttctaaagatgaagaacttcttctccacgaaaacagattacttcaatgagactacgatcctggtgtgggtttggcccttcggccagacatttgatctgacttcctgccaggcgatgtttaacatccaagggtgccatcttaccacagatcggtctctgtacaataagtcccacgccgtattgatccaccatagggacataagctgggacctaacaaatttgcctcagcaagcgagacctccattccagaagtggatttggatgaatctggagtccccaactcatacccctcagaagagcggaattgagcatttgttcaaccttacattgacatatcgtcgagacagtgatatacaagtgccatatggcttcctgacggtgtccacaaatcccttcgtgtttgaggttccatccaaggagaaactcgtatgttgggtggtctcgaactggaatcccgagcatgcccgggtcaagtactataacgagctgtccaagtctatcgagattcacacctatggtcaggccttcggcgagtacgtgaacgacaaaaatctaatccccactatttcaacctgtaaattctacctttcttttgaaaactcaatccacaaggattacatcactgagaagctgtataacgcgttcctggctgggagcgtcccagtcgtgcttgggccctccagggaaaactacgagaattacatccctgctgactcctttattcacgtggaagattataactctccttccgaactggcaaagtatctcaaagaggtggataagaacaataaattatacctgtcgtatttcaattggaggaaagactttaccgtgaacctgcccaggttttgggaatcacacgcatgtctggcatgcgaccacgtgaaacgacaccaagaatacaaaagcgtgggtaatctcgaaaagtggttttggaattag

SEQ ID NO: 188364 - DNA, 660 bp, synthetic construct
  misc_feature 1..660: note = Description of Artificial Sequence: Synthetic coding sequence
  source 1..660: mol_type = other DNA
atgaaccggctgttcggcaaggccaagcccaaggccccccccccctctcttacagattgtatagggacagtggatagtagagctgagagcatcgacaagaagatttccaggcttgacgcggagctggtgaagtacaaggatcagatcaagaaaatgagggaggggcccgcaaaaaacatggtgaaacagaaagctctaagagtgctgaagcaaaagagaatgtatgaacagcaaagagataatctcgcccagcagagcttcaatatggaacaggcaaactacaccatccagtcccttaaagacactaaaaccactgtggatgccatgaaactgggagtgaaggagatgaaaaaagcgtacaaacaggtgaagatcgaccagattgaggacctccaggaccaactcgaagacatgatggaagacgccaatgaaatccaggaggccctgagccgatcgtatggaaccccagaactggacgaagacgacctcgaggccgagctcgacgcgctgggagatgaactactggctgacgaagacagctcctatctcgatgaagccgccagcgcaccagccatacctgagggggtgccaacggatacgaagaacaaggatggagttctggttgatgaattcggtcttccacagatcccagcctcttag

SEQ ID NO: 188365 - DNA, 1293 bp, synthetic construct
  misc_feature 1..1293: note = Description of Artificial Sequence: Synthetic coding sequence
  source 1..1293: mol_type = other DNA
atgagccggatcaacaagaacgtggtgctggccctgctgaccctgactagctctgcttttctgctgttccagttgtattactacaagcactacctctctacaaaaaacggtgctggtctgagtaaaagcaaggggagtagaatagggttcgacagcacacagtggcgagccgtgaagaagttcatcatgttgacttctaaccaaaacgtcccggtctttctcatcgatccactgattctggagctgatcaacaagaactttgagcaggttaagaacacatcccatggcagtacttctcaatgcaaatttttctgcgtgcctcgagactttaccgcatttgcactccagtaccacctgtggaaaaacgaggaaggctggttcagaatcgccgaaaacatgggttttcagtgtctcaagatagaaagtaaggatccccgcctggatggcatagatagtctatcgggaaccgaaatacccctccattacatatgtaagcttgcgacccacgctattcaccttgtggttttccatgagcgcagtggtaattatctctggcatggtcacctgagactgaaagagcacattgatagaaagttcgtccccttcaggaagcttcaattcgggcggtatccgggtgctttcgatcgacccgagttgcaacaagtgacagttgacggcctggaggtgctgatcccgaaagatcccatgcatttcgtcgaggaagtgccacattcgcggttcatcgagtgcagatacaaagaagctagggctttttttcaacaatatctggacgataacaccgtggaggcggttgcattcaggaagtccgccaaagagttgctgcagctggccgccaaaacgctgaacaagttgggcgtgccattctggctgtcctccggcacatgcctgggctggtaccgccagtgtaacatcataccatactcaaaagatgtcgacctaggaatcttcattcaggactacaagtcagacatcattctggcctttcaggatgctggattgcccctcaaacacaagtttgggaaagttgaggactctctggaattgagtttccagggcaaggacgatgtgaaactggacgtgtttttcttctatgaagagaccgaccacatgtggaatgggggaacccaggctaaaaccgggaagaagtttaagtatctgtttcccaagttcacattatgttggacagaattcgtggatatgaaggtccacgtgccttgtgagactctggaatatattgaggcgaactacggaaaaaatcaacagggggcctag

SEQ ID NO: 188366 - DNA, 708 bp, synthetic construct
  misc_feature 1..708: note = Description of Artificial Sequence: Synthetic coding sequence
  source 1..708: mol_type = other DNA
atgatcctggaggtgggcgagaacaacggcttcttcagcaagagcctgctgccaaggtacgcaagtaaaaagttgaaatcctcactcccccactctagggcagtaaagaagttcataatgttaacaagcaaccagaatgttccagtgttcttaatcgacccactaatcctcgaactgatcaataagaatttcgagcaggtcaaaaacacctcgcatgggagcacctctcagtgcaaattcttctgtgtcccaagggacttcaccgccttcgctctccaataccacttatggaagaatgaggagggttggtttcgcatagcggagaatatggggtttcaatgtctgaaaattgagtccaaggacccacgactggatggcatagatagcttatctggaacggagattcccctgcactacatctgcaaactcgccactcacgcaatacacctggtggtatttcacgagaggtccgggaactatctgtggcatggccatttacgcctgaaggagcacatcgataggaagtttgttcctttccgcaaactgcagttcgggaggtacccaggagcattcgaccgccctgagctgcagcaggtaaccgtcgacggcctggaggtgctcattccaaaagatccgatgcatttcgtggaagaggtcccgcacagcaggttcatcgaatgtcgttacaaagaagcaagggctttctag

SEQ ID NO: 188367 - DNA, 552 bp, synthetic construct
  misc_feature 1..552: note = Description of Artificial Sequence: Synthetic coding sequence
  source 1..552: mol_type = other DNA
atgagccggatcaacaagaacgtggtgctggccctgctgaccctgactagctccgcctttctgcttttccagttatattattacaagcactacttgtccacaaagaatggagccgggctgtctaaatctaaggggagtaggatcggatttgactccacacagtggagagcagttaagaaatttatcatgctgaccagtaaccagaacgtccccgtttttctgattgatcctttaatcctcgaattaatcaataagaattttgaacaggtgaagaatacctctcacgggtcgacgtcccagtgcaagttcttctgcgtgcccagagacttcacagctttcgccttgcagtaccacttgtggaaaaacgaagaggggtggttcagaatcgcagagaatatgggattccagtgtctgaagatcgagtccaaggaccctcgcctggacggaatcgacagcctatctggcactgagatccctctgcactacatctgcaagttggctacacacgctattcacctggtggtattccatgaaagaagtgggaattattag

SEQ ID NO: 188368 - DNA, 483 bp, synthetic construct
  misc_feature 1..483: note = Description of Artificial Sequence: Synthetic coding sequence
  source 1..483: mol_type = other DNA
tgatggtaccggcagtgcaacatcatcccctacagcaaggacgtggaccttggaatcttcattcaagactacaaaagcgacattatcctcgccttccaagacgctggtctgccactgaaacataagttcggaaaagtcgaggattccctggagctgtctttccaggggaaagacgacgtcaaactagacgtcttctttttctacgaggagacagaccacatgtggaacggcggaactcaggctaaaactggaaagaagtttaagtacttatttccgaaattcaccctgtgttggacagaattcgtagatatgaaggttcacgtcccttgcgagacacttgagtacatcgaagccaattatggaaaagaggcagagagctacatactatctatgctgttccgcacgaccttttggtcgttagccgacttccctctcacccctgagaacaactccagcctgaagaatggcaacctcaacgtgtag

SEQ ID NO: 188369 - DNA, 816 bp, synthetic construct
  misc_feature 1..816: note = Description of Artificial Sequence: Synthetic coding sequence
  source 1..816: mol_type = other DNA
atgagccggatcaacaagaacgtggtgctggccctgctgaccctgaccagtagtgcattcctgctttttcagttgtactattataagcattacctctccaccaaaaacggtgccggtttgtctaagtccaagggatcgaggatagggttcgatagcacacagtggagagccgtcaaaaaatttatcatgctgacctctaaccagaacgtgcccgttttcctgattgaccctttaattttggaactcatcaacaagaacttcgagcaggtgaaaaatacctcacacgggtctacttcacagtgtaaatttttctgtgtgcctcgagactttaccgccttcgctttgcagtaccatctgtggaagaatgaagagggctggttcaggatcgccgagaacatgggttttcagtgtctgaagatcgagtcaaaggatcctagacttgacggtattgacagcctcagcggaacagagatcccccttcactatatctgtaagctcgccactcacgcgattcacctcgttgtgtttcatgagcggtccggcaactatctgtggcatggacatctccgccttaaagagcacatcgacagaaagttcgtgccctttcgcaagctacagttcggtagatatcctggggccttcgaccgaccggagctgcagcaggttacagtcgacggtctagaagtattgatacctaaagaccctatgcattttgtagaagaagtgccccacagccgcttcatagagtgtaggtacaaagaggcgagggccttctttcagatccccgtgtctgaagtttacactgtgctagactag

SEQ ID NO: 188370 - DNA, 1488 bp, synthetic construct
  misc_feature 1..1488: note = Description of Artificial Sequence: Synthetic coding sequence
  source 1..1488: mol_type = other DNA
atgcggctgacccggtgccaggccgccctggccgccgccatcaccctgaatttgttagtcctgttttatgtctcatggctacagcaccaaccccgtaatagcagggctcggggcccccgaagggcatcagcagcaggaccaagggtgactgtccttgtcagggaatttgaggctttcgataacgccgtgcctgaattggtcgattcattcctacaacaggaccctgctcagcccgttgtcgttgcagctgacactctcccctatccacccctggccctgccgcgtattcccaacgtacggctagcacttctgcagcccgccttggaccgtccagcagctgcttccaggcctgagacatatgtggctacggaattcgtcgcgttggtcccggacggggctcgcgccgaagcccccgggttgctagagcggatggtggaagcccttagagctggctcagcccgccttgtcgccgccccagtcgcaaccgccaaccctgcacgatgcttggcactaaacgtgagcctcagagagtggaccgcccgctacggggccgcaccagctgctcccaggtgtgatgctctagacggagacgcagtcgtcctgctgagggcgcgcgatctgtttaatttatccgcgccgctggcacggccggtgggcaccagcctgtttctccagaccgcccttaggggttgggccgttcagctgctggacctgacttttgccgccgcacggcagcccccactggctaccgctcacgccaggtggaaggctgaacgtgagggtagggctagaagggccgccttactgcgagccttgggcatcagattagtgtcttgggagggcggcaggctagagtggtttggctgtaataaagagacgacacgctgcttcgggaccgtggttggcgacaccccggcctacttatacgaggagcggtggacccccccatgttgcctcagagcccttcgagagaccgccaggtacgtcgtgggagtgcttgaggcagcaggcgtaagatattggctggagggcgggtcgctcctcggagctgcacgacatggtgacattataccatgggattacgatgtcgatttgggcatttatttggaggatgtgggaaattgtgagcagctgaggggagctgaggctggcagtgtggttgatgaacgtggctttgtgtgggagaaggctgtggagggggacttcttcagagtccagtatagcgaaagtaaccacctgcatgtggatctgtggcccttttacccaagaaatggcgtgatgactaaggacacatggctcgatcaccggcaggacgtggagttccctgaacacttcctgcagcccctagttccactgccctttgctggcttcgtggcccaagctccgaacaattaccggcggtttctcgagttgaagttcgggcccggagtgatcgagaacccacagtacccaaaccccgcgttgctgagcctgaccggttcagggtag

SEQ ID NO: 188371 - DNA, 1488 bp, synthetic construct
  misc_feature 1..1488: note = Description of Artificial Sequence: Synthetic coding sequence
  source 1..1488: mol_type = other DNA
atgcggctgacccggtgccaggccgccctggccgccgccatcacccttaatctgttggtcttattttatgtttcatggctccagcaccaacctcggaactcccgggccagggggccccggagagccagcgccgcaggtccacgtgttactgtgctcgttagagagtttgaagccttcgacaacgctgtgcccgaactggtagacagtttcctccaacaggaccctgctcagccagttgtggtggctgcagatacgctgccatacccccctctggcccttccccggatcccaaatgtgaggcttgcactgcttcagcccgctctcgacaggcccgctgctgcttcccggccggagacttacgtggccacagagtttgtcgcattggtcccagacggggcccgggctgaggcacccgggttattggaacggatggttgaggccctgcgtgccggctctgcgcggttggtggctgcccccgtcgctacagccaatcccgccaggtgcctcgccctgaatgtgtcgctgcgggagtggacagctagatacggagccgccccagcggctccgcggtgcgacgctctggatggagacgccgtggtgctgcttcgggctagagatttgttcaatctatccgccccactggctagacctgtgggcacaagcctgttcctacagactgccctacgcggatgggctgtccagctgttggatctgacatttgccgctgctcggcagccccctctggcaaccgcccacgcacgatggaaggcagaaagagaaggccgcgctaggcgtgctgctcttcttcgtgctcttggcatcaggctggttagctgggaaggcgggaggctagaatggttcggctgcaacaaagaaactaccaggtgtttcgggactgtggtgggggacacccccgcttacctttatgaggaacgttggactccaccatgttgcctgagggcactccgcgagacagcaagatacgtcgtcggcgtgttagaggccgcgggcgtgagatattggttggaggggggcagcctactcggagcggctcggcatggggacattatcccctgggactatgacgtggatcttgggatctaccttgaagacgtcggcaactgcgaacaactaagaggagccgaggcagggagcgtggtggacgagagaggctttgtgtgggaaaaagcggtcgaaggcgacttcttcagagtgcagtactcagagtctaatcacctccatgttgacctgtggcctttctatcccagaaatggtgtgatgaccaaggatacctggctggaccaccggcaagacgtcgaattccctgaacacttcttgcagcccctcgttccactcccttttgccggattcgtagcacaggcacccaacaactatagaagatttcttgaattgaagttcggccctggcgtaatagaaaacccacagtaccccaatccagccctgctgtctctcaccgggagcggctag

SEQ ID NO: 188372 - DNA, 2385 bp, synthetic construct
  misc_feature 1..2385: note = Description of Artificial Sequence: Synthetic coding sequence
  source 1..2385: mol_type = other DNA
atggagctgcggccctggctgctgtgggtggtggccgccaccggcacactggtgctcctggctgccgatgcgcaaggtcagaaggtgttcactaatacctgggcagtcagaatccccggcgggcccgctgtcgctaactctgtagctcgcaagcacgggtttctgaatctgggacagatttttggggattattatcatttctggcaccggggggttacgaagcgcagcctatctccacatcggcctaggcattcaaggctccagcgcgaaccccaagtacagtggctcgaacaacaagtggccaaaagacgaactaagcgcgatgtgtaccaggagcccacagatccaaaattcccccagcaatggtacttgtccggcgtcacccagcgggacctcaacgtcaaagccgcctgggcccagggctataccggacatggcatagtagtgtccatcctggatgatggtatcgagaaaaaccatcccgatcttgcaggcaattacgaccccggcgcgtcctttgatgtgaatgatcaagacccagatcctcagcctcggtatactcagatgaatgacaatcggcacggcacccggtgcgcaggggaagtggccgctgtagccaataacggtgtttgcggtgtgggggttgcctataacgcccggatcgggggggtgagaatgcttgacggtgaggttactgacgccgtcgaggctcgcagccttgggctgaaccctaaccatatccatatatattccgcctcctggggtcctgaggatgatggcaaaactgtggacgggccagcccgactggccgaagaagccttcttccgtggcgtcagtcaagggcgcggaggcttgggttctatctttgtttgggcaagcggcaacggaggccgcgaacatgacagttgtaattgcgacgggtacacaaattctatctacaccctgagcattagctccgctacacagttcggtaacgttccgtggtactctgaggcttgctcctccaccttggcaaccacatacagcagcggcaaccagaacgagaagcagatagtgactaccgacctccgccagaagtgcacagaaagtcacaccggtacttccgcgtccgcaccactggccgcagggattatcgctcttacacttgaagcgaataaaaatctcacatggcgagatatgcagcacctggtagtgcagacatccaagccagcacacttgaatgccaacgattgggccaccaacggcgtgggaaggaaggtctcccactcgtatggatacggtctcctggatgcgggcgcgatggtagctttggcccagaattggaccaccgtcgcaccccagcgcaagtgtatcattgacattctgacagaaccaaaagatatcggtaaaagactcgaggtgcgaaaaaccgtgacagcttgcctgggcgaacctaaccatattacccggctggagcacgcacaggctagattaaccctgtcctacaaccggcggggcgatctggccatacatctggtatcgcccatgggaaccaggagcacattactggccgccagaccacacgactatagcgctgacgggtttaacgattgggcatttatgacgacccattcctgggacgaagatccatccggcgagtgggtgttagaaatcgagaacacatccgaggccaacaattacggcaccctgaccaagtttacactggtgctatatgggacggcgcctgaggggctccctgtcccccccgagtctagcgggtgcaaaaccctcacctccagtcaggcctgcgtggtgtgcgaggagggctttagcctccatcagaagtcgtgcgtacagcattgtcccccaggcttcgccccacaggtgctggatacacattactctaccgaaaacgacgtcgagaccatccgcgcttccgtgtgtgccccatgccatgcatcctgtgcaacatgccaagggccggcattgaccgactgtctgtcttgccctagccacgcctccctcgaccctgtcgaacagacgtgtagccgtcaatcgcagtcctcccgtgaatcacctccccagcaacagccccctcgactcccgcccgaggtggaggcaggacagaggctgcgcgcgggactgctcccctcgcatctgccagaggttgtggcaggcctgtcatgcgcgttcatcgtcctggtcttcgttacggtgttcctcgtcctccagctccggtctggtttcagcttccggggtgttaaggtttatacgatggacaggggcttaatctcctacaagggactgcctcccgaggcctggcaggaagagtgcccttctgacagtgaagaagacgaaggacggggagagagaaccgcgtttatcaaagatcaatctgccttgtag

SEQ ID NO: 188373 - DNA, 210 bp, synthetic construct
  misc_feature 1..210: note = Description of Artificial Sequence: Synthetic coding sequence
  source 1..210: mol_type = other DNA
aagcccgcccacctgaacgccaacgactgggccaccaacggcgtgggtcgtaaagtctcgcactcctacggctacggcttgtggacacaagctccatggtggccttggcctagaattggaccccagtggcccccatcgggtagcgcctcatctaccagcagcccctctccaaagacctctggtaacggcagtcggtgcggaagaccctag

SEQ ID NO: 188374 - DNA, 210 bp, synthetic construct
  misc_feature 1..210: note = Description of Artificial Sequence: Synthetic coding sequence
  source 1..210: mol_type = other DNA
atggagctgcggccctggctgctgtgggtggtggccgccaccggcacccttgtactcctagccgccgacgctcaaggccagaaagtgtttacaaatacctgggctgtgcgcatacccggcgggccagcggtggccaactctgtcgcgcgaaaacacgggttcctgaatctgggacagatcttcggagactactatcatttttggcattag

SEQ ID NO: 188375 - DNA, 1581 bp, synthetic construct
  misc_feature 1..1581: note = Description of Artificial Sequence: Synthetic coding sequence
  source 1..1581: mol_type = other DNA
atggccagcaacgactacacccagcaggccacccagagctacggcgcctaccctacccagcccggccaggggtattctcaacagtcttctcagccctacggacagcagtcttactccggctactcacagagcactgacacgagcggctatggccagtcttcctacagttcctacggccaatctcagaacaccggctatggcacccagtctacacctcagggttacggatcaacaggaggatatggctcctcccagagttcccagagtagctatggtcaacagtcatcttacccaggctacgggcagcagcccgccccttcctctacgtccggttcctatggatcttcttcccagagttcatcatacgggcaaccccagagcggctcctattcccagcagccaagctacggcggacaacagcaaagttacggccagcagcagagctataacccaccacagggatacgggcagcaaaaccagtataattcatcatccggaggcgggggagggggcggcggaggagggaactacggacaggaccagtcaagcatgtcttctggaggcggctcggggggggggtatggcaatcaagatcagagcggcggcgggggtagcggaggttatggacagcaggaccggggaggtagaggcagagggggatcggggggcgggggcggcggtggggggggaggttacaatcgttcctctggaggctatgaaccgaggggcagaggtggtggcagggggggccgaggaggaatgggtggatcagatagaggcggattcaacaaattcggggggcctagggaccaaggatcccgacacgacagcgagcaggacaatagtgacaataacactatttttgtccagggcctgggtgagaatgttactattgagagcgttgcagattattttaaacaaatcggcatcatcaagacaaataagaagacaggacagccgatgattaatctctatacagaccgcgagacaggcaagctcaaaggcgaggcgacagtgtccttcgatgacccaccctcagctaaggccgcgattgattggtttgacggtaaggagtttagcggaaatccgatcaaagtctctttcgccactaggagagctgactttaacaggggtgggggcaacggcagaggcggccgaggcaggggaggccctatgggtcgggggggctacggcggcggcggtagcggcggcggaggacgcggcggcttcccaagcgggggcggtggtggcggaggtcagcagagggcaggggattggaaatgccctaatccaacctgcgaaaacatgaatttctcatggcgtaacgagtgcaaccaatgtaaagctccgaagcccgacggccctggagggggcccaggtgggtcccatatgggcggcaactatggcgacgatcgccgaggaggtcgggggggctatgatagaggtgggtacaggggccgcgggggcgataggggcgggttcaggggtggtcgcggtgggggcgacagaggcggttttggacccggaaaaatggattcacgcggtgagcaccgtcaagaccggagggagcgcccttactag

SEQ ID NO: 188376 - DNA, 456 bp, synthetic construct
  misc_feature 1..456: note = Description of Artificial Sequence: Synthetic coding sequence
  source 1..456: mol_type = other DNA
atgaaccccgaggtggtggaggtggccgtggaggccgaggtggcctgggccgaagtcactgttgtagcgtccatcaatcttgttgccttaggaactaaagaccatgtgatgacacctaccaacaaaaagacgggtcagcctatgattaacctttacacagatagggaaactggaaaacttaagggagaggccaccgtgagcttcgatgatcccccctcagcgaaagctgctatagactggttcgatggcaaagagttctcaggaaaccccattaaagttagctttgccacacgccgcgcagatttcaatcggggaggaggcaacgggagggggggaagaggacgaggaggccccatgggccgaggcggctacggcgggggggggagcggaggtggaggacgcggcggatttccttcaggggggggaggcggaggaggccagcagagagcaggctag

SEQ ID NO: 188377 - DNA, 1290 bp, synthetic construct
  misc_feature 1..1290: note = Description of Artificial Sequence: Synthetic coding sequence
  source 1..1290: mol_type = other DNA
atggccagcaacgactacacccagcaggccacccagagctacggcgcttaccctacccagcctgggcaagggtacagccagcagtccagccaaccatacggccagcaatcctattcaggttatagccagtccacagacacatccgggtacggccagagctcctactccagctatggccagagtcagaatacgggatatggcacccagagcaccccccagggatatggctctaccggcggctacggcagctctcagagtagtcagtcctcctacgggcaacagtccagttatccggggtacgggcagcagccagctccatccagcactagcggatcatacggctcaagctcacagtccagcagttatggacagccccagtcaggaagctacagccagcagccctcctacggcggccagcagcagtcgtatggacagcagcaatcctacaaccccccccagggctacgggcagcagaatcagtataactcttcaagcggaggatatgaacccaggggacggggaggagggagaggcggacgcggtggtatggggggctcagaccgcggggggtttaataagttcggtgggcccagagaccaaggcagccgccacgacagcgagcaggacaatagcgacaataacacaatattcgtgcagggcctcggcgagaatgtcacgatcgagtcagtcgctgattattttaagcagattgggatcatcaagaccaacaaaaaaacaggacagcccatgattaacctgtacaccgacagagaaacaggcaagctcaaaggggaagccactgtgagctttgatgatccaccgtccgctaaggcagcaatcgactggttcgacgggaaggaattctccgggaatccaatcaaggtgtctttcgctaccaggcgggctgacttcaatcgcggaggtggtaacggacgtggcgggcgtggccggggaggcccaatgggaagggggggatacggagggggaggttctggcggaggcgggcgcggtggcttccccagcggaggtggcggaggcgggggccagcaaagggctggagactggaagtgccccaatcccacctgtgagaacatgaacttctcatggcgcaacgagtgtaatcagtgcaaggctcctaagccagatgggccggggggaggacccggcggctcgcatatgggcgggaactatggcgatgacaggagaggcggcgacaggggcgggttcggacctggtaagatggattcaagaggggaacataggcaagacaggcgcgagcggccatactag

SEQ ID NO: 188378 - DNA, 1257 bp, synthetic construct
  misc_feature 1..1257: note = Description of Artificial Sequence: Synthetic coding sequence
  source 1..1257: mol_type = other DNA
atgggcgaggagggcaccggcggcaccgtgcacctgctgtgcctggctgcctcttcaggtgttccactgttctgcaggagtagcaggggcggggctcccgcgcggcagcagctccctttttcagtcataggtagtctgaatggggttcacatgttcggacagaatcttgaagtccagctgagctctgcacgaacagagaatacgaccgttgtctggaagtcctttcatgactctataacgctgattgtattgtcaagtgaggtgggcatcagtgagctgagactggagcggttgctgcagatggtgttcggcgcaatggttctgcttgttggacttgaggaactcacgaacatcaggaacgtggagaggctgaaaaaagacctgcgtgcctcttactgcctcattgattctttcctgggggactctgagctgatcggcgacctgacgcaatgtgtggattgcgtcataccgccggaagggtctctgctgcaggaggcccttagcggcttcgcagaggcggcaggaactacattcgtcagcttagtggtcagcgggcgcgtcgtggccgccacagaaggctggtggcgcctggggacccccgaggccgtgctgctgccatggctggtcggtagtttacctccccagacggcaagagactaccctgtatatctcccacacgggtcgcccacagtccctcaccgattgctgacactgactcttctgccctcgctagagctctgcctactgtgtggtccaagcccacccttatcccaactgtacccacagctactggagcgctggtggcagcctctcctggacccactgagagcttgtctgcccctaggacctagggcgttacctagcggattccctctccatacagatatcctgggtctcctgttgctccatctcgaactgaaacgatgtctgtttactgtggaaccgctgggggacaaagagccttccccagaacaacgtcgacgcctgttgaggaacttctacacgctcgtcacgagcacccacttccctcccgagcccggtccacccgaaaagactgaggacgaagtgtatcaggctcagctaccccgagcctgctacttagtgctcggaacagaagagcccggaacaggcgtccgactagtggctctgcagctggggcttcggcggctgctgctgctgctctcaccacagtcccctactcacggactgcggtcactggctacacacaccttacacgcgcttaccccactgctttag

SEQ ID NO: 188379 - DNA, 711 bp, synthetic construct
  misc_feature 1..711: note = Description of Artificial Sequence: Synthetic coding sequence
  source 1..711: mol_type = other DNA
atgggcgaggagggcaccggcggcaccgtgcacctgctgtgcctggccgcaagcagtggagtgccccttttttgccggagcagcagggggggagctcccgcgagacaacagttgcctttcagcgtgatcggaagtttaaacggagtacacatgttcggccagaatctggaagtacagctgtcttctgcaaggacggagaatacgaccgtggtctggaagagctttcacgatagcattaccctgattgtcttgtcctcggaagtggggatcagcgaactgagactcgagcgtctgctgcagatggtctttggtgccatggtgcttctggtggggttggaggagttgaccaatatccggaatgtggaacggctgaaaaaagacctgcgcgcttcttattgtctaattgattctttccttggagatagcgagctgatcggcgatctgacccagtgcgtagactgtgtgatcccacccgagggcagtctcctgcaggtgctgggcatgctgtggaaactgcttcatctgttttgttggccctggctgagcccccacccgctgtcgtctgggccgctgagtcagcccccgcctattctgagcgccagttctcccattcccacttggtctcaaaaaaatttattcagcttcttcttcagcttcctatctttgtcctttctttttagcttcctgtccctttttctctttgaaacttag

SEQ ID NO: 188380 - DNA, 1164 bp, synthetic construct
  misc_feature 1..1164: note = Description of Artificial Sequence: Synthetic coding sequence
  source 1..1164: mol_type = other DNA
atgggcgaggagggcaccggcggcaccgtgcacctgctgtgcctggcagcatcttctggggtgccattgttttgtagatctagtcggggaggtgcacccgcccgacagcaattgcccttttcggtgatcggctccctcaacggcgtccatatgttcggccagaacctagaggtccaactgagcagcgcacggacagaaaataccacagttgtgtggaaatcttttcacgatagcattaccctgatcgtgctgtccagcgaggtggggatttctgagctcaggctggagcgactacttcagatggtctttggggctatggttctgttagtgggtctagaggagctgactaacattcggaatgtcgaaaggctcaaaaaggacctgcgagcttcctactgcttgatagattccttcctcggtgattcagagttgataggggacctcacacagtgtgttgactgcgttatcccccctgaaggcagtttgcttcaggaagcgctctctggctttgccgaggcggctggcacgacatttgtcagcttggtggtgtctggtcgcgtcgtcgcggctacagagggctggtggagactgggcactcccgaagcagtgttacttccttggctagtcggaagcttaccaccacaaacagcccgggactatccagtgtacctgcctcacggatcccctaccgtgccgcacaggctgctcacattgacacttctgcccagtctggagctttgtctcctctgcgggcccagcccacctctgtcccagttatatccacaactgctggagcgttggtggcaacctctcctggacccgctcagggcctgtctccctctgggccctcgcgccctgccctcgggctttcctctgcacaccgacatcctgggtcttctcctgctccacctcgagctgaaacggtgcctgttcaccgttgagccattgggtgacaaggagccctcccctgagcagcggcggcggctccttcgcaatttttacactctggtcacatcaacacacttcccccccgagcccgggccacccgagaagaccgaagacgaggtatatcaggctcaactgcctagggcctgttatctggtgatgggggatggccatcgacacggggcagtgtctgtaagcctcttcatccgttcccagtag

SEQ ID NO: 188381 - DNA, 1149 bp, synthetic construct
  misc_feature 1..1149: note = Description of Artificial Sequence: Synthetic coding sequence
  source 1..1149: mol_type = other DNA
atgggcgaggagggcaccggcggcaccgtgcacctgctgtgcctggcggcctctagtggggtcccattgttctgccgtagctctaggggaggagctccagccagacagcaactccccttttctgtgatcggcagcctgaatggggtccatatgtttgggcaaaatctggaagtccagctgtcctcggctagaactgaaaataccaccgttgtgttgctggtcggcctcgaggagctgaccaacatccggaatgttgagagattgaaaaaggatctgagagcgtcctactgtttgatcgactccttcctcggggacagcgagcttattggcgatctcactcagtgtgtagattgtgtgatacccccagaggggtccttgctgcaggaggccctatccggtttcgctgaggccgccgggactacgttcgtctcgctcgtagtgtccggccgagtggtggccgctaccgagggttggtggagattggggaccccggaggctgtgttgttgccctggctcgttggctctctgcctccccaaacagctcgcgactatcccgtatatctccctcatggtagtccaacagtgccgcaccgactactgacgttgacattgctgccctccttggagctctgcttactgtgcgggccatctccgccactgagccaactgtacccccagctgctggagagatggtggcagccacttctggaccctctgagggcatgcttaccccttggcccacgcgctctgccttcagggtttcctctgcatacagatatactgggtctgcttctccttcacttggaactcaaacggtgcctcttcactgtggaacctctcggtgataaagagccctccccggaacaaaggcgtagactgttacgcaatttttacaccctggtgacttccacccacttcccaccagaacctggcccccctgaaaaaactgaagatgaggtgtaccaggctcagctgcccagagcgtgctatttggtcctggggacagaggagcccgggaccggggtcaggctcgtggctctacaacttggattgcggaggctcttactgctgctgagtccgcagagtcctacccacggcttgagatccctggcaacccacactttgcatgccctaaccccattgctctag

SEQ ID NO: 188382 - DNA, 279 bp, synthetic construct
  misc_feature 1..279: note = Description of Artificial Sequence: Synthetic coding sequence
  source 1..279: mol_type = other DNA
atggccagcctgggccacatcctggtgttctgcgtgggcctgctgacaatggcaaaggctgaatctcccaaagagcacgatcccttcacctacgactaccagagtctgcagatcggtgggctcgtgatcgctggaatcttgttcatactgggtattctgatcgttctgagcaggagatgtcgctgtaaattcaaccagcagcaacgcacaggcgagcccgatgaagaggaaggtacattcagaagtagcatccgccggcttagcactagacgacgatag

SEQ ID NO: 188383 - DNA, 279 bp, synthetic construct
  misc_feature 1..279: note = Description of Artificial Sequence: Synthetic coding sequence
  source 1..279: mol_type = other DNA
atggccagcctgggccacatcctggtgttctgcgtgggcctgctgacaatggcaaaggctgagtcacccaaagagcacgacccttttacttacgactatcaatccctgcaaattggcgggctggttatcgcggggattctcttcattctcggcattctgatagtgttatctagaagatgccgatgcaagtttaatcagcagcagagaaccggagagcctgatgaggaagaaggcacatttaggtccagtattcggaggctaagcacgcggaggagatag

SEQ ID NO: 188384 - DNA, 195 bp, synthetic construct
  misc_feature 1..195: note = Description of Artificial Sequence: Synthetic coding sequence
  source 1..195: mol_type = other DNA
atggaccggtggtacctgggcggcagccccaagggcgacgtggaccctttttactacgactatgaaacagtccgcaacggcggactcattttcgcgggcctggctttcatcgttggcttactgatcctgctgagcaggcgtttcaggtgtggcgggaacaagaaacgcagacaaataaacgaggatgaaccctag

SEQ ID NO: 188385 - DNA, 201 bp, synthetic construct
  misc_feature 1..201: note = Description of Artificial Sequence: Synthetic coding sequence
  source 1..201: mol_type = other DNA
atgaccggcctgagcatggacggcggcggcagccccaagggcgacgtggacccattttactacgactatgagacggtgcgcaatgggggactcatcttcgctggcctggcctttattgtggggctgctgatactgctgagcaggaggtttcgctgtgggggaaataaaaagagaagacagattaacgaggacgagccttag

SEQ ID NO: 188386 - DNA, 195 bp, synthetic construct
  misc_feature 1..195: note = Description of Artificial Sequence: Synthetic coding sequence
  source 1..195: mol_type = other DNA
atggaccggtggtacctgggcggcagccccaagggcgacgtggacccattctattacgactacgagaccgtccgaaatggaggattgatattcgccggactggcatttatcgtgggacttctcatcttgctgtctcggcgcttcaggtgtggtgggaataagaagcgaagacaaataaacgaggatgagccctag

SEQ ID NO: 188387 - DNA, 264 bp, synthetic construct
  misc_feature 1..264: note = Description of Artificial Sequence: Synthetic coding sequence
  source 1..264: mol_type = other DNA
atgcagaaggtgaccctgggcctgctggtgttcctggccggcttccctgtcctcgatgctaatgacctcgaggataaaaactcgcctttctactatgattggcacagcctgcaagtgggaggcttgatttgcgcgggggttctgtgtgctatgggcattatcatagtcatgagcgccaagtgcaagtgtaagttcggtcagaagagcggacatcaccccggagagacgcctccattgattactcctggatccgctcagtcctag

SEQ ID NO: 188388 - DNA, 342 bp, synthetic construct
  misc_feature 1..342: note = Description of Artificial Sequence: Synthetic coding sequence
  source 1..342: mol_type = other DNA
atgcagaaggtgaccctgggcctgctggtgttcctggccggcttccctgtcttggacgctaacgacctggaagacaagaacagccctttttattacgattggcacagtctgcaggtgggcggactcatatgcgcaggagtgctatgcgctatgggcatcatcatcgtgatgagtgaatggcggtcttctggcgagcaggcgggacgcggctggggaagtcctcccctcacgacacagctgtcacctacaggtgcgaaatgcaagtgcaaattcggccagaagagtggacatcaccccggagagacgcccccactgattactcctgggagtgcccagtcatag

SEQ ID NO: 188389 - DNA, 291 bp, synthetic construct
  misc_feature 1..291: note = Description of Artificial Sequence: Synthetic coding sequence
  source 1..291: mol_type = other DNA
atgcagaaggtgaccctgggcctgctggtgttcctggccggcttccctgtattagatgccaatgacctggaggataaaaacagtccgttctactatgattggcattccctgcaagttggcggactgatatgtgcgggcgtattgtgtgctatgggcataattattgtgatgagcgagtggaggtcatctggagagcaggccgggagaggctgggggagcccccctctgacaactcagttgtctcctacgggcgccaaatgcaagtgcaagttcggtcagaagtccggctag

SEQ ID NO: 188390 - DNA, 264 bp, synthetic construct
  misc_feature 1..264: note = Description of Artificial Sequence: Synthetic coding sequence
  source 1..264: mol_type = other DNA
atgcagaaggtgaccctgggcctgctggtgttcctggccggcttccctgtgctggatgctaatgacctggaagacaaaaacagtccattttactatgactggcattctctccaggttggcggtctgatctgtgcaggcgtcctttgtgctatgggaataattattgtaatgtcagctaaatgcaaatgcaagtttggacagaaatcaggccaccacccaggtgagactcctccactaattaccccaggatcagcccagtcttag

SEQ ID NO: 188391 - DNA, 435 bp, synthetic construct
  misc_feature 1..435: note = Description of Artificial Sequence: Synthetic coding sequence
  source 1..435: mol_type = other DNA
atgggccggggctacagcggcgccctgcaggcccggggcggcctggaggagcctctcgagaggggcttgcgtggtccatccttcacccaaagcccactccatggggcggccgcagcatacctgtctgcgcagcgggatgccagcctgcctgtacccggccaacgaagcgatatgcagaaggtgaccttgggccttttggtgtttctcgccgggtttccggtgctggacgccaatgacctggaagacaagaatagtccattctactacgattggcactccctgcaggttgggggccttatttgtgcgggcgtgctctgcgcaatgggcatcattattgtgatgagcgccaaatgcaaatgcaagttcgggcagaaatcagggcaccatcccggagagaccccacctctcattacgcctgggtcagcccaatcttag

SEQ ID NO: 188392 - DNA, 186 bp, synthetic construct
  misc_feature 1..186: note = Description of Artificial Sequence: Synthetic coding sequence
  source 1..186: mol_type = other DNA
atgcagaaggtgaccctgggcctgctggtgttcctggccggcttccccgtgctggacgccaacgacctggaggataagaattcaccattttattacggcgaaagtccctgccccctgtcacccccacacaaccccacatattgtctagtccctcgagtgcctatccagggatggggcctgacttag

SEQ ID NO: 188393 - DNA, 435 bp, synthetic construct
  misc_feature 1..435: note = Description of Artificial Sequence: Synthetic coding sequence
  source 1..435: mol_type = other DNA
atgggccggggctacagcggcgccctgcaggcccggggcggcctggaagaaccactggagaggggcctgcgtggcccctcgtttacacagtcaccactgcatggcgctgcagccgcctatctaagcgctcagcgggatgcatcgctgcctgtgcctggacaaagatcagatatgcagaaagtgacgttgggcttactggtgttcttagccggattccccgtcctagacgcgaatgatcttgaggacaagaactcgcccttctattatgattggcactctcttcaggtgggcggtctgatttgcgccggcgtactctgtgctatgggaatcattatcgtaatgtccgctaaatgcaaatgtaagtttgggcagaagtctggccaccacccaggtgaaacaccaccactcattacaccaggaagcgcccaatcctag

SEQ ID NO: 188394 - DNA, 288 bp, synthetic construct
  misc_feature 1..288: note = Description of Artificial Sequence: Synthetic coding sequence
  source 1..288: mol_type = other DNA
atggagctggtgctggtgttcctgtgcagcctgctggcccccatggtgctggcttcagcggccgaaaaggaaaaggagatggatccatttcactatgactaccagaccctgcgtatcggaggactggttttcgccgtggtgctgttctctgtgggtattctgttgatcctaagtcgtcgctgcaaatgtagcttcaatcagaagccaagggccccaggcgacgaggaagctcaggtggaaaatctgattaccgccaacgccacagaaccgcaaaaagcggaaaactag

SEQ ID NO: 188395 - DNA, 288 bp, synthetic construct
  misc_feature 1..288: note = Description of Artificial Sequence: Synthetic coding sequence
  source 1..288: mol_type = other DNA
atggagctggtgctggtgttcctgtgcagcctgctggcccccatggtccttgcctcagcggccgagaaggagaaggagatggacccgtttcattacgactatcaaacccttaggatcggtggtttggtctttgcagtcgtgctctttagtgtaggcatcctgcttatcttatctagaagatgcaaatgctccttcaaccaaaaacctcgtgcacctggggatgaagaagcacaggtagagaatcttattaccgcgaacgccacagagcctcagaaggctgaaaattag

SEQ ID NO: 188396 - DNA, 288 bp, synthetic construct
  misc_feature 1..288: note = Description of Artificial Sequence: Synthetic coding sequence
  source 1..288: mol_type = other DNA
atggagctggtgctggtgttcctgtgcagcctgctggcccccatggtgctggcttccgcagcagagaaagaaaaagaaatggacccattccactacgattatcagaccctgaggattggaggactcgtgtttgctgtggtcctgttttccgtcgggatacttctgattctcagtcgaaggtgcaaatgttcatttaaccagaagcccagagcacccggtgacgaggaagcgcaggtcgagaacctgatcactgccaacgcaacagagccccagaaagccgagaactag

SEQ ID NO: 188397 - DNA, 288 bp, synthetic construct
  misc_feature 1..288: note = Description of Artificial Sequence: Synthetic coding sequence
  source 1..288: mol_type = other DNA
atggagctggtgctggtgttcctgtgcagcctgctggcccccatggtgctcgccagcgccgcagaaaaagaaaaagagatggatcctttccactatgactatcagacactgcggatagggggacttgtatttgctgtggtcctgttctccgttgggatccttctgatcctttctcgtagatgtaaatgcagtttcaatcagaaacctagagccccaggcgacgaagaggcccaggtcgagaacctgattacagctaatgccacagagcctcaaaaggcagagaattag

SEQ ID NO: 188398 - DNA, 288 bp, synthetic construct
  misc_feature 1..288: note = Description of Artificial Sequence: Synthetic coding sequence
  source 1..288: mol_type = other DNA
atggagctggtgctggtgttcctgtgcagcctgctggcccccatggtgctggcctcagccgccgagaaagagaaggaaatggatcccttccattacgactatcagaccctgcgaatcggtggtctggtatttgcagtcgttttatttagcgtggggattctgctgatcctgtctcggaggtgcaagtgttcctttaatcaaaagccacgcgccccaggcgacgaagaagctcaagtggaaaatttgataacagcaaacgcaaccgagcctcagaaggccgagaactag

SEQ ID NO: 188399 - DNA, 288 bp, synthetic construct
  misc_feature 1..288: note = Description of Artificial Sequence: Synthetic coding sequence
  source 1..288: mol_type = other DNA
atggagctggtgctggtgttcctgtgcagcctgctggcccccatggtcttagcttccgcagctgagaaagagaaggaaatggacccttttcactatgactaccagaccctcaggattggcgggctggtgttcgccgttgtgctgttttccgtggggattctgcttatcctgtccaggcgatgtaaatgctcatttaatcagaagcctcgcgctccgggagacgaggaggcacaggtggaaaacctaattacggcaaatgctacggagccgcagaaagcagagaattag

SEQ ID NO: 188400 - DNA, 243 bp, synthetic construct
  misc_feature 1..243: note = Description of Artificial Sequence: Synthetic coding sequence
  source 1..243: mol_type = other DNA
atggccacccccacccagacccccaccaaggcccccgaggagcccgatcctttctattatgactataacactgttcagactgttgggatgactctggccactatactatttctattggggatcctcattgttatttcaaaaaaagtgaagtgcagaaaggccgactcgcggtcagaaagtccaacctgtaagagctgcaaaagcgagttaccaagctcggcacccggcgggggaggtgtatag

SEQ ID NO: 188401 - DNA, 402 bp, synthetic construct
  misc_feature 1..402: note = Description of Artificial Sequence: Synthetic coding sequence
  source 1..402: mol_type = other DNA
atggtgagcgtgggcttcggcgaccgggccggcctgggcagcagctgtcgctgctcacaaataaccccggacatggcgagtgccgtcgcaaccagatatgtgctgggacactggccccgcgaccacatctgcggctgtggctcacaccaattaagttcctggagagctgagcccgatggcggtgtgggtatgccacacaccctgagtgagccccccagcggactcacgggcatttgggcaggcgctctggtatcccctgaaaaacagatgaaggagaacctgcgatctaatgatagtgagcctagattgcctgggtttgagtcatgcctgatccactccctggctgtatggccgtgggcttctaattttgcttcactcggcccgagcgtaaacaagggctag

SEQ ID NO: 188402 - DNA, 882 bp, synthetic construct
  misc_feature 1..882: note = Description of Artificial Sequence: Synthetic coding sequence
  source 1..882: mol_type = other DNA
atgtacttcctgacccccatcctggtggccatcctgtgcatcctggtggtttggatatttaaaaacgcggatcgctctatggagaagaaaaagggcgaacctcgaaccagagcggaggctcggccatgggtggatgaggaccttaaagacagctctgatctgcaccaggctgaggaagatgctgacgagtggcaggaaagcgaagaaaacgtagaacacatccccttcagccataatcactatccagaaaaagagatggtgaagagatcacaggaattctatgaactcctcaacaagcgtcgctcagtgcgcttcatcagcaacgaacaggtgcccatggaagttatagacaatgttatccgcactgccggcacggcaccgtccggcgcccacactgaaccctggacatttgttgttgttaaggaccccgatgttaagcataagatccgaaagatcatcgaggaagaggaggagattaattacatgaaaagaatgggccaccggtgggtgaccgacctgaaaaagctgcggaccaactggattaaggagtacctggatactgcgccaatcctgatccttatcttcaagcaagtgcatgggtttgccgccaatggaaaaaagaaagtgcattactataacgagatcagtgtgtctatcgcatgtggcatcctgctcgccgctctacaggttaacaatggcataacgatgaggcaccaaacagctcggcatcgccacttgatcgaagggccaggaaggtcctccgaagcctgtagcaaactgtccagccaggggtgccctgaatgtagaagcggcgattgccattatcactccagtcaactgtggcctagcacggaaggagctcccgggcctccaagaacttag

SEQ ID NO: 188403 - DNA, 1458 bp, synthetic construct
  misc_feature 1..1458: note = Description of Artificial Sequence: Synthetic coding sequence
  source 1..1458: mol_type = other DNA
atgggctgcgtgcagtgcaaggacaaggaggccaccaagctgaccgaagagcgggacggcagcctgaatcaaagctcaggttatcggtatggcactgatcccacgcctcaacactacccatctttcggtgttacctccatccccaactacaacaactttcacgccgccgggggtcagggcctgacggtctttgggggagtgaatagcagttcacatacgggtactttacgaacacggggcggaaccggggtgaccttgtttgtcgctctgtatgactacgaggctagaacggaggagtggtactttgggaagctgggaaggaaggacgccgagcggcaacttctgagctttgggaatccaagaggaacgtttctcatccgggagagcgaaaccacaaaaggtgcatactcgctgagtatcagagattgggatgatatgaagggcgatcacgtcaagcactacaaaataagaaaacttgacaatggaggatactatataactactcgcgcccagttcgagaccttgcagcagctggtccagcattactccgagaaagctgatggcctgtgtttcaacctgacggtaattgcatcaagctgcacaccgcaaacgtctggcctggcaaaggacgcctgggaggttgcacggaggtcactttgcctggagaagaagctgggacaggggtgcttcgccgaagtgtggctggggacctggaatgggaatactaaggtggcaatcaagacactgaaacccggcacaatgtcacccgaaagctttctagaggaagcccaaatcatgaaaaaattgaagcatgacaagctagtccagttatatgcagtcgtgtccgaagagcccatatacatagtgaccgagtatatgaataaaggcagccttctagattttctgaaagatggggagggacgggccctaaaacttccaaatctggtggacatggccgcacaggttgccgccggtatggcttatatcgagcgcatgaattacatacacagagatctcagatccgcaaacatcctcgtcggtaacgggttgatatgcaaaattgcggacttcgggcttgcccggctcattgaagataacgagtataccgcccgtcagggggcgaagtttcctattaaatggacggcccccgaggccgccctttatggccgctttacaatcaagagcgatgtgtggtccttcggaatcctcttaaccgagttggttacgaaaggccgggtcccctaccccggcatgaataatcgggaggtgctggaacaagtcgagcgcggatatcgcatgccctgcccccaggattgccctattagcctccacgaactgatgatccattgttggaaaaaagaccccgaggagcgccctacattcgaatacttgcagtcttttttggaggattatttcacggcgaccgagccccaatatcagcctggagaaaacttgtag

SEQ ID NO: 188404 - DNA, 1614 bp, synthetic construct
  misc_feature 1..1614: note = Description of Artificial Sequence: Synthetic coding sequence
  source 1..1614: mol_type = other DNA
atgggctgcgtgcagtgcaaggacaaggaggccaccaagctgaccgaggagagagacggaagtctcaaccagtcctcaggctaccggtacggcacagacccgaccccccagcattatccctcattcggtgtgacgtcaattcctaactacaacaatttccatgcggctggaggccaggggctgaccgtctttggtggagttaattcttccagtcataccgggacactcaggacaagagggggcacgggggtgaccttgttcgtggctttatatgattacgaggcacggacagaggatgatctgtcatttcacaagggagaaaagttccaaatcttaaacagtagtgaaggagattggtgggaggcacgctccttgaccactggtgaaacgggctacattccgagtaattacgtcgctcctgtggatagcattcaggctgaggaatggtattttggtaaactgggcaggaaagatgcagagaggcaactactgtccttcggcaacccaagaggcacctttctgattcgtgaatccgagactaccaaaggcgcctacagcttaagtatccgagactgggacgatatgaaaggcgatcatgtgaagcactataagataagaaagctggataatggcggttattacatcaccacccgagctcaatttgagacgctacagcagctcgttcaacactattccgagcgcgcagccggtttgtgctgcaggctggttgtcccctgccacaaaggtatgccacgcctgactgatctctcggtgaagaccaaagacgtgtgggaaattcccagagagtccctccagctcattaaacgcctgggtaacggtcagtttggggaagtctggatgggtacatggaatgggaatacaaaggtcgccattaaaacactcaaacctgggaccatgtctcccgagagttttttggaagaggctcaaatcatgaagaagctcaaacacgacaagctggttcagctatacgccgtggtctccgaggaaccgatttacatcgtgacggagtatatgaataaagggagtcttcttgacttcctgaaagacggtgagggtcgcgctctgaagctgcctaacctcgtcgacatggctgcacaggttgctgctggaatggcgtatatcgagcgtatgaactatatccatcgggacctgcgcagtgctaacatcttagtcggtaatggcctcatctgcaagatagccgactttggcctagcacggctcatcgaggacaacgaatatacagcccgccagggtgctaaatttcctattaagtggacagcccctgaagctgctctgtatggtcgttttaccattaagtccgacgtgtggagcttcggtattttacttacggagcttgtcacaaaggggcgggtgccttacccaggaatgaataacagggaggtccttgagcaggtggagaggggatatcgtatgccctgcccccaggattgtcctatatcactccatgagctcatgatccattgttggaagaaggaccccgaagagagacccactttcgaatacctccagtccttcttagaagactatttcaccgccacagagccccaataccagccgggcgaaaacctatag

SEQ ID NO: 188405 - DNA, 1449 bp, synthetic construct
  misc_feature 1..1449: note = Description of Artificial Sequence: Synthetic coding sequence
  source 1..1449: mol_type = other DNA
atgggctgcgtgcagtgcaaggacaaggaggccaccaagctgaccgaagagcgcgacggatccttaaaccaaagttcaggctaccggtatggtaccgaccctacgcctcagcactatccatccttcggagttaccagcatcccaaactacaataacttccatgctgcaggaggtcagggtctcactgtctttggcggggtcaactcttcatcgcatacagggactttgagaactcgcggcggaacgggcgtcacactctttgtcgcactgtatgactatgaggcaagaaccgaggacgacttatcttttcacaaaggagaaaagtttcagattctgaacagcagcgaaggggattggtgggaggcccgctcccttactaccggcgagaccgggtacatcccctcgaactacgtggcacccgtggacagcatacaggcagaagaatggtattttgggaaactaggacggaaagacgctgaaagacagcttctctctttcggcaaccctcgagggactttcttgataagagagagtgagacaaccaagggtgcctatagccttagcatcagggattgggacgatatgaaaggagatcacgtcaaacattataaaattcgtaagctcgacaatggtggctattatataactacacgcgcgcagtttgagactctgcagcagctcgtacagcactattctgggacatggaatggtaacacgaaggtcgctatcaaaaccttgaaacccggcacaatgtcccctgagtctttcctggaggaggcccagattatgaagaaactaaaacacgataagctcgtccaactgtatgccgtagtgagtgaggaacctatatatatcgtgactgaatatatgaataagggtagcctgttggactttctgaaggacggcgaagggagggctttgaaactacctaatctggttgatatggcagctcaggttgccgctggcatggcatacattgaaaggatgaattacatccacagagatctcagatcagctaacattctggtcggcaacgggctgatatgcaaaattgccgacttcggcttagcccgactgatcgaggacaatgagtacactgcgaggcaaggtgcaaagtttcccattaagtggaccgcaccagaggctgctctgtacgggaggttcacaataaagtccgacgtgtggtcgttcggcattctattgacagaactggtaaccaagggtagagtaccctatccgggcatgaacaacagggaggtcctggagcaagtggaaaggggttatcgcatgccgtgcccccaggattgtcccatttctctgcatgagctgatgattcattgctggaagaaggatccagaagagcgcccgacctttgagtacttgcagtctttcctggaggactattttacggcaaccgagccccagtatcaacctggagagaatctttag

SEQ ID NO: 188406 - DNA, 1614 bp, synthetic construct
  misc_feature 1..1614: note = Description of Artificial Sequence: Synthetic coding sequence
  source 1..1614: mol_type = other DNA
atgggctgcgtgcagtgcaaggacaaggaggccaccaagctgaccgaagagcgggacggctcccttaatcagtctagtggatacagatacgggacagaccccactccacaacattacccatccttcggcgtcacctctatcccaaattacaataacttccacgccgcaggcggccagggactcacggtttttgggggggtcaattcttctagccacaccggcactctccggactaggggtggcacgggggtcaccctgtttgtggccctctatgactacgaagctcgcacggaagatgatctcagttttcacaaaggggagaaatttcaaattctaaatagctccgagggggattggtgggaggctagatctctgaccaccggggagacgggatatattcccagcaactatgtggcgcctgtcgacagtattcaggccgaagaatggtattttggaaaacttggtcgaaaggacgccgagcgccagctcctgtcattcggtaatcccaggggtacctttctaatcagagagtctgagaccactaagggagcctactccctgagcattcgcgattgggatgacatgaaaggcgatcacgtcaagcactacaaaatccgtaagttggacaatggagggtattatattacaacgcgcgctcagttcgaaaccctccagcaactagtgcagcattattctgagcgagctgccggactttgctgtagactggtagtgccctgccacaaaggaatgcctaggcttaccgatctgagtgtaaaaacaaaagacgtttgggagattcctcgcgagtctcttcagctaattaagaggttgggcaacggacagtttggggaggtgtggatgggaacttggaatggaaatacaaaagtggccatcaaaactttgaagccaggtactatgtcccccgagtccttcctggaggaggctcaaatcatgaaaaaattgaagcatgacaaacttgtccagctgtacgccgtggtgagcgaagagccaatctacatcgttaccgagtacatgaacaaaggctcacttttggactttttaaaggacggcgagggtcgggcactgaaactcccaaacttggtggatatggctgcccaggtcgcagctgggatggcctatattgagcggatgaattatatccatcgagatctccggagcgcaaatatcctggtcggcaatgggctgatatgcaaaatcgctgatttcggcttggcccgcttgatagaagacaatgagtacaccgcgaggcaaggggctaagtttcccattaaatggacggcacccgaagctgccctgtacggcagattcaccattaagagtgacgtctggtcttttggtatcctcctgactgaactggtaactaaaggaagagttccttatcccggaatgaataatagagaggtgctggaacaggtggaacgcgggtatcgcatgccctgcccacaagattgcccgatttctctgcatgaactgatgatccactgttggaagaaagatcccgaggaacgccctacgttcgaatacctgcagtccttcctggaagactatttcaccgccacggagccacagtaccagccgggtgaaaacctctag

SEQ ID NO: 188407 - DNA, 1605 bp, synthetic construct
  misc_feature 1..1605: note = Description of Artificial Sequence: Synthetic coding sequence
  source 1..1605: mol_type = other DNA
atgggctgcgtgcagtgcaaggacaaggaggccaccaagctgaccgaagaacgcgacgggagtttaaaccagagctccggctatagatacggcacagatcctactccacagcattacccctcatttggcgtgacttctatcccgaattataacaacttccatgctgctggcggccaggggctaaccgtgtttgggggggttaacagcagctcgcatacaggcaccctgaggactaggggcggcacaggggtcacactgtttgtggctctgtacgattatgaagcccgcaccgaggacgacctctcctttcacaaaggcgagaagtttcagatacttaactcatcggaaggtgactggtgggaggctagatctctcacaacaggagagactggatacattccaagcaactacgttgcacctgtcgattcaatacaagcagaagagtggtactttggcaagctgggaaggaaggatgcggagcgccagttgctgtcatttggtaaccctcgaggcacattcctgatccgggagtcagaaaccactaagggagcttactcgctgagcatcagagactgggatgatatgaagggggatcacgtcaagcactataaaatccgaaagctggacaacggcggatattacatcacgactcgcgctcagtttgagaccctgcagcagctggtccaacattattcggagaaagccgacggcctctgcttcaatctgacagtgatagcttcgagttgtactcctcagaccagcgggctggccaaggatgcgtgggaggtcgcccggaggtccttgtgcctcgagaagaagctggggcagggctgttttgccgaagtgtggctgggaacctggaatgggaacacgaaggtagctatcaaaacattgaagcccggcacaatgagccccgagagcttcttggaggaagcccagattatgaaaaaactaaagcacgacaaactcgttcagctctacgctgtcgtgagcgaagaaccgatttacatcgtgacagaatacatgaataagggctccctgctggatttcctgaaggacggggaagggcgcgcgctgaagctgccgaacttagttgatatggctgcgcaggtagcagccggcatggcttacattgagaggatgaattacatccacagggacctccggtccgccaacatccttgtgggcaacggtctcatatgcaagattgccgattttggtttagctaggctcatagaggataacgagtacacagcaaggcaaggggccaaatttccaatcaagtggaccgccccagaagccgccctttatggaaggtttactataaagtcggatgtgtggtccttcggcatactactgactgagttagtcactaaaggacgggttccctaccccgggatgaataacagggaggtgttggaacaagtggagcgcgggtaccgcatgccttgcccccaagactgtccaatatccctccatgagctgatgattcactgctggaagaaggatcctgaagagcgcccaacctttgagtatctgcagtcatttctcgaggattacttcaccgctaccgagccccagtatcagcctggcgaaaacctgtag

SEQ ID NO: 188408 - DNA, 1605 bp, synthetic construct
  misc_feature 1..1605: note = Description of Artificial Sequence: Synthetic coding sequence
  source 1..1605: mol_type = other DNA
atgggctgcgtgcagtgcaaggacaaggaggccaccaagctgaccgaggagcgggatggatctctgaatcagagctctggttaccgttacggtactgacccaacaccccaacactatccaagctttggggtcacctccattcccaactataacaatttccatgctgctggcggacaaggactgaccgtgtttggcggtgtgaactcttcctcacacaccggtaccctgaggacaagaggtgggacaggagttactctctttgtggctttgtacgattacgaggcaagaacggaagatgatctcagctttcataaaggagaaaagttccaaattttgaactcaagcgaaggagactggtgggaggctcggagcttaacaacaggagagacaggttacattcccagcaactacgtggcccctgtggatagcatccaggctgaggagtggtattttggtaagttgggcagaaaagacgccgaacgccaactgctgtcattcgggaaccctagggggacattcctgatccgcgagtctgagacaacaaaaggagcttatagcctctcaattagagattgggatgatatgaagggcgatcacgttaaacactataagattcgcaagctagataacgggggatactacattaccacccgggcccagttcgaaaccctccagcaattggtccaacactactcggagaaagctgacggtttatgtttcaacctgaccgtgatcgccagttcttgcactccacagacatccggcctcgctaaggatgcctgggaagtcgcgcgtagaagcctgtgccttgaaaagaaactgggtcaggggtgctttgcagaagtctggctcggtacctggaatggcaatacaaaagttgcaattaaaactctgaaacctggcaccatgtctccagaatccttcctggaggaggctcagatcatgaagaagttaaagcatgataagctggttcagttatacgcggtggtgtctgaagagccgatttacatcgtcactgaatacatgaacaagggatctcttctggactttctgaaagatggggaaggacgggctctgaaactaccaaacctggtggacatggccgcccaggtcgcagccggcatggcatacattgagagaatgaattacattcatagagacctccgctcagctaatatccttgtcggcaatggactcatttgcaaaattgccgatttcggactcgcgcggctcattgaggacaatgagtatacagctaggcagggagccaagtttccaattaaatggacagcccctgaggccgcgctctatggacgatttactataaagtcagatgtatggtcattcgggatccttctaacagaactggtgactaaagggcgggtcccataccctggaatgaataatcgggaagtgctcgaacaagttgagcgcggctatcgaatgccctgcccacaggattgccccataagcctgcacgagctcatgatccactgctggaagaaagatcccgaggaacggccaaccttcgaatacctgcagtcatttctggaagattatttcaccgctacggagccccaataccagcctggggagaacctgtag

SEQ ID NO: 188409 - DNA, 363 bp, synthetic construct
  misc_feature 1..363: note = Description of Artificial Sequence: Synthetic coding sequence
  source 1..363: mol_type = other DNA
atgggctgcgtgcagtgcaaggacaaggaggccaccaagctgaccgaagaacgtgacggtagcctaaatcagtcatctggttacaggtatggcacagacccaactccgcagcattatccttccttcggcgtgaccagcatacctaactataacaatttccacgccgccggaggccagggcttgacagtgtttggaggggtcaacagcagttcgcacacagggaccctgaggacccggggtggtaccggagttacgttattcgtcgccctctacgattatgaggcgcgcaccgaagacgacctgtcctttcacaagggagaaaagttccaaattctcaactccagtgagggggactggtggtag

SEQ ID NO: 188410 - DNA, 699 bp, synthetic construct
  misc_feature 1..699: note = Description of Artificial Sequence: Synthetic coding sequence
  source 1..699: mol_type = other DNA
atgggctgcgtgcagtgcaaggacaaggaggccaccaagctgaccgaggagagggatgggtccttaaaccagtcctcaggctaccgttacggcactgatccaacacctcagcactacccctccttcggagtgacgtcaatccccaattacaacaattttcatgcagccggcggccaaggactcactgtgtttggcggagtgaactcctcttcccataccggcacccttaggacccggggtggaaccggtgtcaccctctttgtcgctttgtacgactatgaggctcgtacggaggacgacctttcattccacaaaggagagaagttccagatcctcaactcttcggagggggactggtgggaagcccggtccttgactaccggagagacaggctacattccaagcaattacgtggcgcctgtcgatagcattcaagccgaggagtggtactttgggaagctgggacggaaagatgctgagcgacagcttttgtcctttggcaacccacgagggaccttcttaatccgggaaagcgaaacaacaaagggcgcttactccctctccattagagactgggacgacatgaagggcgaccatgtgaagcactataaaatacgcaagctggataatggcggatattacatcactactcgggcgcagttcgagaccctgcagcagttagttcaacactactcctag

SEQ ID NO: 188411 - DNA, 321 bp, synthetic construct
  misc_feature 1..321: note = Description of Artificial Sequence: Synthetic coding sequence
  source 1..321: mol_type = other DNA
atgggctgcgtgcagtgcaaggacaaggaggccaccaagctgaccgaggagcgggacgggtcgcttaaccagtctagtggctacaggtacgggacagatccgactcctcaacactaccccagttttggcgtgacaagcattcctaattataataatttccatgctgctggaggtcagggtctgactgtgtttggtggggtgaactcaagcagtcatacaggaacgctaaggacgaggggcgggaccggcgtcaccctgttcgtagctctgtacgactacgaggctagaactgaggacgatctctctttccataagggatag

SEQ ID NO: 188412 - DNA, 198 bp, synthetic construct
  misc_feature 1..198: note = Description of Artificial Sequence: Synthetic coding sequence
  source 1..198: mol_type = other DNA
atgggctgcgtgcagtgcaaggacaaggaggccaccaagctgaccgaggaacgggatggtagtcttaatcagtcttcaggctaccgctatggtactgacccaacaccccaacactacccctcttttggggtgacatccatccctaattataataattttcacgccgcaggcgggcaggggctgacagtttttgggtag

SEQ ID NO: 188413 - DNA, 528 bp, synthetic construct
  misc_feature 1..528: note = Description of Artificial Sequence: Synthetic coding sequence
  source 1..528: mol_type = other DNA
atgggctgcgtgcagtgcaaggacaaggaggccaccaagctgaccgaggagcgagatggatccctgaaccagtctagcgggtatcgctacggcactgaccctaccccacagcattatccatctttcggcgtcactagtattcccaactacaataattttcatgcggccggggggcaaggcctcacagtctttggcggcgtcaattcatcaagtcataccggcaccttacggactaggggtgggacaggggttacacttttcgtcgcactctatgactatgaggctcgtacagaggatgacttgtcttttcacaagggagagaaattccagattctgaacagttccgaaggagactggtgggaggctcgatctctaacaacaggggagaccggctacatccccagcaactatgtcgccccagtggactctatccaggccgaggaatggtacttcggcaaactggggaggaaggacgctgagcggcaacttctgagttttggcaatcctcgcggcacgttcctaatatag

SEQ ID NO: 188414 - DNA, 462 bp, synthetic construct
  misc_feature 1..462: note = Description of Artificial Sequence: Synthetic coding sequence
  source 1..462: mol_type = other DNA
atgggctgcgtgcagtgcaaggacaaggaggccaccaagctgaccgaggaacgagatggaagtctgaatcagtcttctggttatcgatacggcaccgatccgaccccccagcattatccatcgtttggagtcacttctataccaaattacaataactttcatgccgctggcggacagggtctgactgtgttcgggggagtcaatagcagttcccataccggaaccctgcgaacacggggtggaaccggcgtgacactttttgtcgcgttatatgattatgaggcacgtacagaggatgacctcagtttccacaaaggcgaaaagtttcagattctgaattcgtctgaaggcgactggtgggaggcacgctccctgaccacgggcgaaaccgggtatatccccagcaactacgtggctcccgtggactctatccaggcagaagaatggtattttggcaagtag

SEQ ID NO: 188415 - DNA, 357 bp, synthetic construct
  misc_feature 1..357: note = Description of Artificial Sequence: Synthetic coding sequence
  source 1..357: mol_type = other DNA
atgggctgcgtgcagtgcaaggacaaggaggccaccaagctgaccgaagagcgcgacggttcactgaaccagagctccgggtatcgttatgggactgatcccacgccccaacattatccctcgttcggcgtgacgtccatacccaactataataatttccatgcagccggtgggcaggggctgactgtgttcgggggagtaaactcctcttcgcacaccgggacgctgaggacccgtggcgggacaggcgttaccctgtttgtggcgttgtatgactatgaagcccggaccgaggacgatctaagcttccacaagggagagaaatttcaaatcttaaacagctcagagggagattag

SEQ ID NO: 188416 - DNA, 561 bp, synthetic construct
  misc_feature 1..561: note = Description of Artificial Sequence: Synthetic coding sequence
  source 1..561: mol_type = other DNA
atgggctgcgtgcagtgcaaggacaaggaggccaccaagctgaccgaagagcgtgacgggtccctcaaccagtcctccggctataggtacggaactgaccccacaccccaacactacccgtcatttggggtcacatctatccctaactacaataacttccacgcagcaggcggacaagggcttaccgtgttcggtggagtgaactcctcctcccacactggaaccctgagaacaaggggaggcacgggagttacattgttcgtggccttatacgactatgaagcaaggacagaggacgacctgagcttccacaaaggcgaaaagttccaaatcctcaattcttctgagggcgactggtgggaagctcggtctctgaccacaggggagactggatacattccgtcaaattatgtagctccagtcgactccatccaagccgaagaatggtactttgggaagctggggaggaaagatgcagagcgccagctgctatctttcggcaatcccagagggaccttcttaatcagggaatcagaaacaacaaagggagcctattcttag

SEQ ID NO: 188417 - DNA, 312 bp, synthetic construct
  misc_feature 1..312: note = Description of Artificial Sequence: Synthetic coding sequence
  source 1..312: mol_type = other DNA
atgggctgcgtgcagtgcaaggacaaggaggccaccaagctgaccgaggaacgggatggatccctcaatcagtcctctgggtaccgctacggaaccgaccctaccccccagcactacccaagcttcggcgtgacgtccataccaaactacaataatttccacgcagctggcggtcagggattaaccgtgtttggaggtgtaaacagctcctcccataccggcactttgcgcactcgcgggggaaccggcgtgacactgttcgtagcattatatgactatgaagccagaacagaagatgacttaagcttttag

SEQ ID NO: 188418 - DNA, 459 bp, synthetic construct
  misc_feature 1..459: note = Description of Artificial Sequence: Synthetic coding sequence
  source 1..459: mol_type = other DNA
atgggctgcgtgcagtgcaaggacaaggaggccaccaagctgaccgaagagagggatggcagtttgaaccagagctccgggtacagatatgggactgatcctacgccacagcattaccccagtttcggcgttacaagcattccaaattacaacaacttccacgccgctggtggccagggactcaccgtgtttggtggagttaatagctctagccacaccggcacgctgagaacccgtggcggtactggagtgactctgttcgtcgctctgtacgactacgaggctaggaccgaggacgacctgagcttccacaagggagagaagttccagatactcaactcaagtgagggtgactggtgggaagcgaggagtttgaccaccggcgagaccgggtacattccttccaattacgtcgctcctgtggattcgatacaggcagaggagtggtatttcgggtag

SEQ ID NO: 188419 - DNA, 351 bp, synthetic construct
  misc_feature 1..351: note = Description of Artificial Sequence: Synthetic coding sequence
  source 1..351: mol_type = other DNA
atgggctgcgtgcagtgcaaggacaaggaggccaccaagctgaccgaggagcgtgacggctcactaaatcaatcctccgggtatcgctacggcaccgatcccactccacagcactacccgtccttcggcgtgacttctatccccaattataacaactttcacgctgccggcggtcagggcctcaccgtttttgggggtgtgaacagcagttcccatacgggtaccctacgcacgcgcggtggtacgggggtgacactttttgtagctttgtacgattacgaagccaggactgaggacgacctgtcctttcacaagggagaaaaattccagatccttaatagctcagagtag

SEQ ID NO: 188420 - DNA, 423 bp, synthetic construct
  misc_feature 1..423: note = Description of Artificial Sequence: Synthetic coding sequence
  source 1..423: mol_type = other DNA
atgggctgcgtgcagtgcaaggacaaggaggccaccaagctgaccgaggaacgggacggctctttaaatcaaagttccggataccgttacgggactgaccccacgcctcagcactacccatcgtttggcgtgacaagcatacctaactacaacaatttccatgccgccggcggacagggacttaccgtcttcgggggtgtgaacagctcgtcccacactggaaccttgcggactcgaggaggcacaggcgtcaccctattcgtcgccctttacgattacgaagccaggactgaggatgacctgagcttccacaagggagaaaagtttcagatcttgaattcttctgagggggactggtgggaagcacgctctctcacgactggggagacagggtacattccatccaattacgtcgcaccatag

SEQ ID NO: 188421 - DNA, 438 bp, synthetic construct
  misc_feature 1..438: note = Description of Artificial Sequence: Synthetic coding sequence
  source 1..438: mol_type = other DNA
atgggctgcgtgcagtgcaaggacaaggaggccaccaagctgaccgaggaacgcgatgggagtctaaatcagtcaagcgggtatcgctatgggacagaccctaccccccagcattacccttcttttggcgtgacaagcatccccaattacaataatttccatgctgccggaggtcagggattgacggtgttcggcggggtaaactcttcaagtcatactggcaccctccggacgcgcggcggcacaggcgtcacgttgttcgtggccttatatgattatgaggctcggacagaggacgatcttagttttcacaagggagaaaagttccagattctaaacagttccgagggcgattggtgggaggcacgttccttgacgacaggcgagaccggatatatccccagtaactatgtcgcccccgtggactccatccagtag

SEQ ID NO: 188422 - DNA, 1605 bp, synthetic construct
  misc_feature 1..1605: note = Description of Artificial Sequence: Synthetic coding sequence
  source 1..1605: mol_type = other DNA
atgggctgcgtgcagtgcaaggacaaggaggccaccaagctgaccgaagagcgggatgggagcctgaaccagtcttcgggctacagatatgggacggatcctactcctcagcattatcccagcttcggtgtcacctccattcccaattacaacaactttcacgctgcgggtgggcaaggactcaccgtgttcggaggggtgaactctagctcccacaccggtactctgcgaactcgagggggaacgggagtgaccctgtttgtggcactatacgactatgaggctcgtaccgaggacgatctgtcctttcacaagggagaaaagttccagattctcaacagttcagaaggggattggtgggaggccaggtctctgacaactggcgaaactggatatatcccgagcaattatgtagcaccagtcgactcaatccaggcagaggagtggtatttcgggaagctcggccgtaaagacgcagaacgacagctcctatcctttggcaacccaagaggtacctttctcattagggagtctgagacgacaaaaggtgcctattcgttgagtatccgggattgggatgacatgaaaggggatcatgtcaagcactataaaatcagaaaactggacaacggtggctactatattaccactcgtgctcagtttgagacacttcaacagctggtgcagcactactcggagaaagccgatggactctgttttaacttaactgtaattgcgtcatcctgcaccccacagaccagcggactcgctaaagacgcctgggaggtggctcgccgaagcctttgccttgagaagaaactcggccagggatgctttgccgaagtttggctgggcacgtggaacgggaataccaaagtggccattaagactctcaaacctggaacaatgagccccgaaagttttctcgaagaagctcagataatgaaaaaactaaagcacgacaagctggtgcagctttacgcagtggtgagcgaggagccaatttatatcgttactgaatatatgaataaaggctccctactggatttcctgaaggatggcgaggggcgcgcccttaaattacccaacctggtcgatatggccgcccaggtggctgcgggaatggcatacatcgaacgcatgaactacatccacagagatcttcgctcggctaatattctggtgggcaacggactgatctgtaagattgccgatttcggattggcacgcctaatcgaggataatgagtatactgcacgccaaggagccaaattcccgattaaatggaccgcccctgaagcggcactatacggacgctttaccatcaaatctgatgtgtggtcctttggaattctgctgaccgaactcgtgactaaaggacgtgtaccatacccgggcatgaataacagagaggtcctcgagcaggtggagaggggttatcgcatgccatgccctcaggactgcccgatttctctgcatgaattgatgatacattgctggaagaaggaccctgaagaacgaccgacatttgaataccttcagagctttttggaggactactttacggctactgagcctcagtaccaacccggtgaaaacctgtag

SEQ ID NO: 188423 - DNA, 1458 bp, synthetic construct
  misc_feature 1..1458: note = Description of Artificial Sequence: Synthetic coding sequence
  source 1..1458: mol_type = other DNA
atgggctgcgtgcagtgcaaggacaaggaggccaccaagctgaccgaagaacgcgacggtagtctgaatcaatccagcggctaccgttacggtactgatccaaccccacagcactacccatcattcggagtaaccagcatcccaaactataataatttccacgctgctggcgggcagggcctgaccgtcttcgggggcgttaactcttctagccacacaggcacgttacgcactaggggcggcacaggcgttactctgttcgtggctctttatgactacgaagcacaggcagaagaatggtactttggtaaattgggcagaaaagacgccgagcgtcagctcctaagcttcgggaatcctagggggacgtttctcatccgggagtcggaaacaacaaagggtgcttactccctctccatccgcgattgggacgacatgaagggagatcatgtgaagcattacaagatcagaaaactcgacaatggcggttactatattaccacccgcgctcagttcgaaacacttcaacagctcgtccaacattacagtgagaaggccgatggactgtgcttcaatcttacagtcatagcttcttcatgcactccccagacctcaggcctggcaaaagacgcttgggaagtggccagaagaagcctgtgcttggaaaagaagctcggccaggggtgcttcgcagaagtctggttggggacatggaatggtaatacaaaggtagctatcaaaacgttgaagccaggcactatgtcaccggagagctttttggaggaggctcaaatcatgaagaagcttaaacatgacaagctggtacagctttacgcagttgtgtctgaggaaccaatctacattgttactgagtatatgaacaaggggagcctgctcgattttcttaaggatggcgagggaagagcactcaaactccctaatctcgtagacatggcagcccaggtcgctgctgggatggcgtatatagaacgcatgaattacatacatcgcgatttgcgcagcgctaacatccttgtcggtaacggactgatttgcaagattgcagatttcggcctggcacgtctcatagaggataatgagtatactgccagacagggggccaagttccctattaagtggaccgcgccggaggctgccttatatggcagattcactattaagtctgatgtatggtcatttggcatattgctcaccgagcttgttacaaaagggcgagttccctaccccggcatgaacaacagggaggtcctagagcaagttgaaagaggatatagaatgccttgcccccaggactgtcccatctcactccatgaactgatgatccattgctggaagaaagaccccgaagagaggccaacatttgaataccttcaaagttttctggaggactatttcaccgcaaccgagccccagtatcagcctggggaaaatctttag

SEQ ID NO: 188424 - DNA, 4437 bp, synthetic construct
  misc_feature 1..4437: note = Description of Artificial Sequence: Synthetic coding sequence
  source 1..4437: mol_type = other DNA
atggccagcaccaacgccgagagccagctgcagcggatcatccgggacctgcaggacgccgttacagagttgtcaaaggaattccaggaagcgggagagcccattacagatgacagcacatcactccacaagttctcatataagctcgaatatttactgcaatttgaccagaaggagaaagccactttactggggaataaaaaggactattgggactacttctgcgcctgtctggctaaagtgaagggtgcgaacgatggcatccggtttgtaaaatcgattagtgaacttcgcacctccctcggaaaagggcgtgctttcatcaggtattctctcgtgcatcagaggctcgcggatactctccagcagtgcttcatgaacacaaaggttactagtgattggtactacgctagatctcccttcctgcagcctaagctctcatccgatattgtgggccagctctacgaactcacggaagtccaattcgaccttgcttcacgggggtttgacctcgacgcagcttggcccaccttcgccaggagaaccctgaccactggatcatccgcatacctgtggaagcccccatccaggtctagctcaatgtcaagtttggtgagctcatacctgcagacccaggagatggtctcgaacttcgatttgaattccccactgaacaacgaggctcttgaagggtttgacgagatgcgactggaattggaccagttagaagtacgggaaaagcagctgcgagagcgcatgcagcagttggaccgggaaaatcaagaactgagggccgcggttagccagcagggcgagcaactgcaaactgaacgggaacgaggacggacggctgcggaggacaatgtcagactgacgtgcctggtggctgaactccaaaaacaatgggaggtgacacaggctactcaaaacactgtaaaggaactgcagacatgtctccagggtcttgagctaggggcagcggaaaaggaagaggattatcataccgctctaaggagactggaatcgatgctccagccccttgctcaggagcttgaggcaacgcgcgattccttggataaaaaaaaccaacacctggctagtttccctgggtggttagctatggcccagcagaaagccgatactgcatccgacacaaaaggacgccaagagcccattccctctgacgccgcccaagagatgcaggagctcggagagaagttgcaggctctggagcgcgaaaggacaaaagtcgaggaggtcaatagacaacagtctgcccagctggaacagctggtcaaggagttacagctgaaagaagacgctcgggctagtctcgaacggctggttaaagagatggctccccttcaggaggagctctctggcaagggacaggaggcagaccagctgtggcgccgcttgcaggagttattagcacatacctctagctgggaagaagaactcgccgagctgcggagagaaaagaagcaacagcaggaggagaaggagctgctggaacaggaagtacggtcacttacccgccagctgcaatttctcgagacccagctggcacaggtttcacaacacgtgtccgatctggaggaacagaaaaaacagctgattcaggataaggatcacctgtcgcaacaggttgggatgctggaacgcctggccgggccccctggacctgaactgcctgtggcgggagagaagaacgaagctttggtgcccgtcaatagctcactccaggaagcctggggcaagccggaggaggaacaaaggggcttgcaggaggcccaactagatgatactaaggtacaggaggggtcccaagaagaggaattacggcaggccaatcgtgaactggagaaagagctgcagaatgttgttggtcgcaatcaacttctcgaaggtaaactacaggctctgcaggcagactatcaggcgttgcaacagagggagtccgctattcagggctcgctcgctagtttggaagccgagcaggcttccatcaggcatctgggcgatcagatggaggcatcactgctggcagtgcggaaggcaaaggaagctatgaaggctcagatggcagaaaaggaggccatacttcaaagcaaggaaggcgagtgtcaacagctccgcgaggaggttgagcaatgtcagcagctggcagaggcccgacatagggagctgcgcgctctggaaagccagtgccagcagcaaacccaactgattgaagtgctcaccgccgagaaaggccaacagggagtgggcccccctaccgataatgaagcgcgggaacttgctgcacaattggcgctctctcaggcgcaactggaggtccatcagggcgaggtccagcgcttacaggcccaagtggtggaccttcaggctaagatgcgggccgcactcgacgatcaggataaggttcagagccagttgtccatggctgaagcggttttaagagaacacaagacactggtacagcagttgaaagagcagaatgaagcactgaatcgcgcgcacgtgcaggagctcctacagtgttctgaaagggaaggtgcacttcaggaggagcgagccgacgaggcccagcaacgagaggaagaactcagagccctccaagaggagctgagccaggccaaatgctccagtgaggaggctcagctggagcacgccgagctccaggagcagctgcatagggccaacactgatacagccgagctaggtatccaggtgtgtgcccttaccgtagaaaaggagagagtggaagaggccctggcttgcgcggtgcaggaactacaggatgcaaaggaggcggcgtcacgcgagagagagggcctggagaggcaagtggctggcctccaacaagagaaagagtccctccaggaaaaactgaaagccgcgaaggctgcggccgggagtctccctggattgcaagcacaactcgcccaggccgagcagagagcgcagagcctgcaggaggccgcccaccaggaattgaatacactgaagtttcaactgtccgccgagattatggactaccagtctcgcctgaagaatgccggcgaggagtgcaagtcactgcgaggccagttggaagagcagggtcgacagttgcaggcagctgaggaggccgtggagaagctgaaagctacccaagcagacatgggggagaagctttcatgcactagcaatcatctggccgagtgccaggccgccatgctccgcaaggacaaagaaggtgccgccctgagagaggacctcgagcggacacaaaaggagctggaaaaagccaccaccaaaattcaagaatactataataagctgtgccaggaagtgaccaaccgagagcgcaacgatcagaaaatgttggccgacctggacgacctgaacaggactaaaaaatatctcgaagaacgcctgatcgagttgttgcgcgataaggatgctctctggcaaaaatctgatgcactggagtttcagcagaaactcagcgcagaagaacgatggctgggagatactgaagcgaatcattgtctggactgcaaaagagaattcagttggatggtccgcagacatcactgcagaatatgtggccgcatcttctgctattattgttgcaacaattatgtgctctccaagcacggaggcaaaaaagagcgttgttgtagggcctgttttcaaaagctctcagaaggacccggaagtccagatagctctggttccgggacaagtcagggcgagcccagccctgcactgtccccggccagcccagggccgcaggccaccggcggtcagggagcaaataccgattaccggcctcctgatgacgcagttttcgatataataactgatgaggagctgtgccagatccaggagtcagggtcatctctgccagaaacacctaccgagactgacagcctggacccaaatgctgccgaacaagatacaacttcgacaagccttacccccgaggacactgaggacatgcctgttggacaggattcagagatctgtctgctgaaaagtggggagcttatgatcaaagtgcctctcactgttgatgaaattgctagcttcggcgagggctcgagggagttattcgtgaggagcagtacatactctctcatccccatcaccgtggcggaggcggggttaaccatctcttgggtgttctcttctgatcccaaatctatcagcttcagcgtggtgttccaagaggctgaggatacccccctcgaccagtgtaaggtgctcattccaactactcgctgtaactcacacaaggagaacatacaggggcaactgaaagtgcgaactcccgggatctacatgcttatcttcgacaataccttcagcagatttgtgtccaagaaggtgttctaccatctgactgtcgaccgaccagttatttatgacggctccgacttcctttag

SEQ ID NO: 188425 - DNA, 804 bp, synthetic construct
  misc_feature 1..804: note = Description of Artificial Sequence: Synthetic coding sequence
  source 1..804: mol_type = other DNA
tgaagcaagcacggcggcaagaaggagcggtgctgccgggcctgctttcagaagcttagtgagggacctggttccccagacagctctggctccggcacatctcagggagagccatcacccgcactttctccagccagtccaggcccgcaggcaacgggggggcagggcgctaacactgactacaggccacccgatgatgccgtgtttgacatcattactgacgaagagctgtgccaaatacaggaatctggtagttccctcccagagacgcctaccgaaactgattctctggacccaaatgccgctgaacaggatacaaccagcacctctctaacacccgaggataccgaagatatgccggtggggcaggactcggagatctgccttctgaaatccggagaactaatgatcaaggtgccgctcacagtggatgagatcgcgagctttggtgagggatcccgcgagctctttgtgcgtagctccacttactccctgattcccattacagtcgcggaggctggcctgaccatatcttgggtgttttcttccgatccgaaatcgataagcttcagcgtggtgtttcaggaggccgaggacaccccgctggatcagtgcaaagtgctgatacccacaacacgctgcaattcacacaaggagaacattcagggccagctgaaggtccgtaccccaggcatttacatgctgatcttcgacaatacattttcccggttcgtgagcaagaaggttttttatcacctgaccgtggataggcctgtgatttatgacggctcggattttctgtag

SEQ ID NO: 188426 - DNA, 4497 bp, synthetic construct
  misc_feature 1..4497: note = Description of Artificial Sequence: Synthetic coding sequence
  source 1..4497: mol_type = other DNA
atggccagcaccaacgccgagagccagctgcagcggatcatccgggatctccaggacgcggtcacagagctgtcgaaggagttccaggaagcgggagagccaataacagatgactccacgtctcttcacaagttctcttataagttggagtatctgctgcagttcgatcagaaggagaaggccacactcctcgggaataaaaaagattactgggattatttttgtgcctgtttagccaaagtcaaaggtgctaacgacggtatcagatttgtgaaatcaatctccgagttgagaacttcactcggtaagggacgggcctttatcagatactccctggtccaccagcggctggcagacacacttcagcagtgtttcatgaacacaaaggtgacgagtgattggtactatgccagatctccatttctccagcccaaactgtcttcagacattgttggccagctatatgagctgactgaagtccagttcgacctggctagcaggggctttgatttggatgccgcctggccaacatttgcacgccgcaccttaacaaccgggtcctctgcctacctgtggaagcccccctcaagaagttcctcgatgtcgagtctggtgtcttcctacttacagacccaggaaatggtgagcaatttcgatctaaactcaccactgaataacgaggctctggaaggttttgatgaaatgcgccttgagcttgaccaactcgaagttagggaaaaacaattgagggaacggatgcagcaactggacagggaaaaccaggagttgcgggccgcggtgagccagcagggagagcagctgcagacagaaagggaaagaggaaggactgctgcagaagacaatgtgcgattaacatgcctcgtggctgagctgcagaaacaatgggaggttacacaggccactcagaacacagttaaggagctgcagacgtgcctgcaaggcctggaattgggtgccgccgagaaagaagaggattaccacactgctctaagacggttggaatccatgctccaacctctcgctcaggaacttgaggccaccagggattcactcgacaagaagaaccagcatttggcctccttccctggctggctcgcgatggcccagcaaaaagcagacactgccagtgatactaaaggacggcaagaacccatcccctccgatgccgcacaggagatgcaggaactgggggagaaactacaggctctcgagagggagcgaactaaggtagaggaggtgaatcgccaacaaagcgcccagttagagcaactggtgaaggaactccaactgaaagaggatgcgcgcgcttcgctggagcgcctggtcaaggagatggcccctctgcaagaggagctctccgggaaaggccaggaagccgatcagttgtggcggaggctacaggagctcttggcccacacgtcgtcttgggaggaagaattagccgagctaagaagggagaaaaaacagcaacaagaagaaaaagagctgctagaacaggaggtcagaagcctaaccaggcagctgcagttcctggaaacgcagctcgcccaggtgtctcagcatgtgagcgacctcgaggagcagaagaaacaactcatccaagacaaggatcacttgtctcagcaggtcgggatgctcgagaggctagccggccctcctggacccgagttgcccgtggcaggtgaaaagaatgaggctctggtccctgtgaactcatcccttcaggaggcttggggcaagcctgaggaagaacagcgcgggctacaggaggcacagctggacgacaccaaggttcaggaggggagtcaggaagaagaacttaggcaggcaaatcgtgagttagagaaagagcttcagaacgtcgtgggtcggaaccaactcctggaaggaaaactgcaggcactacaggcagactaccaggccctgcaacagcgtgagtccgcaatccagggcagcctggcgagtctagaagcagaacaggccagtatacggcatttgggggatcagatggaggcctcactgctcgcggtccgaaaggcgaaagaggcgatgaaagcccagatggctgagaaggaagccattctgcagtccaaggagggggaatgtcaacaattgcgcgaagaagtggaacagtgccagcagctggcagaagcccgacatcgtgagctgcgggcactggaatcccagtgccagcagcagacacaactgattgaggtgcttaccgctgaaaagggccagcagggcgtcggtcctcctaccgacaacgaggctcgcgaattggcggctcagctggccctctcgcaggcacagctcgaggtacatcaaggcgaggtacagcggctccaggctcaggttgttgacctacaggccaaaatgcgtgcagcacttgatgatcaggacaaggtgcagtcacaactcagcatggcggaggccgtacttagagaacacaaaactcttgttcagcagctgaaggaacaaaatgaggcattgaacagggcccatgtgcaagagctactgcagtgcagtgagcgggagggagcgctgcaggaagagagggccgatgaggcccagcaacgggaggaagagctgcgggctctccaggaggaactgtcccaggcaaaatgcagcagtgaggaggctcagctcgagcacgccgagttgcaggagcaacttcatcgagcaaacaccgacacggctgaactggggattcaggtgtgtgctcttaccgtagaaaaggaaagggttgaggaagcacttgcatgcgctgtgcaagagctgcaagatgctaaggaggcggcttccagggagcgcgaagggctggaacggcaggtagcaggccttcaacaggaaaaggagtccttacaggaaaagctgaaggcagccaaggctgccgctgggtctctccccggactccaagctcagctggcgcaggccgagcagcgtgcccagagccttcaggaggcagcccaccaggaactcaatacgcttaaatttcagctgtctgccgaaatcatggactatcaaagccgattaaagaatgccggggaagagtgtaagagcctcagagggcagctggaagagcagggccggcagctgcaggccgcagaagaagctgtcgaaaagcttaaagccacgcaggctgatatgggggagaagttgtcatgcacaagcaaccatctggcagaatgccaggccgctatgctccggaaggacaaggaaggcgcagctcttcgcgaggatctcgaacgtacccaaaaagaattagaaaaagcgacaacgaagattcaagagtattacaataaactttgtcaggaggtgactaacagggagcggaacgatcaaaaaatgctggctgacctcgatgacctcaaccgaaccaaaaaataccttgaagaacgtctgatcgaactcttacgcgataaggatgcactttggcagaaaagtgacgcactggagttccagcagaagttgagcgccgaagaaagatggctcggagacacagaagctaatcactgcctcgactgtaaaagagagttctcttggatggtgcgccgtcaccactgtaggatctgtgggcgaatcttctgttactattgttgtaacaactatgtgctgtcgaaacacggaggcaaaaaggagcgttgttgtagagcttgttttcaaaaactgtccgagggccctgggtcacccgatagttcgggcagcgggacaagccaaggagaaccatcaccagcactgtcgcctgcctcaccagggccccaagccaccggaggtcagggggccaacacggattatagaccaccagatgatgcagttttcgatatcattactgacgaggagttgtgtcagatccaagaatccgggtctagcctgcctgagactcctaccgaaactgatagcttagatccaaatgcggccgagcaggccagcgtgggagcttccaagggactgggcaacctgctatgtgaatcctccgcgtgccgtgacaccacaagcacctctttgacccccgaggataccgaggacatgcccgtgggccaggactccgagatctgcctcctaaagagtggtgaacttatgattaaagttccattgaccgtcgatgagattgcaagtttcggtgaaggctcccgtgagctgtttgtccggagttcaacctatagcctgattcctatcaccgtagctgaggcaggactcacaatctcctgggttttttcgagcgaccccaaaagtatctccttcagcgttgtgtttcaggaagccgaggatactcctttagaccagtgcaaggttctgatcccgacaacaagatgcaattctcataaggagaacattcaggggcagctgaaggttagaacacccggcatttacatgttgatattcgacaacaccttctctcgtttcgtgtcaaagaaagtgttctaccatcttacagtagaccgtcccgtcatctacgatggttcagatttcttgtag

SEQ ID NO: 188427 - DNA, 2886 bp, synthetic construct
  misc_feature 1..2886: note = Description of Artificial Sequence: Synthetic coding sequence
  source 1..2886: mol_type = other DNA
atgcacggccaccgggcccccggcggcgccggccccagcgagcccgagcacccggccactaacccaccaggcgccgccccaccggcctgcgccgattccgatccgggcgcctccgaaccgggtcttctggcccgccggggttctggtagtgctcttggaggtcccctggatccccagttcgtgggtccatctgataccagcttgggtgcagccccaggccacagagtgttgccttgcgggccttcccctcaacatcaccgagctctacgcttctcttaccacctcgagggctctcaaccccgtcccggactgcatcaggggaatcggattctggtcaaatccctttcactggatcctggccaaagcttggaacctcaccccgagggccctcagaggctgcgctcggaccccggcccccctaccgagactccctctcaaagaccatctccactaaagagagcacccgggcctaagccacaagtgccccctaagccatcttacctgcaaatgcctaggatgccaccacctctcgaaccgatccctccaccaccttctcgccccctgcctgccgatccacgtgtcgctaagggcttggcccctagggcggaggcatcaccctccagcgcagccgtatcgtccctgattgagaagtttgagagggagccggtcatcgtggcttccgaccgccctgtgcctggaccttctcccgggccgccagagcccgttatgctgcctcagcccacgagccagccgcctgtcccccagctaccagaaggagaggctagcaggtgtctatttctgttggcaccaggaccccgcgacggggaaaaggtccccaatagagactccggcattgacagcatttcctccccttcgaattctgaggagacttgttttgtgagcgatgatggccctccttcccacagtctgtgccccggccccccagccttggccagcgtccccgttgccctggcagatccccaccgccccgggagccaggaggtcgattcagatctggaggaggaagacgatgaggaggaagaagaagagaaggaccgggagattcccgtgccgctgatggaaaggcaggaatccgtagagcttacagttcagcagaaggtgttccatatcgctaacgaactgctccagacagaaaaagcatacgtgtcgagactacatctattggaccaagtcttttgcgccagactcctggaggaggcgcgcaaccgatctagcttccctgcggatgtcgtacatggcatcttctcgaacatttgttctatatattgcttccatcagcagttcctccttcctgaactcgaaaagcgaatggaagagtgggataggtatcctaggatcggagacattctccagaagctggccccatttcttaagatgtacggtgagtatgtcaagaacttcgatagagcagtcgaactggtgaacacctggacggagcggagtacccaattcaaagtgataatccacgaggttcagaaagaggaggcatgtggaaacctcacgctgcagcatcacatgttagaacccgtacagcgcatcccccgttatgaattgctgctgaaggattatctccttaagctgccccatggaagcccggactccaaagacgcacagaaaagcctcgaactgatcgctacggctgcagagcattctaatgccgccattcgcaaaatggaacgcatgcataagctgttaaaggtctatgaacttcttggcggggaggaggacatagtgagcccaactaaggaactgatcaaggaggggcatattttgaaactgagtgcgaagaatggtacaacccaggaccgctatctcatcctctttaatgaccggctgctttactgtgttccacgtctgcgcctactgggacagaagttctctgtgagagcccggatcgatgtggacggtatggagctgaaggaaagttcaaatctgaacttgccacgcacttttttggtttcagggaagcaacggtctctagagctgcaggcaagaactgaggaggaaaagaaggattgggttcaggcaatcaacagcactctgctcaaacacgagcagacactcgagacatttaagctcctgaacagcacaaatagggaggacgaagatacacctcctaacagccctaatgtcgacctcggaaaacgggcacccactcccatccgtgagaaggaagtaacgatgtgcatgagatgccaggaaccattcaactcaataacaaaaagaagacaccactgtaaggcatgtgggcatgtagtgtgcggaaaatgtagtgaatttagagcacggttggtctatgacaacaatagatctaatagagtatgcacagattgctatgttgcactgcacggcgtgcctggttcttcacccgcttgctcacagcataccccccagaggcgacggagcatactcgaaaaacaggcttccgttgcagccgaaaacagcgtgatctgcagctttctgcattacatggaaaaagggggcaaaggctggcacaaagcatggtttgtagtgcctgaaaacgagccgctggtgctgtatatctatggagctccgcaggatgttaaggcccagagaagtctccctctaatcggatttgaagtgggccccccagaggcgggggagcggcccgacagacgacacgtgttcaagataacccagtctcatctgtcttggtatttctccccagaaacagaggagttacagaggaggtggatggcagtgttgggtagggctggtaggggcgatactttctgccccgggcctaccctatctgaagatcgggagatggaggaggctcccgttgctgccctcggcgccacagcagaacccccggagtctccgcagacacgggacaagacgtag

SEQ ID NO: 188428 - DNA, 1968 bp, synthetic construct
  misc_feature 1..1968: note = Description of Artificial Sequence: Synthetic coding sequence
  source 1..1968: mol_type = other DNA
atgaagggcgccagcgaggagaagctggccagcgtgagcaacctggtcactgtgtttgagaatagtcggaccccagaagctgcccctcgggggcagcgcctggaggacgtgcaccatagaccggaatgccgccccccagagagcccaggcccgcgggaaaaaactaatgtgggcgaggcagttgggtccgagccaagaactgtcagtagacgatatctgaactcattgaagaacaagttgtcctccgaggcctggcgcaagagctgccagccagtcaccctgagcggaagcggcactcaggaacccgaaaaaaagatcgtgcaagagctcctggaaaccgagcaggcctatgtcgcccgactccatctgttggatcaggtttttttccaggaacttctgaaaacagccagaagcagcaaggccttcccggaagatgtggtgagagtgatcttctccaatataagttcgatctatcagtttcacagccagtttttcctgcccgagctgcaacggagactggacgactggactgccaatccaagaattggcgacgtgatacaaaaactggctccgtttctgaagatgtattctgaatatgtgaagaactttgaacgtgctgccgagctacttgccacatggaccgataagtctccgctgttccaggaggttttaactagaattcagtcctccgaggcgagtggctcacttacactccaacatcacatgctggagcctgtgcaacggattcccagatacgaactgcttttaaaagagtatatccagaaacttcctgcccaggcccccgatcaggcagatgcacagaaggctctcgacatgattttttctgcggcacaacacagcaatgcagcgattacagaaatggagagactgcaggacttgtgggaagtgtaccagcggctggggctcgaagacgacatcgtagaccctagcaacacactgctgcgggagggacccgtcctgaaaatctctttccggcgaaatgaccccatggagaggtatctgtttttatttaataacatgcttctgtattgcgtgcctagagttatccaagttggagctcagtttcaggttcggaccaggatcgacgtggccggaatgaaggttagggaacttatggatgcagaattcccccactcgttcctcgtgagtggcaagcagcgaacacttgagctgcaagcccgcagtcaagaggaaatgatatcgtggatgcaagcatttcaggctgcgatagaccagatcgagaaacgcaacgaaacattcaaagccgctgcccagggtccagaaggcgacatccaagagcaggagctgcagtccgaggagttgggactgagagccccacagtgggttagagacaagatggttacgatgtgtatgaggtgtcaagaaccttttaacgctctcactcgccgaagacaccactgcagagcatgcggctacgtggtgtgcgcccggtgctctgactaccgcgccgagctgaagtatgatgataatagaccgaatcgcgtttgtctccactgctacgcctttctcacaggaaatgtcctgccggaggcaaaggaggacaaaagaagagggatcttggaaaaaggcagctccgccaccccagaccagagtctcatgtgcagcttccttcaactgattggggataaatggggtaaaagtgggcctcgggggtggtgcgtaattccacgcgacgatccactcgtactctacgtctacgcagcccctcaagacatgagggctcacacttccataccactattagggtatcaagtaaccgtcggccctcagggggatccgagggtgttccagctacagcaatctggacagctgtatacctttaaggccgaaacagaggagttgaagggcagatgggtgaaggccatggaacgtgccgctagtgggtggtcgccctcctggccgaacgacggcgacctgtctgattag

SEQ ID NO: 188429 - DNA, 852 bp, synthetic construct
  misc_feature 1..852: note = Description of Artificial Sequence: Synthetic coding sequence
  source 1..852: mol_type = other DNA
atgaaggtgcgggagctgatggacgccgagttcccccacagcttcttggtatcgggtaaacagcgcaccctggagttgcaggctcgctctcaagaagaaatgatttcttggatgcaggcctttcaagcggccatagaccagattgagaaacgcaacgagaccttcaaagcagcagcccaagggcccgaaggagacatacaggagcaggagctgcagtccgaagaactgggccttcgagcaccccagtgggtaagggataaaatggtcaccatgtgcatgagatgtcaagagcccttcaacgctcttacgagacggcgccaccactgcagagcttgtggctacgtcgtgtgtgcacgctgttcggactatcgggccgaattgaagtacgatgataatcggcccaatcgtgtgtgcttacattgctatgccttcctcactggcaacgtgctgcccgaggctaaggaggacaaaaggcgcggcattctggagaaggggagctccgccacccctgaccagtctctgatgtgctccttcttacagctgataggagataagtggggtaagtcaggcccacgtggatggtgtgtgattccaagggatgatcccctagtgctgtatgtgtacgccgctccccaggacatgcgagctcatacctcaatccccctcctgggatatcaggttacagtcggccctcagggcgacccacgcgtcttccagctgcagcagtccggacagctgtacacttttaaagccgaaacagaagaactgaagggcaggtgggtaaaagccatggagagggccgctagtggatggtccccgtcctggccaaacgatggagacctgtccgactag

SEQ ID NO: 188430 - DNA, 2178 bp, synthetic construct
  misc_feature 1..2178: note = Description of Artificial Sequence: Synthetic coding sequence
  source 1..2178: mol_type = other DNA
atggagagcggccggggcagcagcaccccccccggccccatcgccgctctcggaatgcctgacactggaccagggagcagctctctgggaaaactccaggctctgcctgtgggccccagggctcactgcggcgatcctgttagccttgctgcagctggcgacggctcaccggacatcgggccaacgggagagctgtcaggctcactgaagattcccaatagagactctgggattgactcgcccagctccagcgtcgcaggcgagaattttccatgcgaggagggcctggaggcgggccctagtccaacagtgctgggcgcccacgccgagatggccttagacagccaggtaccaaaagttacgccccaggaagaagctgatagcgacgtcggcgaggaacccgactcagaaaacactcctcagaaagcagacaaagacgccgggttggcccagcattcaggaccccagaagttattgcacattgcccaagagctcctccatactgaagaaacatatgtcaaaagacttcatcttctggaccaggtattctgtactagactgactgacgctggcattccgccggaggttatcatggggatctttagcaacatttcatccatccacagattccacggtcaattccttcttccggagcttaagactaggattacagaagaatgggacactaacccgcggttaggagatattctccagaaattggcaccttttctgaaaatgtacggtgaatacgtgaaaaatttcgatagagcggtaggactggtgtcaacctggactcagcgttcacccctctttaaggatgtggtccatagtatccagaagcaagaggtgtgcgggaacctcactttgcagcaccacatgcttgaaccagtacagcgggtgccacggtacgaactcctcctgaaggactacttgaaaagactgccacaggatgcacctgacaggaaagacgctgagaggtcgctggagctgatcagtacagctgcgaaccacagcaatgccgcaatcagaaaggttgagaaaatgcacaagctccttgaggtctatgaacaactgggcggggaggaggatatagttaatccagcaaacgaactcatcaaggaggggcagatacagaagcttagtgcaaagaatggtactccacaggaccggcacctcttccttttcaatagcatgattctttactgcgtgccaaagctcaggttgatgggccaaaaattcagcgtaagggaaaaaatggacatcagtggtctacaggttcaggatattgttaagcccaacactgcccatacattcattatcaccggacgtaagaggtctctggagctgcaaacgagaactgaggaggagaagaaggagtggatccaaatcatccaagctacgattgaaaaacacaagcagaatagtgaaacattcaaagctttcggcggcgctttttcgcaagatgaggaccctagtttaagtcccgatatgcctataacttccacctcacccgttgagcccgtggtgactacggagggcagctccggagccgccggccttgaacccaggaagctgagtagcaagacacgtagggacaaggaaaagcagagctgtaaatcttgcggcgaaactttcaacagtatcacgaagagaagacatcactgtaagttatgcggcgcagtcatctgcggcaagtgtagtgagttcaaagcggaaaacagtcggcagtctcgggtctgcagggattgcttcctgacgcagcccgtcgcccctgagtccacggaaaagaccccgacggcagatccacagccatctctgctctgtgggcccctcaggcttagcgaatcaggggagacctggtccgaagtatgggccgcaattcctatgagcgatccccaggtgttacatctgcagggagggagccaggacggacggctgcctcgtacaatccccctaccttcctgcaaactgtctgtccccgacccagaggaacggctggatagcgggcacgtttggaagctgcagtgggcgaaacagtcctggtacctgagcgcatcgtccgctgaactccagcagcagtggctcgagaccttgtccaccgccgcgcacggcgacaccgcacaggactccccaggcgcattacagttgcaggtgccgatgggggccgccgccccgtag

SEQ ID NO: 188431 - DNA, 2178 bp, synthetic construct
  misc_feature 1..2178: note = Description of Artificial Sequence: Synthetic coding sequence
  source 1..2178: mol_type = other DNA
atggagagcggccggggcagcagcaccccccccggccccatcgccgctctgggcatgccagacacgggcccaggaagcagctcactgggcaaacttcaggccttacctgtgggacctcgggcccactgtggcgatcctgtgagcctcgccgctgccggtgatggatctccggatatcgggcctaccggggagctctccgggagtttgaagatccctaatagggattcaggaatcgacagtcccagtagctctgtcgcaggcgaaaacttcccatgcgaagagggactggaagctgggccttcccctacagttctgggagcacacgccgagatggctctggactcccaggtgcctaaagttactccgcaggaggaagcagattcggatgttggggaagagcctgactctgagaacacgccccaaaaggctgataaggatgctggactggctcaacacagtgggccacagaagctgttgcacattgctcaggagctgctgcataccgaagaaacctatgttaagaggctgcacttgctggatcaggtcttctgtaccaggctgacggatgctggcatcccacccgaagttatcatgggaatcttttccaatatatcctcaatccaccgctttcacggacagttcttactgcccgaattgaagaccagaatcaccgaggaatgggacactaatccccgtttaggggacattttgcagaagctggcacccttccttaagatgtacggagagtacgttaaaaacttcgacagggcagtgggactggtgtctacatggacccagcggagtccactcttcaaggacgtggtgcactctattcagaaacaagaggtgtgcggtaacctgactctgcaacatcacatgcttgaacccgtacagcgagttcctagatacgagctgctcctgaaggactacctaaagagactgccgcaagatgcgccagacagaaaggatgcggaacggtctctggagctgatctccacagctgccaaccattcgaatgccgccatcagaaaagttgagaagatgcataaattattggaggtgtatgaacagttgggaggcgaggaggacatcgttaaccccgccaatgagttgattaaggagggacaaattcagaagctgagcgctaaaaatggcacaccccaggatcggcatctgttcctgttcaacagtatgattttatactgtgttcccaaattgcgccttatgggccagaagttttctgtacgggagaagatggatatttctgggcttcaggtccaggatatcgtgaaacctaatacagcccacacattcattattacaggaagaaaacgctctctggagttgcagacacggaccgaggaggagaagaaagaatggatccaaatcatccaggctaccatcgaaaagcataaacaaaattctgagacttttaaggcatttggaggggccttctcacaggacgaggaccccagtctgtcgccagatatgcccattacttccacctcccctgtggaaccggtggtgaccaccgaaggctcctccggagccgcaggtctagaaccccgaaaactgtcttctaaaacacggagagacaaggagaagcagtcttgtaagagctgtggagagaccttcaactcgattaccaagcggaggcaccactgcaagctctgtggcgctgtgatttgcggaaagtgttcagagttcaaagccgagaatagtcggcagtctcgagtctgtcgcgattgtttcctgacccagccggtggcacccgaatccacagagaagacccctactgcagaccctcaacctagtttgctgtgcggtcccctccggctctctgagagcggcgagacttggagcgaagtctgggcagcaatccccatgtctgacccacaggtacttcatctgcagggtggttctcaggacggtaggctcccccgcacaatccccctaccatcatgcaaactttcagtgcccgaccccgaagaacgcctggattccggccatgtctggaagttgcagtgggcaaaacaaagctggtatttatccgcttctagcgctgaattacagcagcaatggctcgagacgcttagcaccgcagcccacggggatactgcccaggactcacccggcgcgctccaactacaggtgcccatgggggcagccgccccgtag

SEQ ID NO: 188432 - DNA, 2175 bp, synthetic construct
  misc_feature 1..2175: note = Description of Artificial Sequence: Synthetic coding sequence
  source 1..2175: mol_type = other DNA
atggagagcggccggggcagcagcaccccccccggccccatcgccgccttgggcatgcctgatactgggccgggtagctcatcgttaggaaaactgcaggcccttcccgtgggaccacgcgcacattgcggcgacccagtctctctggccgcagcgggagatgggtctccagatatagggcccaccggtgaacttagcggatctcttaaaatccccaatcgcgactcggggatcgactctccatcttcctctgtcgcaggcgagaatttcccctgcgaggaaggactggaagcaggcccatcacccaccgttctgggggcccacgcggaaatggcgctcgacagtcaggttccaaaagttacccctcaggaagaggccgactccgacgttggggaggagcccgactctgaaaacacaccacagaaggccgataaagatgctggcctggcccaacactctggtcctcagaaactgctgcatattgcccaggagctgctgcataccgaggaaacctatgtcaagagactgcacctcctggatcaggtgttttgcactaggctaaccgacgctgggatcccccccgaggtcataatgggcattttcagcaacatcagctctattcatcgcttccacggccagtttttgcttccagaactgaagacccgaattaccgaagaatgggacaccaatccacggctgggagacatcctccagaagttggctcctttcctgaaaatgtacggggagtacgttaagaactttgatcgggccgtggggctagtctccacctggacccagagatcaccactgtttaaggacgtcgtccactctatccaaaagcaggaagtgtgcggaaacctgactctccagcaccacatgttggagcccgtgcaaagggtccccagatacgaacttctgctgaaagattacctgaaacggttgccacaggacgctcctgaccgtaaggacgccgaaagatctttggagctgatttccaccgcagcgaatcactccaatgcagcaatccggaaggtggagaagatgcataaattgctcgaggtatacgagcaactggggggagaagaagacattgtgaaccccgccaacgaattgatcaaggagggacagattcaaaagttgtctgcaaaaaacggcacaccccaggataggcatctgtttctgtttaattccatgatactgtattgcgttcctaagctgcgtctgatggggcagaagttttctgttcgggaaaagatggacatctccggtcttcaagttcaggatattgtgaaaccaaacacagcacacacattcatcatcactggaaggaaacgctcactagaactccagactagaaccgaggaagagaagaaggaatggatacagataatacaggctaccatcgagaaacataaacagaactctgagacctttaaagcattcggcggagcattctcccaggacgaggacccctccctgtctccggacatgcctattactagcacctcccccgtggagcccgtagtgacaactgaaggttcatcgggagcagccgggcttgagcccaggaagctttcgagcaagacaaggagagacaaggagaagcagagttgtaaaagctgcggggagacgttcaacagcattacaaagagacgccaccattgcaagttgtgcggtgcagtcatatgtggcaaatgtagcgagttcaaggcagagaacagtagacaaagcagagtctgtcgcgattgctttcttacacagcctgtcgccccggagtcaactgagactccgacagctgatcctcaaccttcgttattatgcggcccccttagactgagcgaatcaggcgagacctggtcagaagtgtgggccgccatccctatgtccgacccacaggtgctgcatctgcagggagggtcccaggatggccggcttccacgaaccattcccttacccagctgcaagctgtcggtgcccgatccagaagagagactggatagtggacacgtctggaagctccagtgggccaagcagagctggtatctcagcgctagctcagcagaactgcagcagcagtggcttgagaccctctctactgcagcccacggggatactgcccaggactcacctggtgcgctgcagctacaagtgcctatgggtgcagcggcaccttag

SEQ ID NO: 188433 - DNA, 987 bp, synthetic construct
  misc_feature 1..987: note = Description of Artificial Sequence: Synthetic coding sequence
  source 1..987: mol_type = other DNA
atgatcctgtactgcgtgcccaagctgcggctgatgggccagaagttttccgtgcgggagaagatggacatttctggcttgcaggtgcaagacattgtaaaacctaatacagctcatacatttatcataacaggcaggaaaagatccctggagctccagactcggactgaagaagagaagaaagagtggattcagatcattcaggcgactatcgagaaacataaacagaattctgaaaccttcaaagctttcggaggcgccttcagccaagacgaagacccgagcctctccccggatatgccaatcacatccaccagtcctgttgagcccgtcgttaccacagagggatcatccggagcggctgggctcgagccaaggaagctttcctcgaagacccggcgggacaaggagaagcagagctgcaagtcatgtggagagacatttaactcaatcaccaaacgccgccaccactgcaagttgtgcggcgcagtaatatgcggaaaatgttcggagtttaaagcagagaattctaggcagtctagggtttgtcgggactgttttctcactcagccagtggcccctgagtcgacagaaaaaactccgactgcagaccctcaaccgagtctgctgtgtgggccactgcggctctcggagagcggggagacctggtctgaagtctgggccgccattccaatgagcgacccacaggtgctgcatttacagggaggctcccaggatggaagactccctcgtaccatccccctgccatcctgcaagctctccgtaccagaccccgaggagcggctggactccggccacgtgtggaagcttcagtgggcgaagcagagttggtatctctccgcgagcagcgcggaacttcagcagcaatggctagagacactttcgacggcagcacacggcgacacagcccaagacagccccggagcccttcagcttcaagtccccatgggcgcggcggctccctag

SEQ ID NO: 188434 - DNA, 1416 bp, synthetic construct
  misc_feature 1..1416: note = Description of Artificial Sequence: Synthetic coding sequence
  source 1..1416: mol_type = other DNA
atggtgaacaagatcttcagcaacatcagcagcatcaacgccttccactcgaagtttcttcttcctgaactcgagaagaggatgcaggagtgggagactactcctcgaatcggggacatactacagaaactcgctcctttccttaagatgtacggcgagtatgtgaaggggttcgacaatgccatggaattagtgaagaatatgaccgagcgaattccacagtttaagtctgtagtggaggagatccaaaagcaaaaaatttgcggctcattgactcttcaacatcacatgcttgagcctgtgcagaggatccccagatatgaaatgctactgaaggactacttacggaagctccccccagattctctggattggaacgacgcaaagaaatctctagaaattatttctaccgctgctagtcattccaattccgccataaggaagatggaaaatttaaagaagctcctggaaatctacgagatgctgggagaggaagaagacatcgtgaatccttctaatgaacttataaaagaaggacagatcctgaagcttgccgcacggaacactagcgcccaggaacgatacctgttcttattcaacaatatgcttctttattgtgtccccaagttttccctggtcggctccaaatttaccgttaggacccgggtgggtatagatgggatgaaaattgtcgaaacgcagaacgaggaatatccgcacacctttcaggtgtcaggcaaggagcgaacgcttgaactccaggcctcttccgcccaggataaggaggaatggatcaaggccctgcaagagaccatagacgcatttcaccagagacatgagactttccggaatgcaattgcaaaagacaatgacatccacagcgaggtctccactgctgagctggggaaacgagcacccagatggatccgcgacaatgaggtaactatgtgcatgaagtgtaaagaaccctttaacgcgctgacacgaagacgccatcattgcagggcctgcgggtacgtagtgtgctggaagtgtagtgattacaaggcccagttagagtatgatggaggtaagctgtcgaaagtttgcaaagattgttaccaaatcatttccggctttaccgattctgaggagaagaaaagaaaaggaatcctcgagatagagagcgcagaagtgagtggaaattcagtggtctgctcttttcttcaatatatggagaagagcaaaccctggcagaaagcctggtgcgtcatccccaaacaggaccctctcgtgctttacatgtatggagccccccaagtttctaaaccacacctcagcgaaggaactgacgctctgggtggcaaaggtaaacgggtggatagcggattgaagatctgcagaacaagagtacaagctgtgagtctgttccactag

SEQ ID NO: 188435 - DNA, 843 bp, synthetic construct
  misc_feature 1..843: note = Description of Artificial Sequence: Synthetic coding sequence
  source 1..843: mol_type = other DNA
atggtgaacaagatcttcagcaacatcagcagcatcaacgccttccactctaaattcctgctacctgagctggaaaaacgcatgcaggaatgggaaaccactcctcggataggcgatatccttcagaagcttgcccccttcctgaagatgtacggagaatatgttaaaggctttgacaatgctatggagctagtcaagaacatgacggagaggatcccccagtttaaatctgttgtcgaggaaatccaaaaacagaagatatgtggctcattgacactgcagcatcacatgctggagcccgtgcagcggatccctaggtacgaaatgctgctaaaggattatctgcgcaagctgccaccggatagtctggattggaatgatgccaagaaatcgctggagattatctctactgcagcctcccattcgaattctgccataaggaaaatggagaatctgaagaagctgctggaaatatatgagatgttaggcgaggaagaggatatcgtaaacccgagtaacgaattgataaaggaaggtcagatcctgaagctcgctgcccgcaatacatccgcccaggagcgctatctattccttttcaacaatatgctgctttattgcgttccaaagttctcactggtggggtcaaagtttacagtgcgaacaagagtcggcattgacgggatgaaaatcgtggagacacaaaacgaagagtatccgcacacatttcaggtatcgggaaaagagcgcacactggaactgcaggcgtccagcgcccaggataaggaagaatggattaagaggaggggtttcgctatgttgcccagacttatttccaattcttag

SEQ ID NO: 188436 - DNA, 567 bp, synthetic construct
  misc_feature 1..567: note = Description of Artificial Sequence: Synthetic coding sequence
  source 1..567: mol_type = other DNA
atgttcagctgcttcctgtgcatcctgagcttcagcagcctgagcaactattctgacctaaaaaaggagagcgccgtgaacctgaacgccccacgcactccgggacgccacggcctcaccaccactcctcaacagaaattactgtctcagcatctgccccagcgccagggcaacgatactgacaaaacacagggcgcacagacttgtgtggctaatggcgttatggcagcacagaaccagatggagtgtgaggaggaaaaggcggccacattgtcttccgacacctctatacaagccagtgaaccactactggatacccacattgtgaatggagaaagagatgagaccgcaaccgcgccagccagccccacgactgacagctgcgacgggaacgcaagtgactccagctataggacccctgggattgggcctgtgctgcccctagaggagcggggcgcggagacagagacaaaggtccaggagagggaaaatggcgaaagtcccttggagctcgaacaactcgatcagcatcacgaaatgaaggtagaacacgagacttcctcatag

SEQ ID NO: 188437 - DNA, 2301 bp, synthetic construct
  misc_feature 1..2301: note = Description of Artificial Sequence: Synthetic coding sequence
  source 1..2301: mol_type = other DNA
atggaggagatcaagcccgccagcgccagctgcgtgagcaaggagaagccgtccaaggtgtctgacttgataagtcggttcgagggcggatctagcttaagtaattactcagacctcaagaaggaatcagccgtgaaccttaatgctccccggaccccagggagacacggcttaacaacaaccccccagcagaagctactgtcacaacacctgccccagagacaagggaacgatactgataaaacccagggagcccagacgtgtgttgccaatggggtgatggccgctcagaaccagatggagtgtgaggaagagaaagcagccacactcagcagcgacacttcaattcaggcatccgagcccctcctggatactcatattgtcaacggagaaagagatgagactgctacagctcctgccagtccaaccactgactcttgcgacggaaatgcttctgacagcagctaccgaacacccggaatcggacctgtgctccccctcgaagaacgcggggccgagactgagacgaaagtgcaggaacgtgagaatggcgaatcccccctggagttggagcagctggaccagcatcatgagatgaaggaaactaacgagcaaaagttacataagatagctaatgaactcctgttaactgagagagcgtatgtcaatcgtctggacctgttggatcaggtgttctactgtaagctgctggaggaagcgaaccgtggtagcttccctgccgaaatggttaataagatattctccaacataagcagtatcaacgccttccacagcaagttcctactgcctgaattggaaaaaagaatgcaggagtgggagacaacccccaggatcggcgacatccttcagaaactggccccgttcctgaaaatgtacggcgaatatgttaaaggttttgataacgctatggagctggttaaaaacatgacggaacgtattccacagttcaaatccgtggtagaggagattcagaagcaaaagatttgcgggagcctgaccttgcagcatcacatgctggagcccgtacagaggatcccccggtacgagatgctgctgaaggactatttgcgaaaactccccccagatagtttggactggaacgacgctaagaagtccctcgaaatcatttctaccgctgctagtcatagcaactcagcgatcagaaaaatggagaacctgaagaagttattagagatctacgagatgttgggcgaagaagaggacatagtgaacccctccaatgagcttattaaggaaggccagattcttaaactggccgctaggaataccagcgctcaggaaaggtacttattcctgttcaataacatgctcctttactgcgtcccaaagttttcactcgtgggcagcaaatttacagtccgtactcgggtaggcattgatgggatgaagattgtggagactcagaacgaggaatacccccatacgttccaggtgtctggaaaggagcggactctcgaactccaggccagttcagcacaggataaagaagagtggatcaaggctctgcaggagaccatcgatgcatttcaccagaggcacgagaccttccgaaacgccattgcaaaggacaacgatattcacagtgaggtttcaacagccgagctcggcaagcgggccccacgatggatccgggataatgaagttacaatgtgcatgaagtgtaaagagccattcaatgcccttacacgcaggagacatcattgccgcgcctgtggctacgtagtctgttggaaatgctcagactacaaggcacagttggagtatgacggcgggaagctgtctaaggtctgcaaggattgctaccagattatctctggctttaccgattctgaggaaaagaaaaggaagggtatcctggaaatagaatccgccgaggtttccgggaacagcgtagtttgcagcttccttcagtacatggagaagtcgaagccttggcagaaagcatggtgtgttattccgaagcaggatcccctggttctctatatgtatggcgcaccacaagatgttcgcgctcaggcaactatccctcttctcggctacgtggttgacgagatgccgcgcagcgcagatctaccccactcctttaagctgacacagagcaagtccgtgcatagcttcgcggccgactctgaggagctaaaacagaaatggctaaaggtcattctgctggccgtgacaggagagactccaggcggcccgaacgaacatcccgcaaccctggatgatcacccagagcctaaaaaaaagagcgagtgttag

SEQ ID NO: 188438 - DNA, 624 bp, synthetic construct
  misc_feature 1..624: note = Description of Artificial Sequence: Synthetic coding sequence
  source 1..624: mol_type = other DNA
atggaggagatcaagcccgccagcgccagctgcgtgagcaaggagaagccatctaaggtgagcgatctcatatcacgattcgaaggcggcagtagtctgagcaactatagcgacctgaagaaagagagcgcagtgaatctgaatgccccccggactccaggacgccacgggctgactacaaccccacagcagaagctactttcacagcatctgccccagcgacagggaaacgacacagataagacacagggcgctcaaacatgtgtggctaacggcgtgatggcagcgcagaaccaaatggagtgcgaagaagagaaggctgcgaccctctcttctgatacaagtatacaagcttcggagccactgctcgatacccatatcgtgaatggagagcgcgacgaaacagccacagcacctgccagcccaactaccgattcctgtgacgggaatgctagcgattcctcatataggacccctggcatcgggcccgtccttccactggaggagcgtggcgccgagacggaaaccaaggtgcaagagcgggaaaacggagaatcacctctcgagctggagcagttggaccagcatcacgaaatgaaggtcgaacacgaaacttctagttag

SEQ ID NO: 188439 - DNA, 2637 bp, synthetic construct
  misc_feature 1..2637: note = Description of Artificial Sequence: Synthetic coding sequence
  source 1..2637: mol_type = other DNA
atgaacttcaagcgggtgaagcccaacatcttcctgctgaaccagtcccgcctgatcataagcatttgcgagataatgtctaccgatcagggttcaagcacgtgcccaaagatcgcactggtgcccccgtgcagcacttcttcaaccacaactctggtcggggagaacgtctctgaggaagaggcccagggcatcaacggcaacagaccggcaaaacactccgccgcgtcccccaaacctcaggtaccgccaaagcccctgcacctgcaaaattccccatcatccaacattcaccagactcctcgccataaggcactccccagtgccaagcctcggatggaggagatcaaacccgcctctgcatcctgcgtgtcaaaagagaagccctcaaaggtaagtgacctaattagtagattcgagggaggtagtagcttgagtaattatagcgacctgaagaaggagagcgccgtgaaccttaatgcgccccggaccccaggcaggcacggcctgactaccacgccccagcagaagttgctgtctcagcatctaccgcaaagacagggcaacgataccgataaaacccaaggtgcacaaacttgtgtagcgaacggagttatggctgctcaaaatcagatggagtgcgaggaggagaaggccgccacactctcctcagacacctctatacaggcttcagaacccctgttagatacccacattgtcaatggtgagcgggacgagactgccacagcgcctgcgtcccctactacagatagctgtgatggaaacgcaagcgacagcagctataggacaccagggataggaccggttctgccactggaagagcggggggcagagaccgagacaaaagtccaggagcgggagaatggcgaatcaccactggaattggaacagctcgatcagcatcacgagatgaaggaaaccaacgagcagaagctgcataaaatcgccaacgaactccttctcacagagagggcttatgtgaaccggctagacttacttgaccaggtattctattgcaagctgttagaggaagcaaatcgtgggagttttcctgcagagatggttaataagattttttcaaatattagctccattaatgctttccattctaaatttctgctcccggaattagagaagcgaatgcaggagtgggaaactacaccgaggattggcgacatcctgcagaaacttgctccattcctcaaaatgtacggagagtatgttaaaggtttcgataatgcaatggagctcgttaagaacatgaccgagcggatcccgcaattcaaaagcgtcgtagaagaaatccagaagcagaagatctgtggctccctcacattacagcaccatatgttagaaccagtgcagcggattccgaggtacgagatgctgctgaaggactacctgaggaaactgccaccagattctttggattggaatgacgcgaagaagagtctggagattatttccactgccgcttcccactctaactcagccatcaggaagatggagaatctgaaaaagcttcttgagatatatgagatgctcggagaagaggaggacatcgtcaaccccagtaatgagctcatcaaggaaggccaaattcttaagttggccgcgagaaatacaagtgcacaggagaggtatctgttcttgttcaataacatgctgctatattgcgtcccaaagtttagtctggtcggaagcaagttcacggtgcgtacaagagttggtatcgacggaatgaaaatagtggagactcagaacgaggaatacccccacacctttcaagtcagcgggaaggaacgcacgctggaactgcaggcgagctctgcacaggataaggaggagtggatcaaagccctgcaggagaccattgacgcttttcatcaacggcatgagacatttcgcaacgctatagccaaggacaacgatatccacagcgaagtcagtacagcagagcttggcaaacgagcgcccagatggattagagacaatgaggttaccatgtgtatgaagtgtaaagagccatttaacgctttgactcgccggcgtcaccactgccgcgcctgcggatacgtcgtatgttggaagtgttccgactataaagcccaactggagtacgatggcggcaaactgtccaaagtgtgtaaggactgttaccagatcataagtggcttcactgacagcgaagaaaagaagcggaagggtattttggagatcgaatccgcggaagtgagcggaaattctgtggtgtgcagttttctgcagtacatggaaaagagtaagccttggcagaaagcctggtgcgtaattcccaagcaggaccctctcgtactgtacatgtatggtgcgcctcaggatgtgcgcgcccaggccaccatccccttattaggctacgtggtagatgaaatgccaagatccgcagatcttccacacagcttcaagctgacccagtcgaaatccgttcacagcttcgcagccgattctgaagagcttaaacagaagtggctaaaagtgattctgcttgccgtgacaggcgagacaccagggggaccaaacgaacatcctgcgactctagacgaccacccagagcccaaaaaaaaaagcgaatgttag

SEQ ID NO: 188440 - DNA, 2556 bp, synthetic construct
  misc_feature 1..2556: note = Description of Artificial Sequence: Synthetic coding sequence
  source 1..2556: mol_type = other DNA
atgggcggctgcagcagcacctgccccaagatcgccctggtgcccccctgctctacttcatcaacgaccacccttgtgggcgagaacgtcagtgaggaggaagctcaggggattaatgggaaccgacctgccaagcactcagcagccagcccaaagccccaggtccctcctaagcccctacatctgcagaacagtccgtcttccaacatccaccagactccacggcataaagcactgccctctgccaaaccccggatggaggagattaaacccgctagcgcttcttgtgtttccaaggagaagcccagcaaggtgtctgatctgattagtaggttcgaaggaggaagctccctgtctaactattccgacctaaagaaggaaagcgccgtcaacttaaatgctccaagaacacctggtaggcacggtttgaccaccacacctcaacagaaactgctgagccagcatctcccacagagacagggcaacgatacggacaagactcagggagcacagacctgcgttgcgaacggagtcatggcggctcaaaatcagatggaatgcgaagaggagaaggctgcaactctgtccagtgacacaagtatacaggcgtctgagcccctgctcgacactcatatcgtgaacggggagagagatgaaacagctaccgcacctgcatccccgacgaccgactcctgtgatgggaacgcaagtgactcatcataccgcacccctggcatcgggcccgtgctgccgttagaggagcggggtgctgagactgagaccaaagttcaggagcgcgagaacggcgagtcccccttggaattggaacagctggatcaacatcacgagatgaaggagaccaatgaacaaaaactacacaagatagccaatgaacttctcctaaccgagagggcctacgtcaatcgactggatttgcttgaccaagtgttttattgcaaattgctggaggaagccaatcgcggaagttttcccgctgaaatggtgaataagattttttccaacataagctctatcaatgcctttcactcaaaatttttactgcctgagctggaaaaacggatgcaggaatgggagactacgcctcgaattggggacatactacagaaattggccccctttttgaaaatgtacggcgagtacgttaaaggctttgacaatgctatggaactagtgaagaacatgacagagaggattccccagttcaaaagtgtggtcgaggaaatccagaaacagaaaatctgtggatcacttaccttgcagcaccatatgctcgaaccagtgcagaggatacctcgctatgagatgctgttgaaggattacttgagaaaactgccccccgacagtttggattggaacgatgccaagaagtccctggaaataataagcaccgccgcgagtcattccaattctgcgattcgcaagatggaaaatctgaagaaattgttagaaatctacgagatgttgggagaagaagaggatatcgttaatccatctaacgagttgatcaaagaagggcagatcctgaaactggccgctagaaatacatctgcacaggagcgttacctgtttttatttaataatatgcttctctactgtgtcccaaagttttctctagtggggtcaaaattcaccgtgcgcactcgcgtgggcatagacggtatgaagattgtcgagactcagaatgaagagtacccccatacttttcaagtgtctggaaaggaaaggaccttggaactgcaggcttcatcggcccaggataaggaggaatggataaaagcattgcaggagaccatagacgcttttcatcaacggcatgaaactttcagaaacgccatcgccaaggacaacgacatccacagcgaggtttccacagcagaacttgggaaaagagcaccaaggtggattagggataacgaggtaactatgtgcatgaagtgtaaagagcctttcaatgcgcttacacgccgaaggcatcattgtagagcttgtggatacgtcgtctgttggaagtgcagcgactataaagctcagctcgagtacgatggcggcaaactttccaaggtctgtaaggactgttatcagatcatctccggttttactgactcagaggaaaaaaagaggaagggcatcctggagatcgagtctgccgaagtgtccgggaattctgtggtttgtagtttcctccagtatatggagaaaagtaaaccatggcagaaagcatggtgtgtaatccccaagcaagatccccttgttctgtacatgtatggggctccacaggatgttagagcgcaggccacaattccactcttgggctacgttgtggacgaaatgccgcgttccgctgacttaccacatagtttcaaattgactcagagcaaaagtgtccattcttttgccgccgactcagaggagctgaaacagaaatggctcaaggtgatcctgcttgcggttacaggcgagacgccagggggccctaatgagcacccagccactctggatgatcaccccgagcccaagaagaagtccgagtgctag

SEQ ID NO: 188441 - DNA, 2712 bp, synthetic construct
  misc_feature 1..2712: note = Description of Artificial Sequence: Synthetic coding sequence
  source 1..2712: mol_type = other DNA
atgagcgacgagggcggcagcaacttccggcgggtggccatccggcgtaaatccaaccctagttatctgcctccgggggtgccacgcccatggagtcggccggcaagccatttggggcgcgtcggaaccgctgcatttaaaggccaggtccccagtggtgcgacaggtagcagtacatgtcctaaaatagctttggtgcctccctgttcaactagctcaaccacaactctggtgggtgaaaatgtttctgaagaagaagctcagggtatcaatggtaatcgacctgctaaacactcagccgctagcccaaagccgcaggttcctcctaaacccttacatctgcagaattccccctcctccaacatccaccaaacccctcgccacaaagcactcccaagcgctaagccaaggatggaagagatcaagccagcctcagcgtcatgtgtctctaaagagaaaccgtcgaaagttagtgatttgatatcaagattcgaggggggctccagcctctccaattatagcgacctgaaaaaggagtccgccgttaacctgaacgcacctcgaactcctggccgccacgggcttacaactacaccgcagcaaaagttgctgagccagcatttgccgcagagacagggaaatgatacagataagactcagggtgcgcagacatgcgttgcgaatggggtgatggcagctcagaaccagatggagtgtgaagaagagaaagccgccaccctgagcagtgacacaagcattcaggccagcgagcccctccttgatacccatattgttaacggtgagagggatgaaaccgcgaccgcgcccgctagtccaactactgactcatgcgatggcaatgcttctgactcaagttatagaactcctgggatcggccctgtgttacctctggaagagcgtggggctgagacggagactaaggtccaggagcgagaaaatggcgaatcccccctggaattggagcaactggatcagcaccatgaaatgaaagagaccaatgagcagaaactgcacaagattgccaatgagctgctgctaacagaaagggcgtacgtgaaccgcctcgatctgcttgaccaggtgttctattgtaagctccttgaggaagccaacagggggtctttccccgcagagatggtgaataagatattcagtaacatcagcagcataaatgcattccactcaaaatttttgctgccggagttggaaaagcgcatgcaagaatgggagaccaccccgagaattggagatattcttcagaaactcgcgccatttctgaaaatgtatggcgaatatgttaaggggttcgacaatgcaatggaacttgtcaagaacatgacagaaagaatcccgcagtttaagtctgttgtagaagagatccagaaacagaagatttgtggaagccttaccctgcagcatcatatgctggaacctgtgcagagaatccccaggtatgaaatgctgctcaaggactatctgaggaaactacctccagatagtctagactggaatgatgccaagaagagcctcgagattatttcaacggccgcaagccactcaaattccgctatccggaagatggaaaatctcaagaagcttttggaaatctacgagatgctaggcgaagaagaggacatcgtgaacccatctaatgagcttatcaaggagggacagatactgaaactcgctgctaggaatacgagcgcacaggagagatatcttttcctatttaataatatgctgctttattgcgtgccaaaattctcactggtggggagcaagttcactgtccgaacgagggttgggattgatggcatgaaaattgtagagacacaaaatgaagagtatccacacactttccaggttagtggtaaagagaggacactcgaattgcaagcctcttcagcccaggacaaagaggagtggattaaagccctgcaagagaccattgacgcctttcatcagcggcatgagacattccggaatgctattgcaaaagataacgatatccactcggaagtgtcaaccgcagagctaggcaaaagagcccctcggtggattcgagacaatgaagtgacaatgtgcatgaagtgcaaggagccttttaacgctctgactcgaagacggcatcattgtcgtgcatgtgggtacgtagtttgttggaagtgctctgactataaggcacagctggaatacgatgggggaaaacttagtaaggtgtgcaaggattgttaccagattatttccggtttcaccgactctgaggagaagaaacggaagggcattctcgaaatcgagagtgcggaggtttctggcaactctgtcgtctgctccttcctgcagtatatggagaagtcgaaaccgtggcaaaaggcatggtgtgtgatccccaagcaagatccactagtgttgtatatgtatggagcacctcaggacgtgagagcgcaggcaaccattcctctactgggatatgtggtcgatgagatgcctcgaagcgctgaccttccacactcctttaaactgacccagtcaaaatctgtccatagcttcgcagccgattcagaagagctcaaacagaagtggctgaaagtgatcttgctggctgttacaggtgagactcctggcggacccaacgagcatcccgccaccctagacgatcaccctgaacctaagaagaaaagtgagtgttag

SEQ ID NO: 188442 - DNA, 420 bp, synthetic construct
  misc_feature 1..420: note = Description of Artificial Sequence: Synthetic coding sequence
  source 1..420: mol_type = other DNA
atgagctggcggggccggagcacctactactggccccggccccggcgatatgtccagcctcctgagatgatcggccccatgaggccagagcaatttagtgatgaggtggagccggccaccccggaggagggcgagccagccacacaacgacaggacccagccgccgcccaggaaggggaggatgagggcgcctcagccggacagggccctaagcccgaggccgacagccaggagcaaggccatccccaaaccggctgtgagtgcgaggacggcccagacggccaggagatggatcctccaaaccctgaggaagtgaaaacacctgaggaggagatgcggtcacactatgtggcacaaacaggcattctctggctcctgatgaataactgcttccttaacctgtctcctagaaagccatag

SEQ ID NO: 188443 - DNA, 351 bp, synthetic construct
  misc_feature 1..351: note = Description of Artificial Sequence: Synthetic coding sequence
  source 1..351: mol_type = other DNA
atgagctggcggggccggagcacctaccggagccggccccggctgtacgtggagccccctgaaatgatcggccccatgcttcccgaacagtttagtgatgaggttgaaccggcgaccccagaagaaggagagccggcaactcaaaggcaagacccagcagccgcacaggagggtgaagacgaaggcgctagtgccggtcagggcccgaaaccggaagcagattcacaagagcaggttcatcctaaaacgggatgcgagtgcggcgacggaccagacgggcaggagatgggcctccccaatccagaggaggtaaaacgaccggaagaaggagagaaacagagccagtgctag

SEQ ID NO: 188444 - DNA, 354 bp, synthetic construct
  misc_feature 1..354: note = Description of Artificial Sequence: Synthetic coding sequence
  source 1..354: mol_type = other DNA
atgagctggcggggccggagcacctactactggccccggccccggagatatgtacagcctcctgagatgatcggacccatgcggccagagcaattctccgacgaggtggagcccgcgacaccagaggaaggtgagcccgctacacagtgtcaggatccggcggccgcacaggagggcgaagatgagggcgcctccgctggacaagggcccaagcctgaggcccacagtcaggagcagggacatccgcagaccggatgcgagtgtgaggacggcccagatgggcaagaaatggacccacccaaccctgaggaagtgaagacacccgaggagggtgagaagcagagccagtgctag

SEQ ID NO: 188445 - DNA, 354 bp, synthetic construct
  misc_feature 1..354: note = Description of Artificial Sequence: Synthetic coding sequence
  source 1..354: mol_type = other DNA
atgagctggcggggccggagcacctactactggccccggccccggcgatacgtgcaacctcctgaaatgatcggcccaatgaggccggagcaattcagcgacgaagtggagccagcgacaccagaggagggcgaaccggccacacagtgtcaggatcccgcggcggctcaagagggcgaggacgagggagcaagtgcaggacagggcccgaaacccgaagctcactcgcaggagcagggacatcctcagacaggatgtgagtgtgaggatgggccagatggacaggaaatggatcctcctaaccccgaagaggttaaaaccccggaggagggagagaaacaatcacagtgctag

SEQ ID NO: 188446 - DNA, 354 bp, synthetic construct
  misc_feature 1..354: note = Description of Artificial Sequence: Synthetic coding sequence
  source 1..354: mol_type = other DNA
atgagctggcggggccggagcacctactactggccccggccccggcgatatgtacagcccccggagatgattgggccaatgagaccagagcagtttagcgatgaagtggaacctgctacacccgaggaaggcgaacctgctacacaatgtcaggaccccgccgccgctcaggagggtgaggatgagggcgccagcgctggccaggggcccaaaccagaggcacattcccaggagcagggccatcctcagaccggttgtgaatgtgaagatggccccgatggacaagagatggacccaccaaaccccgaagaggtcaagacccccgaggaaggcgaaaaacaatcccaatgctag

SEQ ID NO: 188447 - DNA, 354 bp, synthetic construct
  misc_feature 1..354: note = Description of Artificial Sequence: Synthetic coding sequence
  source 1..354: mol_type = other DNA
atgagctggcggggccggagcacctactactggccccggccccggcgttacgtccagccacctgaaatgattgggcctatgagaccagagcagttctcagacgaggtggagcccgccactccggaagagggagagccagctacgcagcgccaggatcctgccgccgcccaggaaggggaggacgagggcgccagtgcaggccagggtcccaagcccgaggcccactcccaggagcagggccacccccaaactggatgtgaatgcgaggatggacccgacggtcaagaaatggaccctccaaatcctgaggaggttaaaacaccagaggagggggaaaagcagtctcagtgttag

SEQ ID NO: 188448 - DNA, 354 bp, synthetic construct
  misc_feature 1..354: note = Description of Artificial Sequence: Synthetic coding sequence
  source 1..354: mol_type = other DNA
atgagctggcggggccggagcacctactactggccccggccccggaggtacgtgcagccccctgaaatgatcggcccaatgagacccgagcagtttagtgatgaggtagagcccgcgacgcctgaggaaggtgaacccgcaactcaacgccaggaccctgctgctgcccaagagggagaagatgagggagcatcagcgggccagggaccgaagccggaggcgcacagccaggagcaggggcatccgcagaccggttgcgagtgcgaggacggtcccgatggccaggagatggaccccccgaaccctgaggaggtcaaaacaccagaagagggggagaaacagtcccagtgctag

SEQ ID NO: 188449 - DNA, 354 bp, synthetic construct
  misc_feature 1..354: note = Description of Artificial Sequence: Synthetic coding sequence
  source 1..354: mol_type = other DNA
atgagctggcggggccggagcacctactactggccccggccccggaggtatgtgcaaccacccgaaatgatcggccctatgcgccctgagcagttcagcgatgaggtggaacccgccacgccagaggagggagagcctgccacccagtgtcaggaccccgccgctgctcaaaaaggagaagacgagggcgcctctgctgggcagggcccgaagcccgaggcccactcacaggagcaaggacatcctcagaccggctgtgagtgcgaggatggtcctgacgggcaggagatggatccccccaacccagaggaggtgaaaacgccggaagagggagagaagcagagccagtgttag

SEQ ID NO: 188450 - DNA, 354 bp, synthetic construct
  misc_feature 1..354: note = Description of Artificial Sequence: Synthetic coding sequence
  source 1..354: mol_type = other DNA
atgagctggcggggccggagcacctactactggccccggccccggccgtacgtgcagccacccgagatgatcggacccatgcgcccagagcaattctccgacgaggtcgagcccgcaactccggaggaaggagaaccagctacgcagaggcaagatcccgctgccgcccaggaaggcgaggatgagggagcctctgccgggcagggcccaaagccagaagcagattctcaagagcaagggcaccctcagactggatgcgagtgcgaggacggccccgacggacaggagatggatcctcccaacccagaagaggtgaaaaccccggaagaaggcaaaaagcagtctcagtgttag

SEQ ID NO: 188451 - DNA, 354 bp, synthetic construct
  misc_feature 1..354: note = Description of Artificial Sequence: Synthetic coding sequence
  source 1..354: mol_type = other DNA
atgagctggcggggccggagcacctactaccggccccggccccggcggtacgtggagcccccggagatgattgggcccatgaggcccgagcagttttctgacgaagtggaaccggctacacctgaagagggagagcccgccacccagtgtcaagatcccgccgcagcacaagaaggggaagacgagggcgcttcagccggacaaggacctaaacccgaggctgactcacaggagcagggacatcctcaaaccggttgtgagtgcgaggacgggccagatggccaggagatggaccctcctaatcccgaggaggtgaagacacctgaagaggggaaaaagcagtcgcagtgttag

SEQ ID NO: 188452 - DNA, 351 bp, synthetic construct
  misc_feature 1..351: note = Description of Artificial Sequence: Synthetic coding sequence
  source 1..351: mol_type = other DNA
atgagctggcggggccggagcacctaccggccccggccccggcggtacgtggaacctcctgaaatgatcgggcccatgcgtccagagcagttctccgacgaagtggaacctgccacaccagaagagggagagcctgctacccagcggcaggaccccgcggccgcccaagagggacaggacgagggagcatcggcagggcagggcccaaaaccggaggcccactctcaggagcagggacatccacagacaggatgtgagtgtgaagatggacctgatggccaggagatggaccctcctaatcctgaggaggtgaagacgcctgaggagggggagaagcagtctcagtgctag

SEQ ID NO: 188453 - DNA, 351 bp, synthetic construct
  misc_feature 1..351: note = Description of Artificial Sequence: Synthetic coding sequence
  source 1..351: mol_type = other DNA
atgagctggcggggccggagcacctaccggccccggccccggcggtatgtcgagccaccagaaatgattggaccgatgagacccgagcaattcagtgatgaagtggaacccgccactccagaagaaggggagcccgctacacagcggcaagacccagcagcggcccaagaaggcgaagatgagggagcttctgcgggccagggccctaagccagaggctcacagtcaggaacaaggacacccccaaacaggctgcgaatgtgaggatggccccgacggacaggagatggacccccccaaccccgaggaagtcaagacacccgaggagggggagaaacagagccagtgttag

SEQ ID NO: 188454 - DNA, 351 bp, synthetic construct
  misc_feature 1..351: note = Description of Artificial Sequence: Synthetic coding sequence
  source 1..351: mol_type = other DNA
atgagctggcggggccggagcacctaccggccccggccccggcggtatgtggaaccccctgaaatgattggacccatgcggcccgagcagttctccgatgaggtcgagccagctacccctgaggaaggagaaccagccactcagcggcaagacccagccgcagcccaggaaggtgaggacgagggcgcatctgctggccaaggccccaaacccgaggcccactctcaggagcaggggcacccacagaccggctgtgagtgcgaagatgggcccgacgggcaggaaatggatccgccaaacccggaagaagtgaaaactccagaagaaggggagaagcagtctcagtgctag

SEQ ID NO: 188455 - DNA, 351 bp, synthetic construct
  misc_feature 1..351: note = Description of Artificial Sequence: Synthetic coding sequence
  source 1..351: mol_type = other DNA
atgagctggcggggccggagcacctaccggccccggccccggcggtatgtggagcctcccgaaatgataggacctatgcgtccagagcagttttcagacgaagtggaaccagctactcccgaggaaggcgagccggccacccaaagacaagatccagcagccgcgcaggagggtgaggatgagggggcctccgcaggacaggggcccaagcctgaagccgattcccaggagcaaggccacccccagaccggatgcgagtgcgaagatggtcctgatggacaagagatggatccacccaaccccgaagaggtgaagacccctgaagagggcgaaaagcagagccagtgctag

SEQ ID NO: 188456 - DNA, 351 bp, synthetic construct
  misc_feature 1..351: note = Description of Artificial Sequence: Synthetic coding sequence
  source 1..351: mol_type = other DNA
atgagctggcggggccggagcacctaccggccccggccccggcggtacgtggaaccccctgaaatgatcggacccatgcggccagagcagttctccgatgaagtggagccagcgactccagaggaaggggaacctgcgacccagcgccaggatccggccgctgcccaggagggcgaggacgaaggcgcatccgctggacagggccctaagccagaggccgacagccaggagcaaggacacccccaaactggctgcgagtgcgaagacggcccagacggtcaggagatggacccccccaacccagaagaagtgaagactcctgaggaggggaagaaacaatctcagtgctag

SEQ ID NO: 188457 - DNA, 435 bp, synthetic construct
  misc_feature 1..435: note = Description of Artificial Sequence: Synthetic coding sequence
  source 1..435: mol_type = other DNA
atgttcctggaggagaagatccccagcatcagcgacctgaagctggccatccggagggcgacgctcaagcgctctttcacacccgtgttccttggcagcgccttgaagaataaaggagtccagcctctgctggatgcagtactggagtatctacctaacccatctgaagtgcagaactacgctatcctgaacaaggaggacgattcaaaggagaaaactaaaatccttatgaatagttctcgcgataattcgcatccatttgtaggcctggcttttaagttggaatttttgtccagatccttttttcggttgactcggcagaaggatcacaggcgacctatacaaaggactaccctgtatctcattgttatgtccccctacgatctgttgggttgtaacagctttctcgacttcccttgtttctctagggactag

SEQ ID NO: 188458 - DNA, 2256 bp, synthetic construct
  misc_feature 1..2256: note = Description of Artificial Sequence: Synthetic coding sequence
  source 1..2256: mol_type = other DNA
atgcggctgctgggcgccgccgccgtggccgccctgggccggggccgagctccagcctccctgggctggcaacgcaagcaggtgaattggaaggcctgccggtggtcctcttcaggagtcattcccaatgaaaaaatccggaatatcggcattagtgctcatatagatagcggcaagaccacactgacagagcgggtgctgtactacactgggcggatcgccaagatgcatgaagtcaaggggaaagacggagtcggggctgttatggactctatggagcttgagcgtcagaggggaatcactatccaatctgcagctacttacacaatgtggaaggacgtcaacattaacatcatcgatacccccgggcacgtggacttcactatagaggtggagcgtgcacttagggtcctggacggcgccgtcttggttttatgcgccgttgggggggtgcagtgccagacaatgacagtaaatcggcaaatgaagaggtacaatgtcccttttctgacttttattaacaagttggaccgcatggggtctaacccagcgcgcgctcttcaacagatgcgcagcaaactgaatcataatgctgcctttatgcagattccgatgggactcgagggcaatttcaaaggaatcgtcgatctgatagaggaacgagcgatttatttcgatggagacttcggacaaattgttcgttacggagaaattcccgccgagctgagagctgccgcgactgaccaccggcaggagctgatcgagtgcgtggccaacagcgatgagcagctgggggagatgttcctcgaagaaaaaattccctccataagtgacctaaaactggcaatccggagagcaacattgaagcgcagtttcactcccgtgttcctcggctctgctcttaagaataagggagtgcagccactgctcgatgcagtgcttgagtatctcccaaatcccagcgaagtacaaaactacgccattctgaacaaagaagatgactctaaggagaagacgaagatcctgatgaactctagccgggataactcacatccttttgtaggactggcgtttaagctcgaggtcggcagatttggtcagcttacatatgtacggagctaccaaggagagctgaagaaaggagacactatttataacacccgaacccgcaaaaaggttagactgcagcgtctggcgaggatgcacgcagatatgatggaggacgtggaggaagtgtacgctggcgacatctgcgcactgttcggcattgattgtgccagcggagatacattcaccgacaaagctaacagcggccttagtatggaaagtattcacgttccagatccggtaatctcaatagcaatgaagccctcaaataaaaacgacctggaaaaattctctaagggtatcggtcgtttcacccgggaagacccaacattcaaggtttacttcgatactgagaacaaagaaactgtaattagcggaatgggcgagcttcatctcgaaatatatgcgcagaggttggaacgagagtacggctgcccatgtattaccggaaagcctaaagttgcattcagggagacaataactgctccagtcccattcgattttacgcataaaaaacagagcggcggtgccggccagtacggcaaggtcattggggtgctggaacccctggatcctgaggattacaccaagttagaattttctgacgagacctttggatccaatatccctaaacagttcgtcccggccgtagagaagggctttctggacgcgtgcgagaaggggcctctgtccggacacaaattatcgggactgcgattcgttcttcaagatggtgcccaccacatggtggactccaatgaaatatcatttatccgcgccggcgaaggcgctctcaagcaggcactggcaaacgcaaccctttgcatcctggagcccattatggccgtcgaggttgtggcgcctaatgagtttcagggacaagttatcgctggcattaatcgtcggcatggcgtcatcaccgggcaggacggtgtagaggattacttcactttatatgccgacgtaccccttaacgacatgtttgggtactcaaccgagctcagatcctgcacagagggaaaaggtgagtatacgatggaatactctagatatcagccctgtctcccctccactcaggaggacgtgatcaataagtacctggaagcaaccgggcagctgccggtcaagaaaggaaaagccaagaattag

SEQ ID NO: 188459 - DNA, 459 bp, synthetic construct
  misc_feature 1..459: note = Description of Artificial Sequence: Synthetic coding sequence
  source 1..459: mol_type = other DNA
atgagcctggtgatccccgagaagttccagcacatcctgcgggtgctcaatacgaacattgacggcagaaggaagattgcttttgctatcacggccattaagggggtcggccgtcgttacgcgcacgttgtgctccggaaagctgacattgacctgaccaaacgcgcgggcgaactcaccgaggacgaagtagaaagggtgatcacaataatgcagaacccacgacagtataagatcccagactggtttctgaacagacagaaggatgtaaaagatgggaaatacagtcaagtgttagccaatggtctggataataagcttcgagaggatttggagcggctgaagaagatcagggcccataggggccttagacacttctggggattaagggtgagaggacagcatacaaaaaccacggggaggcgcggaaggacagtcggcgtgtcaaaaaaaaagtag

SEQ ID NO: 188460 - DNA, 1071 bp, synthetic construct
  misc_feature 1..1071: note = Description of Artificial Sequence: Synthetic coding sequence
  source 1..1071: mol_type = other DNA
atgagccggcccctgctgatcaccttcacccccgccaccgaccccagcgatctgtggaaggatggccagcaacaaccccagccagagaagccagaaagtacactagatggggccgccgcacgagccttttacgaagcgctgataggggacgaaagtagtgcacccgatagccagcgatcgcaaacagagcccgcacgcgagaggaagagaaaaaaacggcggattatgaaggcgcccgccgctgaggctgtggcagagggagcgtcgggcaggcatggccaagggaggtctctggaggccgaagataaaatgacccacagaatcctgcgtgctgctcaggagggtgatctgccagagttacggagactcctggagccacacgaggccggaggtgccggcgggaacatcaatgccagggatgccttctggtggaccccgctcatgtgcgctgcacgggcgggtcagggagccgccgtctcctatctcttggggagaggcgccgcttgggttggtgtgtgtgagttatccggccgcgacgccgctcagctcgccgaggaggctggcttcccagaagtcgctaggatggtgcgggaatcacacggtgagaccaggtcccctgaaaatcgcagtccgacaccgtcattgcagtattgcgagaattgtgatacacacttccaggactcaaatcacagaacatctactgcccatctcctgtcgttgagccaaggccctcaaccgccgaacctcccattgggggttccaatttcatcacccggatttaaactcctgctgcgaggcggttgggaacctggcatgggtttagggcccagaggcgaaggcagggccaaccctattcctacggttcttaagagagatcaggagggactgggctacaggagcgctcctcagcccagggtgacacattttcctgcttgggacacacgggccgtggctggacgcgaaagaccacccagggtagccacactgtcctggcgcgaggagcgccgcagagaagagaaggacagagcttgggaaagggatctcagaacttacatgaacctggaattctag

SEQ ID NO: 188461 - DNA, 1071 bp, synthetic construct
  misc_feature 1..1071: note = Description of Artificial Sequence: Synthetic coding sequence
  source 1..1071: mol_type = other DNA
atgagccggcccctgctgatcaccttcacccccgccaccgacccctctgacctgtggaaggacggccagcagcagccccaaccggaaaaacccgaaagcacgctggacggagccgctgcaagggcattctacgaagcactgattggtgacgaatcttccgcccccgactctcagaggagtcagactgagcctgcaagagaacgaaaacgtaagaaaagaaggatcatgaaggccccagccgccgaggcagtggctgagggcgcttcgggtaggcatggtcagggccgctccttagaggcggaagacaaaatgacgcatcgcatcctgagggctgcccaggaaggagacttgcctgaactgaggaggctgctggagccgcatgaggccggaggagctgggggcaacatcaacgcccgggatgcattctggtggaccccgctgatgtgtgctgccagagcaggacagggtgctgccgtgtcttacctgttgggcagaggagcggcatgggtgggcgtgtgcgaactttccggccgggacgcggcccagctcgcagaagaggccggcttccctgaggtcgctagaatggtgcgagaaagccacggggagacacgttctccggagaacagaagtcctaccccttcgctccaatactgcgaaaattgcgatacacactttcaggacagcaatcatcggacgagcactgcgcatctcctgtctttgagccagggcccacagccacctaatttgcctttgggcgtgcccattagttcacccggtttcaagctcctgcttcgcggcggatgggaacccggcatgggcctgggccctcggggcgagggcagggccaacccaattcccacagtgctgaagcgggatcaggaaggactgggctacaggtccgcaccacagcccagagtgacacacttccccgcctgggacaccagggcagtggccggcagggaacggcccccgcgggtcgcgaccttaagctggcgcgaagaacgaagacgggaggaaaaggacagagcctgggaaagggacctgagaacctatatgaacctggagttctag

SEQ ID NO: 188462 - DNA, 1071 bp, synthetic construct
  misc_feature 1..1071: note = Description of Artificial Sequence: Synthetic coding sequence
  source 1..1071: mol_type = other DNA
atgagccggcccctgctgatcaccttcacccccgccaccgacccctccgatctgtggaaggacgggcagcagcagcctcagccagagaaacccgagtccacactggatggcgcagctgcgagagctttttacgaagcacttattggggacgagagttctgcaccagactcacaaaggtcccagaccgagcctgcaagagagagaaagaggaaaaagcgccgcatcatgaaggcaccagccgccgaggctgtcgccgaaggggccagcggccgacatggccagggccgcagtctcgaggccgaggataagatgacacatcggattctccgtgctgcccaagaaggcgatctgccagaactgagaaggctcttagagccccatgaggccgggggcgcgggcgggaacattaatgcccgcgacgcattctggtggacacccttgatgtgtgccgcccgagccggacaaggtgctgctgtctcctacctgctgggccgtggcgccgcctgggtcggcgtgtgtgaactgagcgggagggatgccgcgcagctggctgaagaagcaggcttccccgaggtcgcgcgcatggtaagggaatcccacggcgagactagatcccccgagaacagatcacctaccccatctctgcaatattgcgaaaattgcgacacacactttcaagactcaaaccaccgcacaagcaccgcccacctactctcgctgagccagggcccccagccgcccaatttacccttgggtgtgccgatttcgtctccgggcttcaagcttcttctgaggggaggatgggagcctgggatgggactcggtccacggggggaggggcgggcaaaccctatcccaactgtgctgaagcgggatcaggagggcttgggctaccgtagcgctcctcaacccagagtgactcatttcccggcctgggatacccgcgcagttgccgggcgggaacgccctccaagagttgccactctcagttggcgcgaagagaggcggcgcgaggaaaaggacagagcttgggagcgagatctgcggacctacatgaatctggagttctag

SEQ ID NO: 188463 - DNA, 1071 bp, synthetic construct
  misc_feature 1..1071: note = Description of Artificial Sequence: Synthetic coding sequence
  source 1..1071: mol_type = other DNA
atgagccggcccctgctgatcaccttcacccccgccaccgacccctcagacctgtggaaagacggccaacaacagccccagcccgagaaacccgagtccactttagacggcgctgctgctcgagccttttatgaggcactgataggggacgagtcaagcgcacctgattctcagcgatcccagacagagcctgccagagagcgcaagaggaagaagagaagaattatgaaggcacctgcggccgaagcagtggccgaaggagcttcaggacggcatggacagggccgaagtttagaagctgaagataagatgacccaccggatcctcagagccgcccaggaaggcgatctaccagaactgcggagactgcttgaaccccatgaggccgggggcgcgggcggaaacattaatgctcgggatgcattctggtggactcctctgatgtgtgccgcccgagctggccagggcgccgcggtcagttacctcctggggcgtggcgctgcctgggtgggggtgtgcgaactgtcagggagggacgccgcccagcttgcggaggaagcgggctttcctgaggtagcccgtatggtcagagaatctcatggagagaccagatccccagagaacagatctccaacaccttccctccaatactgcgaaaactgtgatactcactttcaagattccaatcaccgtacctccacagcccatctactgtccctgtctcaaggaccacagcctcccaacctcccacttggcgttcccatttccagccccggctttaagttgctactgcgtggtggctgggagcctggtatgggtttgggacccaggggcgagggacgagccaatccaattcctacagtgctgaaacgggaccaggaaggtctcgggtatcggtcagccccccagccccgggttacccatttccctgcctgggacaccagagccgtagcgggtcgcgaacgacccccacgcgtggccacgctcagctggcgcgaagagaggcgcagggaggagaaagaccgggcctgggaaagagatcttcgcacatatatgaatttggagttctag

SEQ ID NO: 188464 - DNA, 1071 bp, synthetic construct
  misc_feature 1..1071: note = Description of Artificial Sequence: Synthetic coding sequence
  source 1..1071: mol_type = other DNA
atgagccggcccctgctgatcaccttcacccccgccaccgaccccagtgatctctggaaggacggacagcagcaaccccagcccgaaaagcctgagtccaccttggacggtgctgcagctagagccttttacgaggctttaattggcgatgagagttcggcgcccgatagccagaggtcccaaacggagccggcccgagaacggaaacgcaagaagcgtaggatcatgaaagctccagctgcagaggccgtggctgaaggcgcgtccggccgccacggtcagggaaggagtctggaagcggaagataagatgacccatagaattctgcgcgcagcccaagaaggagacctacctgaactgagaagactcctcgagccccacgaggccggcggagcgggcgggaacatcaatgctcgggacgcattctggtggacgcccttaatgtgcgccgcgcgggcaggccaaggggcagcggtgagctatctgctgggtagaggggccgcatgggtgggtgtatgtgaactgtctggcagggacgccgcccagctcgccgaggaagctggctttcccgaggtggccagaatggtcagggagtctcacggggaaacccggtccccagagaatcgttcacctactcccagtctgcagtactgtgaaaactgtgacacgcactttcaggactctaatcatcggacaagcacagcacacctgctgtcgctgtcccaggggccacagccccctaatttgccgctgggtgttcccatttcttcacccggctttaagttgttacttagagggggctgggaacctggtatggggctggggccaagaggagagggtcgcgccaatccaatcccaactgtgttaaaaagggatcaagaggggctcgggtaccggtcagcccctcagccaagggtgacccatttccctgcttgggacacacgggccgtcgccggacgggaacggcctccaagggtagccacactctcctggcgcgaggagaggaggagagaagagaaggacagggcttgggagagggacctgcgcacgtacatgaatctggagttctag

SEQ ID NO: 188465 - DNA, 1071 bp, synthetic construct
  misc_feature 1..1071: note = Description of Artificial Sequence: Synthetic coding sequence
  source 1..1071: mol_type = other DNA
atgagccggcccctgctgatcaccttcacccccgccaccgacccctccgacctgtggaaggatggccagcagcagcctcagccagagaaacccgagagcacactggatggcgcagcagcgctcgctttttatgaagccttgatcggggacgagtcatccgctccagattcacagcgctcccagacagaaccagctagagagcgcaaaagaaaaaagaggagaattatgaaagcaccagcagctgaagccgtggcagaaggagccagcggccgccacggtcaggggagatctctggaggccgaagataaaatgacccataggatcctacgggccgcacaggagggggatctgcccgagctccggcgcctccttgagccccacgaggccggtggtgcaggagggaacatcaatgcccgtgatgccttctggtggacccctcttatgtgcgccgcgagggccggccaaggggccgccgtgtcctacctcttgggccggggagccgcatgggtaggagtatgtgagctgagcgggcgcgacgcggcgcagctggcagaggaggccggattcccagaggttgctcgcatggttcgagagtcacacggagagactagatctcccgaaaatagaagtcctacaccttctcttcaatactgtgagaattgtgacactcattttcaggactccaatcaccggacttctaccgcacacctcttgtcactgtcacagggaccccaacctccaaatctcccactgggtgtgcctatctcttctccagggtttaaactcctgctccgcggcggatgggaaccagggatggggctaggccccaggggagaaggtagggccaacccgataccaaccgttctgaaaagggatcaggaggggttgggctaccggtctgctcctcagccacgtgtgacccactttcctgcctgggacactcgtgctgttgctggtcgggagaggccaccacgtgtcgccacactgtcatggcgggaggagcggcggagagaagagaaagaccgcgcttgggaacgagacctccgaacctatatgaacttagagttttag

SEQ ID NO: 188466 - DNA, 1071 bp, synthetic construct
  misc_feature 1..1071: note = Description of Artificial Sequence: Synthetic coding sequence
  source 1..1071: mol_type = other DNA
atgagccggcccctgctgatcaccttcacccccgccaccgacccctcagatctctggaaggacggccagcagcagcctcagcccgaaaagccagaaagcacactggacggtgcggctgcgctggcattctatgaggcgctaataggagacgaatcgtccgcacccgacagtcagaggtcccagactgaaccagccagagagaggaagcggaagaaacggagaattatgaaggctcccgccgccgaagccgttgctgaaggagcaagcggacgccatggccaggggcggtccctagaggccgaggataaaatgactcataggatattacgcgctgcccaggaaggggacctgccagagctgaggcggcttctggagccgcacgaggccggaggagcaggcggtaacattaacgctagggatgccttttggtggacgcccctgatgtgtgcggctagagctggccagggagcagccgtttcttacctgctgggccgtggcgctgcatgggtgggggtatgtgagctttctggccgcgatgccgcacaactggccgaagaggccggatttccggaagttgcaaggatggtacgagagtcccatggcgaaacgcgatccccagagaataggtctccaacacccagcctgcagtattgcgagaattgcgacacccattttcaagatagtaaccacaggaccagtacagcccaccttttgtcgttgagccaagggccacaaccccccaaccttccccttggtgtgcccatatccagccccggtttcaagcttctgttgcgcggcggctgggaacccggcatgggattaggaccaagaggcgaggggagggccaatcctatacccaccgtgctgaagagagaccaggaggggttgggctatcggagtgcgccccaaccgcgggtcacccattttccagcctgggacactcgcgctgttgccgggcgggagcggcccccaagagtcgccaccctgtcatggcgggaggagaggcgaagagaggagaaggatcgcgcttgggaacgggaccttcgaacctacatgaatctcgaattctag

SEQ ID NO: 188467 - DNA, 1071 bp, synthetic construct
  misc_feature 1..1071: note = Description of Artificial Sequence: Synthetic coding sequence
  source 1..1071: mol_type = other DNA
atgagccggcccctgctgatcaccttcacccccgccaccgaccccagcgacctgtggaaggacggccaacagcagccccagcccgagaagccagaaagcaccctggacggagcagctgcccttgccttttatgaagccttaattggcgacgagagcagtgctccagacagccagcgatctcagaccgagccggcaagagaaaggaaacgaaaaaaacgcaggattatgaaggctcctgccgccgaagccgtggcagagggtgcttctgggcgccacggacaggggcggagcctggaggcagaggataaaatgacacacagaattctaagggctgctcaggagggtgaccttcccgagctgcgcagactgctggagcctcacgaggccggcggcgctggcggcaatatcaatgcccgagatgcgttctggtggacccccttgatgtgcgctgcccgcgcaggccagggcgctgccgtctcatatcttttgggaaggggggcagcctgggtgggagtgtgtgagctatctgggcgcgatgccgcacagctggccgaagaagcaggttttccggaagtggcgcggatggtgcgggaatcccacggtgagactcggtccccagagaataggtcaccaactcctagtcttcaatattgtgaaaattgcgatacacattttcaggatagtaatcatagaaccagtacagcccacctcctgtccctgagtcaggggccacaacctccgaatctccccctcggcgtaccgatctctagtccgggatttaaactcctgttaaggggaggttgggagcccgggatgggcctaggtccgcgaggagaggggcgagccaaccctatccctactgtactcaaacgcgaccaggaaggactcggttatcgttcagctccacaacctagagtgactcactttccagcgtgggatactagagccgtagctggacgtgaacgacctcctcgggtggccacactgtcttggagggaggagaggagacgggaggagaaggacagggcctgggaaagagaccttcggacatatatgaacctggagttctag

SEQ ID NO: 188468 - DNA, 1071 bp, synthetic construct
  misc_feature 1..1071: note = Description of Artificial Sequence: Synthetic coding sequence
  source 1..1071: mol_type = other DNA
atgagccggcccctgctgatcaccttcacccccgccaccgaccccagtgacctatggaaagacggccaacagcagcctcagcctgaaaagccagagtctactctggatggcgctgccgcactggcattctacgaggcgctgatcggtgatgagtcatctgccccagactcccaacgctcccagacggagcccgcaagggaaaggaagcggaaaaaaaggaggattatgaaggccccagctgctgaagccgtcgctgagggcgccagcggtcggcacgggcagggccgtagtcttgaagcggaggacaagatgacacatagaatcctgagggctgcccaagagggcgatctccccgaactgcggcgtttattggagcctcatgaagctgggggggccggtggcaatattaacgctagggatgccttttggtggacaccactaatgtgcgctgctagagccggccagggagctgcggtcagctacctccttggccgcggagcagcatgggtgggcgtgtgcgagctgagcggcagagatgcggcccagctggccgaagaagcaggttttcctgaggtggcgagaatggtgcgggagtctcacggcgagacgaggtctcccgagaaccggagtccaactcctagtctgcagtactgcgaaaactgcgatacccatttccaagacagcaatcaccggacaagcacagcccatttactgagtctgagtcagggtccacaaccacccaaccttcccctgggagtacctataagctcacccgggttcaaactgcttttaagaggaggttgggagccgggcatgggccttgggccacggggagagggtcgcgctaatcccatccccactgtgctgaaacgtgatcaggagggactgggctacaggtctgccccccaaccaagagttacgcacttccccgcttgggatacgcgggctgtcgccgggagagagcgcccacctagggtggccaccctgtcctggcgcgaggaacgccgcagagaggaaaaagacagagcctgggaacgagacttgcggacttatatgaaccttgagttctag

SEQ ID NO: 188469 - DNA, 1071 bp, synthetic construct
  misc_feature 1..1071: note = Description of Artificial Sequence: Synthetic coding sequence
  source 1..1071: mol_type = other DNA
atgagccggcccctgctgatcaccttcacccccgccaccgacccctcagacctctggaaggacggtcagcaacaaccccaacctgagaaacccgagagcacattggacggagccgctgccctggccttctacgaggcactaattggtgatgagagcagcgcacccgatagccaacggagtcagaccgagcccgcccgcgagaggaaaaggaaaaaaagaaggataatgaaggcgcctgctgcagaagccgtggcagaaggggcatcaggtagacatgggcaaggccggtcactggaggcagaagacaaaatgacccatagaatcttgagagcagctcaggaaggagaccttccagagttacgcaggctactggaacctcacgaggctgggggagccggaggaaatatcaatgcccgcgatgccttctggtggactccactgatgtgcgcagccagggctggccagggagctgctgtctcctatttgctagggagaggtgctgcatgggtgggagtttgcgagttatccggacgtgacgcagctcaactggcagaagaggccgggttccctgaagtggcacgtatggtgagagaaagccatggggaaacacgaagtccggaaaaccgttctcccacaccaagcctgcagtattgcgagaattgtgatacccattttcaagactctaatcatcgaacatcaacagctcacctcctgtcgctgagccagggcccacaacccccgaacctccccctcggggtgccaatctcctctcccggctttaaactgttgctcagaggggggtgggagccaggaatgggtctgggacccagaggagaggggcgcgccaatcctatccccacagtgcttaagcgcgaccaagaggggctgggataccgtagtgccccacagccccgcgtgacacacttcccagcctgggatactcgggctgttgccggcagggaacgcccaccccgagttgccactcttagctggcgcgaagaaagacggcgcgaggagaaagatagggcatgggaacgggatctgcgaacctacatgaatctggagttctag

SEQ ID NO: 188470 - DNA, 498 bp, synthetic construct
  misc_feature 1..498: note = Description of Artificial Sequence: Synthetic coding sequence
  source 1..498: mol_type = other DNA
atgagccggcccctgctgatcaccttcacccccgccaccgacccctcggacctgtggaaagacgggcaacagcaaccccagcccgagaaacccgaaagcaccttggatggtgctgctgctcgggccttttatgaggccctgattggcgacgagtccagtgctccggatagtcaacggtcacagacagagcccgcacgcgagaggaagaggaagaagcggagaattatgaaggctcctgctgccgaggctgtggcagagggagcaagtggtcggcacggccaaggccgatctctggaagcggaggataaaatgactcaccggattttaagagctgcccaggagggcgatctgcctgaactgcggagactgctggagccccatgaggcaggaggtgccggtgggaacatcaacgcacgcgatgccttctggtggacacctctgatgtgtgcggccagagctggtcagggggcagcggtgtcttacttactgggccggtag

SEQ ID NO: 188471 - DNA, 459 bp, synthetic construct
  misc_feature 1..459: note = Description of Artificial Sequence: Synthetic coding sequence
  source 1..459: mol_type = other DNA
atgagccggcccctgctgatcaccttcacccccgccaccgacccctctgatctgtggaaggatgggcagcagcagccccagccggagaagcccgaaagcacgctggatggtgccgccgcactggccttctatgaggctcttatcggagatgagtcgtctgcccccgactcgcagcgttctcaaacagaacccgcgagggaaaggaagcgtaagaaacggcgcatcatgaaggcacctgcagccgaggctgtagccgagggggcttccggcaggcatggtcaggggcggagtctagaggccgaggataaaatgacccacaggatcctcagggcagcacaagagggggatttgccagaactgcgcagactgttggaaccacacgaagccggcggggcaggaggaaatataaacgcgagggacgcattctggtggacccctctgatgtgcgccgcacggtag

SEQ ID NO: 188472 - DNA, 1071 bp, synthetic construct
  misc_feature 1..1071: note = Description of Artificial Sequence: Synthetic coding sequence
  source 1..1071: mol_type = other DNA
atgagccggcccctgctgatcaccttcacccccgccaccgacccctctgatctttggaaggacggacagcagcaaccacaacctgaaaaacctgaatcgacgcttgatggtgccgccgccctggccttctatgaggcactgattggcgatgaaagttccgccccagattcccagcgcagccagacggaacccgcacgggaaagaaaacggaagaaacggagaatcatgaaggctccggccgccgaagctgtggctgaaggggcatccggaaggcacggtcagggccggagtttggaagcggaggataagatgacacacagaattcttagggcagctcaggaaggagacctccctgagctgagacgcctgctggagccacacgaagccggcggtgctggcgggaacatcaatgccagggacgccttttggtggactccccttatgtgtgctgcgcgcgctgggcaaggagccgcagtgagctacttattgggcaggggggcagcttgggtaggggtgtgcgaactgtccggacgagatgcggcccagttggccgaagaggccggcttccccgaggtcgccaggatggtgcgtgagagccatggagagacccgctctccagagaaccgcagccccacgccgagcttacaatattgcgagaactgcgacacacacttccaggactcgaatcatcgcacctctacagcccacctgctgtcactctctcagggtccccagccacccaacctacctcttggcgtgccaatcagtagcccaggattcaagctgctgctgagagggggatgggagccaggtatgggcctgggccctcggggtgagggccgcgcaaatcctatccctactgtgcttaaacgggaccaggaggggctgggttaccgatcagcaccccagcctcgggtgacgcacttcccagcgtgggacacccgcgcagtggcgggccgcgagaggcccccccgcgtggctactctgagctggcgcgaagaaaggaggcgagaagaaaaggatagggcctgggaacgggatttacgcacgtacatgaacctagagttttag

SEQ ID NO: 188473 - DNA, 459 bp, synthetic construct
  misc_feature 1..459: note = Description of Artificial Sequence: Synthetic coding sequence
  source 1..459: mol_type = other DNA
atgagccggcccctgctgatcaccttcacccccgccaccgaccccagcgatctgtggaaagatgggcagcagcaaccacagccagagaaacctgaatctactcttgacggcgccgcggcaagagctttttacgaggccctaatcggcgatgaatcttcagcccccgactcccaacgctcacagacagaacctgcaagggagaggaaacggaagaaacggaggattatgaaggccccagctgccgaggccgtagcagaaggtgccagcgggcgccacggccagggccgctcattagaggccgaggacaagatgacacaccgaatcctaagggccgcccaggaaggcgacctgcccgaattgcgccgtctgctggagccacatgaagctggcggggcaggggggaatatcaatgcaagggatgctttctggtggacgcccctgatgtgcgcagcacgatag

SEQ ID NO: 188474 - DNA, 498 bp, synthetic construct
  misc_feature 1..498: note = Description of Artificial Sequence: Synthetic coding sequence
  source 1..498: mol_type = other DNA
atgagccggcccctgctgatcaccttcacccccgccaccgacccctccgacctgtggaaagatggccagcagcagccacagcccgagaaaccagagtctacacttgatggggcagcggctctcgctttttatgaggcactcatcggggacgagagctccgctccagatagccagcggtcgcagactgagccggcccgcgagaggaaacgcaagaaaagacgcatcatgaaggcgccagccgctgaggctgtagccgagggagccagcggccggcacggccaggggcgatccctcgaggcagaggataagatgacccaccggatactcagggctgcccaggagggcgacctgcccgaactgcgcaggcttctagaaccccatgaagccgggggcgcgggcggaaacatcaatgccagagacgcattctggtggacacccctgatgtgtgccgctcgtgctggacagggcgcagctgtcagctacctcctcggccggtag

SEQ ID NO: 188475 - DNA, 273 bp, synthetic construct
  misc_feature 1..273: note = Description of Artificial Sequence: Synthetic coding sequence
  source 1..273: mol_type = other DNA
atgagccggcccctgctgatcaccttcacccccgccaccgacccctccgatctctggaaagatggtcagcagcaaccccaacccgagaagccagagagtactctggacggggctgctgcccttgcattctacgaagccttaataggcgacgaaagcagtgcccctgacagccagagaagtcagaccgagcctgccagggagaggaaacgtaagaagaggaggatcatgaaggctccagccgctgaggccgtcgcggaaggggccagcggttag

SEQ ID NO: 188476 - DNA, 1071 bp, synthetic construct
  misc_feature 1..1071: note = Description of Artificial Sequence: Synthetic coding sequence
  source 1..1071: mol_type = other DNA
atgagccggcccctgctgatcaccttcacccccgccaccgacccctctgacttgtggaaggacggccagcagcaaccacagcccgagaagccagaatccaccctggacggtgccgctgcaagagccttttacgaggctcttattggggacgagtcaagcgcccctgactcccaacggagtcaaacggaacctgcacgcgagcgaaagcgcaagaagcgcagaattatgaaggccccagctgctgaggccgtggcagagggcgcgtccgggcggcacggacaagggcggtcattggaggctgaggataaaatgacccacaggatcctgcgcgccgcacaggagggcgatctgcccgagctgaggcgcctgctggagccacacgaagccggaggcgccggaggcaacatcaatgctcgtgatgcattctggtggacgccactaatgtgtgcggcccgagccggtcaaggagccgcggtcagttatttgttgggcagaggggctgcgtgggtcggggtgtgtgaactgagtggaagggacgctgcccagttagcagaagaggcaggatttcccgaggtggcccggatggtacgcgagagccatggcgagacgcggtcacctgagaataggtccccaactccttctttgcagtactgtgaaaactgcgacacgcattttcaagactctaatcatagaaccagcacagcgcatttgttatcgctgtcccagggaccgcagcctcctaatcttccacttggtgttccaatctcttctccaggattcaagcttctgctgcgcgggggctgggaacccggcatgggcttgggcccaagaggtgaagggcgcgctaatccaataccaactgtgctgaagagagaccaagaggggctggggtacaggtccgctcctcagcccagagtgacacacttccccgcatgggatactagagctgtcgcaggccgcgagcgaccaccccgggtggccactctgtcttggagagaggagcgacgcagagaggaaaaggatagggcctgggagcgcgatttgaggacctatatgaacctggaattttag

SEQ ID NO: 188477 - DNA, 1071 bp, synthetic construct
  misc_feature 1..1071: note = Description of Artificial Sequence: Synthetic coding sequence
  source 1..1071: mol_type = other DNA
atgagccggcccctgctgatcaccttcacccccgccaccgacccctccgacttgtggaaggacggtcaacagcagcctcagccagaaaagccggagtctacccttgatggcgccgccgcacgggctttttatgaggctctgattggtgatgagtcctctgccccggatagtcagagatcccaaacagagccggctagggaacgcaaaaggaaaaagaggcgcatcatgaaagccccagccgcagaggcagtcgcagaaggcgctagcggccggcatggtcaagggagaagccttgaagccgaggacaaaatgacgcatagaatactgagggcggcccaggaaggcgacctacccgagctaagacggttgctggaacctcacgaggcaggcggcgccggggggaacattaacgcccgtgacgcattttggtggacccctctcatgtgtgcagcacgcgcaggtcagggcgcagcggtgtcctacctgttaggacgcggtgcggcctgggtcggcgtttgtgaactgtccggaagagatgcagcccagctcgccgaagaagccgggttccccgaggtcgccagaatggttcgagaatctcacggcgagactaggtcaccagagaacagaagcccaaccccgagtttacagtattgtgagaactgtgacactcacttccaggactccaaccaccggacgtccactgcccatttattaagtctcagccaggggccacagccgccaaacttaccgctcggagttcccatttcaagtcccggatttaaacttttactgcgcggcggctgggaaccaggcatgggcctagggcctcggggagagggcagagccaacccgattccgaccgtactcaagagagatcaggaggggctcggctaccggtccgccccccaaccacgggtcactcattttcctgcttgggatacacgggctgttgcgggacgagagcgaccaccccgtgtggcaacgctctcttggagagaggaacgccgccgagaggaaaaagatcgagcatgggagagagatctgcgtacttatatgaatttagagttctag

SEQ ID NO: 188478 - DNA, 324 bp, synthetic construct
  misc_feature 1..324: note = Description of Artificial Sequence: Synthetic coding sequence
  source 1..324: mol_type = other DNA
atgagccggcccctgctgatcaccttcacccccgccaccgaccccagtgatctgtggaaggatggacagcagcaaccccaaccggaaaagcctgagtcgactctggatggggctgccgcacgcgccttctacgaggcattaattggcgacgaaagtagcgcacccgacagtcagcggtcacagacggaacccgcgagggaacggaagaggaaaaagaggcggattatgaaagctcctgccgctgaagccgttgcagagggcgcctcaggaaggcatggccaaggacggagcttggaagccgaggataagatgacccatcgctag

SEQ ID NO: 188479 - DNA, 324 bp, synthetic construct
  misc_feature 1..324: note = Description of Artificial Sequence: Synthetic coding sequence
  source 1..324: mol_type = other DNA
atgagccggcccctgctgatcaccttcacccccgccaccgacccctccgatttgtggaaggacgggcagcagcagccccaacccgagaaacctgagagtacgctggacggggccgcagctctggctttttacgaagcgctgattggcgacgagtcatcagcccccgatagccagaggtcacagacagaacccgcacgggaacgcaagcggaagaaaagaagaatcatgaaggccccggccgctgaggcagtcgcggaaggagcaagcggaagacacgggcaaggacggagccttgaggcagaggataagatgacccatcggtag

SEQ ID NO: 188480 - DNA, 1071 bp, synthetic construct
  misc_feature 1..1071: note = Description of Artificial Sequence: Synthetic coding sequence
  source 1..1071: mol_type = other DNA
atgagccggcccctgctgatcaccttcacccccgccaccgacccctccgatctttggaaggatgggcaacagcagccacagccagagaagccagaaagtaccctggacggtgccgctgcacgtgccttttacgaggcccttatcggcgatgagagcagcgcccctgactcgcaacgtagccaaaccgaacccgctcgcgaaagaaagcgcaaaaaacggagaatcatgaaggcccctgccgccgaggccgtggccgagggcgcttcaggtcgccacggccaaggccggtccttagaggcagaggataaaatgactcacagaatcctacgggctgcgcaagagggagatttgcctgagctgcggcggcttctggagccccatgaggctgggggagctggggggaacattaatgcaagggacgcgttctggtggactcccctcatgtgcgctgctcgggctggccagggcgctgctgtttcttatcttctggggcggggagcggcttgggtgggcgtctgcgagctgagcggcagggacgctgctcaactggcagaggaagccggcttcccagaggtcgcccggatggtacgggaatctcacggtgaaactaggtcacctgaaaatcgttccccaaccccaagcttacagtattgcgaaaactgcgacactcatttccaagattccaaccatcgcactagcacggcccacctgctgtcattgagtcaaggcccacagccccctaacctcccactgggggtacccatctcatcccccggttttaagcttttattaagaggcggttgggagcctgggatgggcttagggcctcgaggcgaggggagagccaacccaattcccaccgtgctcaagcgggaccaggaggggcttggctatagatctgctccacagccccgagtgactcatttccccgcatgggacacccgggcagtcgcagggcgagagcgaccacccagggtggcaacactgtcctggcgagaggagcggcggcgtgaggagaaagaccgagcatgggaacgggatctgcgcacatacatgaacttggagttctag

SEQ ID NO: 188481 - DNA, 1071 bp, synthetic construct
  misc_feature 1..1071: note = Description of Artificial Sequence: Synthetic coding sequence
  source 1..1071: mol_type = other DNA
atgagccggcccctgctgatcaccttcacccccgccaccgaccccagcgacctgtggaaggacggacaacagcagccacagcctgagaagccagaatctacgctcgacggtgctgcagcccgggctttctacgaggctctcattggggatgaatcctctgctccagattcccaaaggagccagacggagccagctcgtgaacgaaaacgtaagaaaaggagaattatgaaggcccctgccgcagaggccgttgcggagggcgcttctggtcggcacgggcaaggtagaagcctcgaagccgaggacaagatgacacaccgcatcctacgggccgcccaagagggcgacttgcctgagctgagacgcttgctcgaaccccatgaagccggaggcgctgggggcaacatcaacgcacgggacgccttctggtggaccccactcatgtgtgccgcccgggccgggcagggagcggccgtttcttacctgcttgggcgaggagcagcttgggtgggggtctgcgaactgagcgggagggacgcagcccaactcgcagaagaggcgggattccccgaagtggctcggatggtgcgagagagccatggagagacccgaagtccagagaaccggagccccacaccttcacttcaatactgtgagaactgtgacacacacttccaggactcgaaccataggacgtccacagcacaccttctatctctgtcccagggcccccagccccctaacctgcccctgggagtacccatctcctccccgggatttaaactgctgctgagacgggggtgggagccagggatgggcctgggccccagaggcgagggacgggcgaaccctattccaaccgtgctcaagcgagatcaggagggtttaggctatagaagtgcgcctcagccaagggtgacccacttccctgcatgggacacgcgcgcggtggctgggagagagaggcctccgagagtcgcgaccctctcatggagggaggagcgacgaagggaggaaaaggaccgcgcatgggaacgcgatctcaggacatacatgaatctggagttctag

SEQ ID NO: 188482 - DNA, 1071 bp, synthetic construct
  misc_feature 1..1071: note = Description of Artificial Sequence: Synthetic coding sequence
  source 1..1071: mol_type = other DNA
atgagccggcccctgctgatcaccttcacccccgccaccgacccctcagacctgtggaaggacggacaacagcagccccagccagaaaagccagagagcacactggatggagctgctgcaagggccttctacgaagctcttattggggacgaatcaagcgcacctgactctcaaagatctcaaacagagccagccagagagcggaagaggaaaaagcgaaggattatgaaagcacccgctgctgaggcggtggcagagggagcttcagggcggcatggccagggacgatccctggaggccgaggacaaaatgacacatagaattctgcgggcggcccaggaaggtgatctcccagagctccgtcgcctgctagagccgcatgaagcgggcggggcaggaggtaacattaacgctagggacgccttttggtggactccccttatgtgcgccgcgcgcgccggccaaggtgctgctgtgagctacctgctaggcaggggcgcggcgtgggtcggggtgtgtgagctgtcggggcgggatgctgcccagctcgcagaggaagcaggcttccctgaggtagccagaatggtgcgtgagtcacatggtgagacgaggtccccagaaaatcgctctcccaccccttctctgcagtattgcgaaaactgcgacacacacttccaggattctaatcacaggaccagcacggcccacctactgtcgttgtcgcagggcccgcagccaccaaatctgccccttggagtgcccatcagcagcccaggattcaagcttctgctgagaagggggtgggaacccgggatgggattaggcccgcgcggtgaagggcgcgccaatccgatacctacggtgttgaaacgggatcaggagggccttgggtaccgaagcgccccccagcctagagtgactcacttcccggcatgggacacccgcgccgtagctggtcgagagcgcccgcctcgggttgcaacgctttcttggagggaagagagaagaagggaggagaaggaccgggcttgggagcgcgatctacgcacttacatgaatctggaattctag

SEQ ID NO: 188483 - DNA, 498 bp, synthetic construct
  misc_feature 1..498: note = Description of Artificial Sequence: Synthetic coding sequence
  source 1..498: mol_type = other DNA
atgagccggcccctgctgatcaccttcacccccgccaccgacccctccgacctctggaaggatggacagcagcagcctcagcccgaaaagcccgagagtaccctggatggcgccgccgcccgggcgttctacgaagcattaattggggacgagagcagtgcccccgactcccagcggtctcagactgagcctgctcgggaacgcaagagaaagaaacggaggataatgaaggcacccgctgctgaagccgtggcagaaggcgccagtgggcgacacggacagggaagatcgctcgaagcagaagataagatgacccaccggattctccgggcagctcaagaaggtgatctccccgagcttcgcaggctgttagaaccgcatgaagccggaggcgccggcggcaatataaatgccagggatgctttttggtggacccccctgatgtgcgctgcgagagcaggacagggtgcggccgtcagctatctccttggcagatag

SEQ ID NO: 188484 - DNA, 1071 bp, synthetic construct
  misc_feature 1..1071: note = Description of Artificial Sequence: Synthetic coding sequence
  source 1..1071: mol_type = other DNA
atgagccggcccctgctgatcaccttcacccccgccaccgacccctccgacctgtggaaagacggccaacagcagccccaacctgaaaagccagagagcacactagatggtgccgctgcacgagcattctacgaggccctcatcggggatgaaagtagcgcccctgatagccaacgctctcaaaccgagcccgcccgagaacggaagcgcaagaagaggcggataatgaaggcccctgctgcagaggcagtcgcggaaggcgcctccggccggcacggccagggtcgaagcctggaggccgaggataaaatgactcaccggatcctccgcgctgcacaagaaggagacttgcctgagttgcggaggttgctagaacctcacgaagccggcggtgcgggcgggaatataaacgctagagacgcattttggtggacaccgctgatgtgcgcggccagggccggtcagggcgctgcggtgagctacctgctggggcgtggggcagcctgggtcggcgtgtgcgagctaagtggtagggacgccgcacagttggcagaggaagccggctttcctgaggtggcacgcatggtgagagaaagccatggggaaaccagatctcctgagaaccgtagccccacgccaagtctccagtattgtgagaactgtgatactcatttccaggacagcaatcacaggacttcgaccgcacacttattgtcacttagtcaggggcctcagcctcctaatcttcccctgggggttccgatcagctcccccggcttcaagctgctcctgcgaggcgggtgggagcccggcatgggcttgggaccccggggcgaaggaagagctaatccaattcccactgttttgaagagagaccaagaggggctcgggtatcggagcgcaccccagccgcgtgtgacccacttccctgcctgggacacgagagcagttgcagggagagagaggcccccccgcgtcgccacactgtcgtggcgggaagagaggcggcgcgaagaaaaggatcgcgcctgggagcgcgatcttagaacatacatgaatcttgagttctag

SEQ ID NO: 188485 - DNA, 597 bp, synthetic construct
  misc_feature 1..597: note = Description of Artificial Sequence: Synthetic coding sequence
  source 1..597: mol_type = other DNA
atgagccggcccctgctgatcaccttcacccccgccaccgacccctctgacctgtggaaggatggacagcagcagccccaacccgaaaagccggaatccactctcgatggagccgccgcccgtgccttttatgaagcgttgattggcgacgagtcgtccgcccctgatagccagagatcccaaacagaacctgcccgggagaggaaacgtaagaagcggcgaatcatgaaggctcccgccgccgaagccgtggctgaaggcgcctctggaaggcacggacaaggacggagtttggaagcagaggataagatgactcatcggatattgcgggcagcccaggagggtgatctgccggaactcaggcggttgctggaacctcacgaggctggcggcgccggcggaaacatcaatgcccgcgacgcattctggtggactcctttgatgtgtgcagccagggcggggcagggcgctgcggtgtcttatctgctcggccggggagccgcttgggtgggcgtctgcgagctgtctggacgcgatgccgcccagctcgcggaagaggcaggctttcctgaagtggcaagaatggtgagagaatag

SEQ ID NO: 188486 - DNA, 1071 bp, synthetic construct
  misc_feature 1..1071: note = Description of Artificial Sequence: Synthetic coding sequence
  source 1..1071: mol_type = other DNA
atgagccggcccctgctgatcaccttcacccccgccaccgaccccagtgacctgtggaaagacggccagcagcagccacagccagagaagcccgaatcaactctggatggagcagctgccagagccttctacgaagcactgatcggagacgagtcttctgccccggatagccagcgatcccagacagagcccgcccgcgaaaggaaaaggaagaaaagaaggatcatgaaggctccagcagccgaagctgttgccgagggagcctctggaagacacgggcaaggacgctcgctggaggccgaggacaagatgacgcatagaatccttagagccgcacaggagggcgatttgcccgagctgagacggctactggagccgcacgaagccgggggtgctgggggcaatatcaatgccagggacgcattttggtggaccccgcttatgtgtgctgctagagctggccagggcgccgccgtcagttacctgctcggccgtggcgcggcgtgggtcggcgtctgtgagctgtctggtcgggatgctgcccagctcgccgaggaggcgggctttcctgaagttgccaggatggtccgcgaatcacatggcgaaactcggtcacccgagaatcggagccctaccccctctctgcagtattgcgagaactgcgacacccacttccaggattctaaccatagaacgtccacggcgcacctgctgagcctaagccaaggcccccagccccctaacttaccccttggcgtgcccataagcagccccggattcaagcttctgttgagaaggggctgggagccaggcatgggtttggggcctagaggagaaggcagggccaaccccattccaaccgtactcaaaagggaccaggaaggcctgggatataggtcagctcctcagcctcgtgtgactcatttccctgcctgggataccagggccgtggctggaagagagcggcctccacgcgtcgcaaccctgagctggagagaggagagacgaagggaagaaaaggatagggcatgggagcgagatttacggacgtatatgaacctcgaattctag

SEQ ID NO: 188487 - DNA, 498 bp, synthetic construct
  misc_feature 1..498: note = Description of Artificial Sequence: Synthetic coding sequence
  source 1..498: mol_type = other DNA
atgagccggcccctgctgatcaccttcacccccgccaccgaccccagtgatctgtggaaggatggccagcagcagccccagccagaaaagccagaatctactcttgacggggcggccgcgctcgccttttatgaggcgttaattggggatgagagcagtgcacctgactcgcaacgcagccagactgagcctgccagagaacggaagcggaagaaacggcggatcatgaaggcaccggctgctgaagccgtggccgagggagcaagcgggcgccatggtcagggtcggtccctcgaagcggaagataagatgactcatcgaatactgcgggctgcacaagaaggggacctgcccgaacttcgccgcctgctggaacctcatgaggctggaggggctggcggaaatatcaacgctagagacgctttctggtggacacctctcatgtgcgcagcacgtgccgggcagggcgcggccgtttcctatctactgggccgctag

SEQ ID NO: 188488 - DNA, 459 bp, synthetic construct
  misc_feature 1..459: note = Description of Artificial Sequence: Synthetic coding sequence
  source 1..459: mol_type = other DNA
atgagccggcccctgctgatcaccttcacccccgccaccgacccctctgatttatggaaagatgggcagcagcagcctcagccagaaaaacccgaatctactttggacggggccgctgctctggccttttatgaagccctgatcggagacgaaagctccgcacccgatagtcaacggtcacaaacagaacccgccagagagcggaagcgaaagaagaggcggatcatgaaggccccggcagccgaagccgtggcagagggagcatccggacggcacggccagggacggtcgctcgaggctgaggacaaaatgacgcaccgtatcctgagagctgcacaagaaggggatctgccagagcttaggaggttacttgaaccacatgaggccggaggggctgggggcaacattaacgcaagagatgctttttggtggacccctctgatgtgcgccgccaggtag

SEQ ID NO: 188489 - DNA, 459 bp, synthetic construct
  misc_feature 1..459: note = Description of Artificial Sequence: Synthetic coding sequence
  source 1..459: mol_type = other DNA
atgagccggcccctgctgatcaccttcacccccgccaccgacccctccgatctctggaaggatggccaacagcagccacagcccgagaaacccgaatctactctggatggggcagccgcgctggctttctacgaagcattgattggcgatgaatcctctgctcccgattcccagaggtctcagactgaaccagctagggagaggaaaagaaagaagcgcaggattatgaaggctcctgccgcggaggcagttgcggaaggtgcctcaggtagacacggccaagggaggtccctggaagcagaagacaagatgacccatcggattttgagggctgctcaggaaggcgacctgccggaattgcgcagactcctggagccacatgaggccggcggcgctgggggtaacataaatgcccgcgacgctttttggtggacacctttaatgtgtgcggccagatag

SEQ ID NO: 188490 - DNA, 597 bp, synthetic construct
  misc_feature 1..597: note = Description of Artificial Sequence: Synthetic coding sequence
  source 1..597: mol_type = other DNA
atgagccggcccctgctgatcaccttcacccccgccaccgacccctcagatctgtggaaggatggtcaacagcagcctcagcccgaaaaacctgaaagtaccctcgatggagctgcagcattggccttctatgaggccctgatcggtgacgaaagtagcgccccagatagtcagagatcccaaaccgaacccgctagggaaaggaaaagaaagaagcgacgcatcatgaaggcgcctgccgccgaggcggtcgcagagggagcatccgggcgtcacggacaggggcgttctctggaggccgaagataaaatgacccatcggatacttcgagcagctcaagagggagatctcccagagctgcgtagactgctggaaccacatgaggccggaggggcgggagggaatattaacgcacgggacgccttttggtggacacccttaatgtgtgcagcacgagctggacagggcgccgctgtttcttacctcctcggaagaggagccgcatgggtgggcgtgtgcgaattatccggccgtgatgctgcacagctggcggaggaggccggcttcccagaagtggcaagaatggtccgtgagtag

SEQ ID NO: 188491 - DNA, 597 bp, synthetic construct
  misc_feature 1..597: note = Description of Artificial Sequence: Synthetic coding sequence
  source 1..597: mol_type = other DNA
atgagccggcccctgctgatcaccttcacccccgccaccgacccctccgacctgtggaaggatggacagcagcagccccagcccgaaaagccagaatctaccctggatggcgcagctgccctcgccttctacgaagctctgatcggcgatgaatcaagcgcccccgactcacaaaggtctcagacagaaccagctcgggagcggaaacgaaagaagcgccggattatgaaggcacctgcagcagaggccgtggcagagggtgctagtggacggcacggccagggccgctcgctggaagctgaagacaagatgactcatagaatactacgcgctgctcaggaaggcgatctccccgaattgagacggctcctagagccccacgaggccggaggagccggaggcaacattaacgcccgggacgcattctggtggacaccgcttatgtgcgcggctagggctgggcaaggggcggcagtgtcctacctactgggccggggggccgcgtgggtgggtgtgtgcgagctgtccggcagagacgccgcacagctagctgaggaggccggcttccctgaagtggcaagaatggtgcgcgagtag

SEQ ID NO: 188492 - DNA, 1071 bp, synthetic construct
  misc_feature 1..1071: note = Description of Artificial Sequence: Synthetic coding sequence
  source 1..1071: mol_type = other DNA
atgagccggcccctgctgatcaccttcacccccgccaccgaccccagcgacctttggaaagacggacagcagcagcctcagccagaaaagccagagagtacccttgatggggctgctgcccgagctttctacgaagcgttaatcggcgatgagtcttccgctccagactcgcagcggtctcaaacggagccagccagagaacggaagcggaagaaaaggagaattatgaaggctcctgccgccgaggccgttgctgagggggccagcgggaggcacggccagggcaggtctctggaagccgaggacaaaatgacgcatcggatcttgagggcagcacaagagggggacctgcctgaactgaggagattactggaaccccatgaggccgggggcgcaggcggaaacattaacgctagagacgcattttggtggactcctttaatgtgcgccgccagggcagggcagggagccgctgtaagctatttattggggcggggcgcagcctgggtgggtgtctgcgagctgtctggtcgtgatgctgctcagttagccgaagaagccggctttcctgaggtagctaggatggtccgagagagccacggcgagacgcggtccccagaaaatcgttcacccactcccagcctacaatattgcgagaattgcgacacccactttcaggattcaaatcaccggacttctactgctcacctgctctccttgtcccaggggcctcagccacccaacttacctcttggagtgccgattagttctcccggatttaaactcttgctgcggaggggttgggagcccgggatggggctcggcccccggggggagggcagggccaaccctatccctaccgtgctgaaacgggaccaggagggactcggctaccgctcagccccacagcctcgggtgacccactttcctgcctgggacacgagagcagtggctggcagagagcggcctcctagggtcgccacgttaagctggcgggaggaaagaagaagagaagagaaggatcgggcatgggaacgagacctgcgcacctacatgaatctggagttctag

SEQ ID NO: 188493 - DNA, 1071 bp, synthetic construct
  misc_feature 1..1071: note = Description of Artificial Sequence: Synthetic coding sequence
  source 1..1071: mol_type = other DNA
atgagccggcccctgctgatcaccttcacccccgccaccgacccctccgatctctggaaagacggccaacaacagccacagccagagaagccagagagcaccctggacggcgccgccgctctcgccttttacgaagccttaattggagacgagtcatcggcacccgatagccagaggtctcagactgaaccagctcgggaaaggaagcgaaaaaaaagacgaattatgaaagcccccgctgccgaggcagtggctgagggagcctcaggaaggcacggacaggggagatccctggaggcagaagacaaaatgacgcacagaatcctgcgcgccgcgcaagaaggcgatctgcctgagctgagacgcctgctggagccacatgaggccggaggagcaggtggcaacattaatgctcgggacgctttctggtggacacctctaatgtgtgcggcacgggcaggccagggcgctgccgtctcctatctcctggggaggggagccgcttgggtcggagtttgtgaactgtccgggcgtgatgcagctcagctggcagaagaagcgggtttcccggaagtagcaaggatggtgcgcgaatcccacggagagacaagatcgcctgaaaatcgttcaccaacccctagcctgcagtactgtgaaaattgtgatacacactttcaggattcaaaccaccgaacgtctaccgcccacctgttgagcctaagccaaggtcctcagcctcctaatctgcccctgggggtgcccattagctcgcccggattcaaactgctgctgcgaggcggatgggaaccagggatgggcttggggcccagaggcgaaggacgggccaaccctatccctacagtcttgaagcgggaccaagagggccttggttatcgcagcgcgccccagccacgcgttacacattttcccgcttgggatacacgcgccgttgctggccgggaacgaccccctcgggttgccaccctgtcgtggcgcgaagagcggcggcgcgaggagaaggatagggcctgggagagggatctaagaacatacatgaatctggagttctag

SEQ ID NO: 188494 - DNA, 597 bp, synthetic construct
  misc_feature 1..597: note = Description of Artificial Sequence: Synthetic coding sequence
  source 1..597: mol_type = other DNA
atgagccggcccctgctgatcaccttcacccccgccaccgaccccagcgatctgtggaaggacgggcagcagcagccccagcccgagaagcctgaaagcaccctggacggcgcggctgccctggcattttatgaggcccttattggggacgaatcctccgcacccgattcgcagcgatcccagacggagccagcacgcgagagaaagaggaaaaagcggaggatcatgaaagcccctgccgccgaggcagtggctgaaggtgccagcggcagacatggacagggccgaagcttggaggcagaggacaaaatgacacatcgcattctgcgagcagcgcaggaaggcgacttaccggaattacggcggttgctggagccccatgaagcaggtggcgctggcggcaacattaatgctagagacgcgttctggtggacccccctgatgtgtgccgctcgcgccggccagggcgcggccgtgagctatctgctggggcgcggagccgcctgggtgggagtgtgtgaactgtccggcagagacgccgcccagctggctgaggaggccgggtttcccgaagttgctagaatggtgcgtgagtag

SEQ ID NO: 188495 - DNA, 1071 bp, synthetic construct
  misc_feature 1..1071: note = Description of Artificial Sequence: Synthetic coding sequence
  source 1..1071: mol_type = other DNA
atgagccggcccctgctgatcaccttcacccccgccaccgacccctcagacttgtggaaagatggtcagcagcagccccaaccagagaaacccgagtcaacactcgatggcgctgctgcactggcattttatgaggcactgatcggtgatgagtcctccgcacccgatagccagagatctcaaaccgagcctgcccgcgaaaggaagaggaagaaacggaggatcatgaaggcccctgccgcggaagcagtggcggagggcgcatcaggcagacacggccaggggagatcgctcgaggcggaggataagatgacccatagaattttacgcgcagcgcaggaaggggacctgccagagctgcggcgcctccttgagccgcatgaagccgggggggctgggggtaacattaacgccagagacgcattctggtggacacctctgatgtgtgcagcaagggccggtcagggagcggcggtctcttatcttctcggccgtggagccgcctgggtcggggtttgcgaattgtctgggcgcgacgccgctcaattagccgaagaagccggtttccctgaagtggccagaatggtccgtgagagtcatggtgaaacgcggtctcccgagaacaggtcacccacacctagtcttcagtactgcgaaaactgcgatactcatttccaggatagtaaccacaggacctccaccgcccacctcctgtcactgagccagggaccgcagccacccaatctgccattaggggtcccaatctcctcgcccggctttaagctcctgctaagggggggctgggaacctgggatgggtctggggcctcgtggtgaagggagggcgaacccgatccctaccgtactgaagcgggatcaagaggggctgggttaccgtagtgcgccccagcctcgcgtgacgcacttcccagcttgggacactcgtgctgtcgccgggcgggaacgtccccctcgagtggccacgctgtcttggagagaagagaggaggcgcgaggaaaaggatagggcatgggagagggacttgcgaacatatatgaacctcgaattttag

SEQ ID NO: 188496 - DNA, 597 bp, synthetic construct
  misc_feature 1..597: note = Description of Artificial Sequence: Synthetic coding sequence
  source 1..597: mol_type = other DNA
atgagccggcccctgctgatcaccttcacccccgccaccgaccccagcgatctgtggaaggacggacagcagcagccccagcccgagaagcccgaatcaacactggacggagcagccgccagagccttttacgaagcactgattggagatgaatccagtgcacctgattcacagagaagccagactgagcccgcaagggagaggaagaggaaaaaaaggcgaatcatgaaagctccggcagcagaggccgtcgcagagggtgcctctggtagacacgggcagggtaggtctttggaagcagaagataagatgacccatagaatcctacgcgctgcgcaggaaggcgacctccccgagcttcgtcgacttcttgagccacatgaagcaggcggcgctggggggaatattaacgcaagggatgccttttggtggacacctctgatgtgcgccgctcgtgcaggtcagggcgccgccgtttcctatctactcgggcgaggcgccgcgtgggtcggcgtgtgtgaactatccggtcgtgacgctgcccagttggcagaggaagcaggctttcccgaggtggctcggatggtgagagagtag

SEQ ID NO: 188497 - DNA, 1071 bp, synthetic construct
  misc_feature 1..1071: note = Description of Artificial Sequence: Synthetic coding sequence
  source 1..1071: mol_type = other DNA
atgagccggcccctgctgatcaccttcacccccgccaccgacccctcagatctgtggaaggacggccaacaacagccacagcccgagaaaccagagtccacccttgatggggcagccgctcgggctttctacgaggcattaatcggtgacgagtcctcagcgcctgactctcagcgttcccaaaccgagcccgccagggaacggaaacggaagaaacggcggattatgaaagccccagcggccgaagcagtggcagagggtgcatctggccggcatgggcaaggccgcagccttgaagccgaggataaaatgacgcaccgcatcctgcgcgccgctcaagagggtgatctgcccgagctgaggcgcctgctggagcctcacgaagccgggggggcaggcggcaacatcaacgcacgggatgccttctggtggacaccactcatgtgcgcagcacgcgcaggacagggcgcggctgtctcttatctactcggccggggagcggcatgggttggcgtgtgcgaactgagtggccgcgatgcggcacagctggccgaggaagccggcttcccagaggttgctcgaatggtacgagaatcacacggcgagaccaggtctccagaaaaccgtagtcctactccttcactgcagtattgtgagaactgtgacacccatttccaagattcaaaccaccgaacctccacagctcacctactgtcccttagtcagggtccacagcctccgaacttgcctctgggcgtgcccatatccagtccaggtttcaaattgctgctgcgtggcggatgggagccagggatgggtcttggccccagaggagaaggccgtgccaatccgattcccacagtccttaagcgggatcaagaaggcctgggttaccggtccgcaccacaaccacgcgtgacccacttccctgcctgggacactcgcgccgtcgctgggagagagagaccaccaagggttgctacattgtcctggcgcgaagagaggagacgcgaagagaaagatcgggcgtgggagagagacctgcgtacttacatgaatttggaattttag

SEQ ID NO: 188498 - DNA, 324 bp, synthetic construct
  misc_feature 1..324: note = Description of Artificial Sequence: Synthetic coding sequence
  source 1..324: mol_type = other DNA
atgagccggcccctgctgatcaccttcacccccgccaccgacccctctgatttgtggaaagacggccagcaacaaccccagcccgaaaagcctgaatcgactctcgacggtgccgcggcgagagcattctacgaagccctgattggcgatgagtcgagcgcccctgatagtcagagaagccaaacagagcctgcgagggaaaggaaacgcaagaaaaggaggatcatgaaggcgccggccgctgaggctgtggctgaaggggcctcaggccgacatggccaggggcgttccctggaagcagaagacaagatgacccataggtag

SEQ ID NO: 188499 - DNA, 1071 bp, synthetic construct
  misc_feature 1..1071: note = Description of Artificial Sequence: Synthetic coding sequence
  source 1..1071: mol_type = other DNA
atgagccggcccctgctgatcaccttcacccccgccaccgacccctctgacctgtggaaagatggccagcaacagccacagccagaaaaacctgagtctacacttgacggggcagccgccagggcgttctacgaagccctgatcggggacgagagctcagcccctgattcgcagcggagccaaaccgaacctgcccgcgaacgcaagcgcaaaaaaagacgtattatgaaagcacctgcggcagaagctgtagctgagggggcctcaggcaggcacgggcaggggcgctcgctcgaggctgaggacaagatgacgcacagaattttgcgcgccgcccaggagggggatctccctgagttacgcagactgctcgagccacatgaagcaggcggagctggcgggaatattaatgcaagggacgctttttggtggacacctctgatgtgcgctgcccgggctgggcaaggcgctgccgtttcttatctgctggggaggggcgctgcgtgggtgggggtgtgtgaactgtctggcagagatgcagcccagctcgccgaggaggctggcttccccgaagtagccagaatggttagagaaagtcacggggagacccgatccccggaaaacagatcacctactccttctctgcagtactgtgaaaattgcgacacacactttcaggatagtaaccatcgaacgagcaccgcccacctgctgtccctgtcacaaggccctcagccacctaatctgcccctgggagtgccgatttctagtcctggattcaaacttctcctcaggcgtggatgggagcccgggatgggcctaggaccaaggggcgaaggccgcgctaaccctattcccacggtgctgaaacgcgaccaggagggcctgggatacaggtctgctccccagccacgcgtgacacatttccctgcttgggacacgcgcgccgtggccggccgcgagagacccccccgggtggctacgttgagttggcgggaagagagacgccgagaggaaaaagatcgtgcctgggagcgggatctgaggacgtatatgaatttagaattctag

SEQ ID NO: 188500 - DNA, 324 bp, synthetic construct
  misc_feature 1..324: note = Description of Artificial Sequence: Synthetic coding sequence
  source 1..324: mol_type = other DNA
atgagccggcccctgctgatcaccttcacccccgccaccgacccctccgacctgtggaaagatggccagcagcagcctcaacccgagaagcccgagagcacactggacggagctgcggcacgcgccttttacgaagccctgattggagacgagtcgtccgccccggactctcagcggtctcagaccgagccagccagggaaagaaaacgcaaaaaaagaagaataatgaaggccccggctgccgaagctgtcgcagagggagctagtggcagacatggtcagggaaggtctctggaggccgaagacaagatgacccaccgctag

SEQ ID NO: 188501 - DNA, 459 bp, synthetic construct
  misc_feature 1..459: note = Description of Artificial Sequence: Synthetic coding sequence
  source 1..459: mol_type = other DNA
atgagccggcccctgctgatcaccttcacccccgccaccgaccccagcgacctatggaaagacggccagcagcagccacagcccgaaaagcccgaaagtaccctcgacggcgccgcggctcgcgcgttttacgaagccctgataggagacgaaagctcggcccctgactcccagcggagtcagacggagccggcgagggaacggaagcgaaagaaaaggcgtatcatgaaggctccagctgcagaggccgtggccgaaggcgcgtccgggagacatggccaaggccgctctcttgaggcagaggacaaaatgactcatcgtattctgcgagccgctcaggagggtgacctgcctgaacttcgaaggctgttagaaccacatgaagcaggaggagcgggcggcaatataaatgctcgggatgctttctggtggacgccacttatgtgcgcagcccgttag

SEQ ID NO: 188502 - DNA, 1071 bp, synthetic construct
  misc_feature 1..1071: note = Description of Artificial Sequence: Synthetic coding sequence
  source 1..1071: mol_type = other DNA
atgagccggcccctgctgatcaccttcacccccgccaccgacccctccgacctgtggaaagatggccagcaacagccacagccagaaaaacccgaaagcaccctggatggcgccgccgctcttgctttttatgaggccctgatcggtgacgaatctagcgcccccgactctcagcggagtcaaacagagcccgctagagagaggaaacggaagaagcgccgtatcatgaaggctcctgccgctgaggccgtggctgaaggcgcctccggccgacacggccaggggcgctctctggaggctgaggacaaaatgacccatagaatcctccgcgccgcccaagaaggtgacctgccggagttaaggcggcttctcgagcctcatgaggcaggcggcgccggtggcaatatcaacgcaagggacgccttttggtggacgcccttaatgtgtgccgcaagagccgggcaaggcgccgccgtgtcatacctcctaggccgaggggccgcttgggtgggagtctgcgagctttccgggcgggacgctgcacagttagccgaagaagctggatttcccgaggtggcaagaatggttcgcgagagtcacggagagactagatcccccgagaataggagcccaactccttcactgcagtattgcgaaaactgtgacacgcacttccaggactccaaccatcggacttctactgctcatctgcttagcctatcgcagggcccgcagcccccaaaccttccattaggcgttcccatatcctcacctggatttaaactcctcctacgcggggggtgggagccaggcatggggctgggaccccgcggggaaggtcgcgccaaccccattcctactgtgctgaaaagggaccaggaagggctcgggtatcggtcagccccacagcctagagtgacacacttccctgcttgggacacacgcgccgtggctggtcgtgaacgcccaccaagagtagctactctctcttggagagaggaaagaagacgtgaggaaaaggatcgcgcttgggagagagacctgcgcacgtacatgaatctggagttctag

SEQ ID NO: 188503 - DNA, 1071 bp, synthetic construct
  misc_feature 1..1071: note = Description of Artificial Sequence: Synthetic coding sequence
  source 1..1071: mol_type = other DNA
atgagccggcccctgctgatcaccttcacccccgccaccgaccccagcgatttatggaaggacggccaacagcagccccagccggagaaacccgagtctacgctggacggggccgctgcgctagcgttttacgaggctctgattggggacgagtcttctgctccagactcccaacggagtcagacagagccagctcgggaaaggaagcgcaaaaagcgcagaattatgaaagcgcccgcagccgaagccgttgctgagggcgcctcaggtcgacatggccagggccgctcattggaggcggaagacaaaatgactcacagaatcctgagggcagcccaggagggcgatctacccgaactcagacggctgctggagccacacgaggcaggcggagcaggtggcaacatcaacgctagggatgctttttggtggactccgctgatgtgtgcagcaagggcaggtcagggcgctgccgtcagctacctgctagggaggggcgcggcatgggttggagtgtgcgaactttccggtagggacgccgcacagctggccgaagaggccggttttccagaggtcgcacgaatggtcagagagtcccatggagaaacgcggagccccgagaatcggtctccgacacccagcctgcaatattgcgaaaattgtgatactcactttcaagattccaatcatagaacctctacggcccaccttcttagcctgagccagggcccacaaccacccaacctccctctgggggtccccatttcatccccaggctttaaactcttgttgaggggcggctgggaaccaggcatgggcctgggccctcgaggggaaggtagagcaaacccgatccctaccgtcctaaagcgcgaccaagagggactgggatatcgatcagccccacagccccgagtcacacactttcccgcgtgggacacccgagccgtcgcgggaagagaacgacctccgcgcgttgctaccctctcatggagggaggaaagaaggcgcgaggaaaaggacagggcgtgggagcgggatctccgcacttacatgaaccttgagttttag

SEQ ID NO: 188504 - DNA, 498 bp, synthetic construct
  misc_feature 1..498: note = Description of Artificial Sequence: Synthetic coding sequence
  source 1..498: mol_type = other DNA
atgagccggcccctgctgatcaccttcacccccgccaccgacccctctgacctgtggaaagatggacaacaacagccccagcctgagaaacctgagagcacactagacggggccgcggcccgcgctttctacgaggctctcattggggatgagtcatccgctcccgatagccagaggtcccaaaccgagcctgcccgagaacgtaagcgcaaaaaaagaagaattatgaaagcccctgccgcagaagcagtggctgaaggggcctcgggaaggcatggccagggacgctctctcgaagctgaggacaagatgactcataggattttgcgcgccgcccaagaaggtgacctgccggaactgcgacgcctacttgaaccccatgaagcagggggcgcaggcggtaacatcaacgctcgcgatgccttttggtggacccctctgatgtgcgcggctagagcagggcagggggccgccgttagctacctccttggccgatag

SEQ ID NO: 188505 - DNA, 273 bp, synthetic construct
  misc_feature 1..273: note = Description of Artificial Sequence: Synthetic coding sequence
  source 1..273: mol_type = other DNA
atgagccggcccctgctgatcaccttcacccccgccaccgacccctcggacctgtggaaggatggccagcagcagccacagcccgaaaaaccagagtctactctggatggcgcagctgcgcttgcgttttatgaggccctgattggggacgagtccagcgcgcctgattcccagcgatcccagaccgagcccgcgcgggagcgtaagagaaagaagagacgtatcatgaaggccccggcagctgaagccgtggcagagggcgcttccggttag

SEQ ID NO: 188506 - DNA, 1071 bp, synthetic construct
  misc_feature 1..1071: note = Description of Artificial Sequence: Synthetic coding sequence
  source 1..1071: mol_type = other DNA
atgagccggcccctgctgatcaccttcacccccgccaccgacccctcagatctgtggaaagatggccagcagcagccacagcccgaaaagcctgaaagcacgctcgacggggcggcagcccgggccttctatgaggccctgattggcgatgagagctccgctccagatagccagaggtctcaaacagaacctgctcgggagagaaagagaaaaaagcgtcggataatgaaagcccccgcagccgaggcagtggcagaaggagcatccggcagacacgggcaaggcaggtcccttgaagctgaggacaagatgacacataggatcctccgcgccgctcaagaaggtgatctaccagagcttcgccgactgctggagccccatgaagccggtggtgctggcgggaacatcaacgcccgagatgcattttggtggactccattaatgtgtgccgccagggcgggacaaggggcggccgtttcttacttgctgggtcggggtgctgcttgggtgggcgtgtgcgaacttagcggccgcgacgccgcccagctcgccgaggaggcaggctttccagaagtggcacgcatggttagagaaagtcacggggaaacaagaagccccgagaataggtcgcccactccatcacttcagtactgcgagaactgcgatacacacttccaggactccaaccatagaaccagcaccgcccacctgctcagcctgagccagggtccccaacctcctaacttgcccctgggggtaccaatctcctctcccggattcaagcttttgctaagaggaggatgggagccagggatgggcctcggcccacggggcgagggtagagctaaccccattcccaccgtactcaaacgagatcaggaggggctcggctatcgcagtgccccacagcctagggtaacccacttcccagcctgggacacccgcgccgtggctggacgcgagcgaccccccagagttgcaactctatcgtggcgggaggagaggcgccgtgaggagaaagatcgcgcttgggaacgtgatctgcgcacttatatgaatctggaattctag

SEQ ID NO: 188507 - DNA, 273 bp, synthetic construct
  misc_feature 1..273: note = Description of Artificial Sequence: Synthetic coding sequence
  source 1..273: mol_type = other DNA
atgagccggcccctgctgatcaccttcacccccgccaccgacccctccgacttgtggaaggacggccagcagcaaccacagcccgagaaaccagagtccaccctggacggagccgctgccttggctttttatgaggcgctgataggtgacgaatcttctgcccccgatagccagcgctcccagacagagcccgcccgagagcgcaaacgtaaaaaaaggaggataatgaaggctcctgctgcagaggccgtggccgagggtgccagcgggtag

SEQ ID NO: 188508 - DNA, 1071 bp, synthetic construct
  misc_feature 1..1071: note = Description of Artificial Sequence: Synthetic coding sequence
  source 1..1071: mol_type = other DNA
atgagccggcccctgctgatcaccttcacccccgccaccgacccctccgacctatggaaggatgggcagcagcagccccagccagagaaaccggaatcaactctggatggcgctgctgctagagctttctatgaggcgcttatcggagatgaatcctcagcgcccgattcacaacgttcacagaccgaaccagcccgggagcggaaaagaaaaaagaggcgaatcatgaaggcaccagctgcagaagccgtggcagaaggggctagcggtcgtcacggccaaggtcggtcgttggaggccgaggacaagatgacccatagaatcctgcgagcggcccaggagggcgatctgccagagctccgacgtcttttagagccacacgaagcagggggcgccggtggcaatatcaacgcgcgggacgcgttctggtggacccctctgatgtgcgccgcaagggctggtcagggggccgccgtgagttacctgttggggcgcggtgcagcttgggtaggtgtgtgtgaattatctggcagagacgcagctcagcttgcagaggaggcaggctttccagaagtagccaggatggttagagaatcacatggggagacaaggagcccagagaataggtcaccaacgcccagtctgcagtattgcgagaactgcgacacgcacttccaggatagtaaccaccgcacaagcactgcccatttactttcgctgagccaggggcctcagccaccaaacctgccgctcggagtcccaattagttcaccagggttcaagttgctgctgagaggcggctgggagccgggcatgggcctgggacccaggggggaagggcgagccaatccaattcctacagtcctgaaacgggaccaggagggcctggggtaccgaagtgcaccacagccccgcgtcacacacttccctgcctgggacacacgcgccgtagcagggcgcgagaggccgccgagggtggccacgctgagttggagagaagagcgacggagagaggagaaggatcgagcctgggaaagagacctgcgcacctacatgaacctggagttttag

SEQ ID NO: 188509 - DNA, 597 bp, synthetic construct
  misc_feature 1..597: note = Description of Artificial Sequence: Synthetic coding sequence
  source 1..597: mol_type = other DNA
atgagccggcccctgctgatcaccttcacccccgccaccgaccccagcgatctttggaaggacggtcagcaacagcctcagcccgaaaagcctgaatccaccctcgatggggccgccgcccgagccttctacgaggccttaatcggcgacgaatccagcgcccccgacagtcagagatctcagactgaacctgcccgcgagcggaaacgaaagaagcgcagaattatgaaggcccccgcagccgaggccgtggcggaaggcgcatctggccgccatgggcaagggagaagtctggaagctgaagacaagatgacccatcgcatcttaagagcggcgcaggaaggagacttgccggaactgagaaggcttctcgaaccacacgaagccggtggcgcaggggggaacatcaatgctagagacgccttctggtggactccactaatgtgcgctgccagggcgggccaaggagcggccgtgtcgtacctcctgggaaggggtgccgcttgggtgggtgtttgcgagttgtcaggacgcgacgctgcccagctggcggaagaagctggctttcccgaggttgcacgaatggtgcgggaatag

SEQ ID NO: 188510 - DNA, 324 bp, synthetic construct
  misc_feature 1..324: note = Description of Artificial Sequence: Synthetic coding sequence
  source 1..324: mol_type = other DNA
atgagccggcccctgctgatcaccttcacccccgccaccgacccctccgacctgtggaaggatgggcagcagcagccgcagcccgaaaagcctgaatccactctagacggcgccgcagccttagcattttacgaagcactgatcggagacgagtcaagcgcacctgacagtcaaaggtcccagaccgagcccgcaagggagcggaaaagaaaaaagcgccgcattatgaaggctccagcggctgaggccgtcgccgaaggcgcgtcagggcgacacggtcaaggaaggtccctggaggctgaagacaagatgactcaccgctag

SEQ ID NO: 188511 - DNA, 324 bp, synthetic construct
  misc_feature 1..324: note = Description of Artificial Sequence: Synthetic coding sequence
  source 1..324: mol_type = other DNA
atgagccggcccctgctgatcaccttcacccccgccaccgaccccagtgacctgtggaaagatgggcagcaacagcctcagccggagaagcctgagtctaccctggacggcgccgcggccctcgcattctatgaagcacttattggagatgaatcctccgctccagacagtcagaggagccagaccgagcctgccagagagagaaagcgaaagaaaaggaggatcatgaaagcacccgcagctgaagcagttgctgagggagccagtggacgacacggccagggccgaagcctggaagcagaggataagatgacacatcgatag

SEQ ID NO: 188512 - DNA, 273 bp, synthetic construct
  misc_feature 1..273: note = Description of Artificial Sequence: Synthetic coding sequence
  source 1..273: mol_type = other DNA
atgagccggcccctgctgatcaccttcacccccgccaccgacccctctgatctttggaaagacggccagcagcagcctcagccagaaaaacctgaaagcaccctcgatggggcagccgccagagcattctatgaagctctgatcggcgacgaatcctctgcaccagacagccaacggtcccagaccgaaccagcccgcgagaggaaacgcaagaaaaggcgtatcatgaaggctccagccgccgaggcagtagccgaaggagccagcggatag

SEQ ID NO: 188513 - DNA, 273 bp, synthetic construct
  misc_feature 1..273: note = Description of Artificial Sequence: Synthetic coding sequence
  source 1..273: mol_type = other DNA
atgagccggcccctgctgatcaccttcacccccgccaccgaccccagtgacctgtggaaggatggacaacaacagccccaaccggaaaagccggagtcaacactggacggagcagccgctagagcattttacgaggccctcatcggagatgagtccagtgcccccgactctcagaggtcccagactgagcctgcacgagaaaggaaacggaagaagagaaggatcatgaaggctcctgcagcggaggcggtcgccgagggagcttctgggtag

SEQ ID NO: 188514 - DNA, 459 bp, synthetic construct
  misc_feature 1..459: note = Description of Artificial Sequence: Synthetic coding sequence
  source 1..459: mol_type = other DNA
atgagccggcccctgctgatcaccttcacccccgccaccgaccccagcgacttgtggaaagacggccagcagcagccccagcccgaaaagcctgagagtacgctggacggcgccgctgctagagccttctacgaggccttaatcggtgacgagtcttccgcaccagattcgcagcgatcccagacagaacccgctcgagaaagaaagcgcaagaagcggagaattatgaaggcacccgctgccgaggccgtagccgagggagcctctgggaggcatggtcagggccgatctcttgaagcggaagacaagatgacacacaggatacttagggctgcccaagaaggcgatctcccggaactgcgaaggttattggaaccccacgaagctgggggggccggaggcaacattaacgcccgcgacgccttctggtggacgccccttatgtgcgcagctcggtag

SEQ ID NO: 188515 - DNA, 597 bp, synthetic construct
  misc_feature 1..597: note = Description of Artificial Sequence: Synthetic coding sequence
  source 1..597: mol_type = other DNA
atgagccggcccctgctgatcaccttcacccccgccaccgaccccagtgatttgtggaaagatggccagcaacagccgcaacccgaaaaacctgagtccactttggatggtgccgcggcacgggctttctacgaggccctgattggggatgaatcaagcgctcctgacagtcagagaagccagacagagcccgcacgcgagcgcaagcgaaagaagcgcagaattatgaaagctccagccgctgaggccgtagctgagggcgcgtccggtagacacggtcagggccgctcgcttgaggctgaagacaaaatgacgcacaggattctgagagcggcccaggaaggcgacctcccagagctgcgccgactgttggagcctcacgaagccgggggcgccggagggaatataaatgcccgagatgccttttggtggacacccctaatgtgtgctgctagagctggtcagggcgcggccgtgtcatatttgttgggaagaggagccgcctgggtgggggtttgtgagttgagcggccgggatgcggcccagctggccgaggaggctggctttccagaagtggccagaatggtgagggagtag

SEQ ID NO: 188516 - DNA, 1071 bp, synthetic construct
  misc_feature 1..1071: note = Description of Artificial Sequence: Synthetic coding sequence
  source 1..1071: mol_type = other DNA
atgagccggcccctgctgatcaccttcacccccgccaccgaccccagtgacttgtggaaagacggtcagcagcagccacaaccagagaaaccagaaagcacattggatggagccgccgcacttgcgttttatgaggctctcatcggcgacgaaagtagcgccccagattctcagcgctcccagaccgagccggccagagaaaggaagcggaaaaaacgccgaattatgaaagcacccgcggcggaggctgtggccgagggagcctccggacgccatggacaaggaaggtcacttgaagctgaagacaaaatgactcaccgcatcctgagagcggcccaggagggcgacctccctgaactgaggcggcttctcgaaccgcacgaggcgggtggcgccgggggaaatatcaatgccagagatgccttctggtggactcctctcatgtgcgccgctagagcgggtcaaggcgccgctgtatcatatctgctgggcaggggagctgcctgggtcggcgtgtgtgaactatctggaagggacgccgctcagttagccgaggaggcgggctttcctgaggtggcacggatggtacgcgaatcccacggtgagacaagatccccagagaatcggtctcctaccccaagtctgcaatactgcgaaaactgcgatacccatttccaggactccaatcatagaacgtccacggcccatctgctgtccctgagccagggccctcaaccccctaaccttcccttaggagtgccgattagctcacctggattcaagttgctgctccgtggcgggtgggagccaggaatggggctcggtcctcggggcgagggacgcgccaaccccatacctacagtgttgaaaagggaccaagaaggcctgggatatagatctgcgccacaaccgcgggtaacccatttccccgcatgggacacgagggctgtggccggacgggagagacctccgagggtggcaacgttgtcctggagggaggaacgccggcgtgaggaaaaagaccgggcatgggagcgcgaccttcgcacctatatgaaccttgagttctag

SEQ ID NO: 188517 - DNA, 1071 bp, synthetic construct
  misc_feature 1..1071: note = Description of Artificial Sequence: Synthetic coding sequence
  source 1..1071: mol_type = other DNA
atgagccggcccctgctgatcaccttcacccccgccaccgacccctcagacttgtggaaagacggacagcagcagccacagcctgagaaacccgaaagcaccctggacggagcagccgcccgcgccttctatgaggcactgatcggagacgaatcgtctgcacccgattctcaaaggagtcagactgagccagctcgggaaagaaagaggaagaagcgtaggataatgaaggctccagctgcggaagctgttgctgaaggggcttcggggcgccacgggcagggcagatctctggaggcggaggacaagatgacccatcggattctccgtgccgcccaggagggcgacctccctgaactgcgccggttactcgaaccacatgaagccgggggcgctggcggaaacatcaacgctagggatgctttctggtggactccccttatgtgtgccgcgcgggctggtcagggagcagccgtatcttacctgctcggtcggggcgccgcgtgggtgggagtttgcgagctgtctggccgcgatgccgcccagttagccgaggaggctggctttccagaagtcgctaggatggtgcgcgagagtcatggtgagactcggtcacctgagaacaggtcacccaccccttccctccagtactgcgaaaattgtgatactcacttccaggattcaaatcatcgaaccagcacagcacacctgctctccctttcacagggcccacaacctcccaatctccctcttggcgtacctattagctccccagggttcaagctgttattgcgtggtggctgggaaccaggtatgggcctaggacccaggggggaaggcagggccaaccccattcctaccgtgctaaagagggatcaggaaggtctggggtatagaagtgcaccccagcctagggttacccactttccggcctgggataccagagcagtggccggcagggaacgccccccacgggttgctactctgtcctggagagaagagcggaggagggaggagaaggatcgggcctgggagcgcgatctgcggacctacatgaacctggagttctag

SEQ ID NO: 188518 - DNA, 1071 bp, synthetic construct
  misc_feature 1..1071: note = Description of Artificial Sequence: Synthetic coding sequence
  source 1..1071: mol_type = other DNA
atgagccggcccctgctgatcaccttcacccccgccaccgacccctccgacttatggaaagacggacagcaacagcctcaacccgagaagcccgagtcaacccttgatggtgcagcggccagagccttttacgaggcgctcataggcgatgaatcctcagcccccgattcgcagcgtagccagacagaacctgcaagagagcggaagcggaagaagcgacgtatcatgaaggcacccgcagcagaagccgtggcagaaggcgctagcgggagacacggacagggccgttcattagaagcagaggacaaaatgacccatcggatcctgcgggctgctcaagaaggcgacctacctgagctcaggcggctacttgagccccacgaggccggcggcgcaggtggcaatatcaatgcaagagacgcgttctggtggactcctctgatgtgcgccgcccgcgccgggcagggagcggcagttagctatctccttgggaggggcgccgcctgggtgggggtgtgtgagctctccggtcgcgatgcagcccaacttgctgaagaagccggctttccagaggtggccagaatggtcagggaatcacacggagagactagatcaccggaaaatagatccccaactccatcacttcagtactgcgagaattgtgatactcattttcaggactcaaaccatagaaccagcacagcccatctgctctcactgtcgcaagggccgcagcccccaaacctgcctcttggagtccccatatcgtctcctggtttcaaactgctgctccggggcggatgggagcctgggatgggccttgggcctcgtggggaaggcagagccaaccccattccgacggttttgaagcgagaccaagaggggttaggttatagatcggctccccagcctagggttacacatttccccgcctgggatacaagagctgtggccggcagggagaggccacctcgcgtggcgaccctcagttggcgagaggaaagaaggcgcgaggagaaggacagggcctgggagcgcgatctccgaacatatatgaaccttgagttctag

SEQ ID NO: 188519 - DNA, 498 bp, synthetic construct
  misc_feature 1..498: note = Description of Artificial Sequence: Synthetic coding sequence
  source 1..498: mol_type = other DNA
atgagccggcccctgctgatcaccttcacccccgccaccgacccctccgacctctggaaagatggtcagcagcagccccaacccgagaaacctgagtccacactagacggcgccgcggctctggcgttttatgaggcactgattggcgatgaatccagcgcccccgactctcagagaagtcagaccgaacctgctagagagcggaaacgtaaaaaacgaaggattatgaaggccccagctgcagaggctgtggctgaaggcgcgtcggggaggcacggccaaggacgttccctggaggccgaagacaaaatgacccaccggatcctccgagctgctcaggagggtgacctccccgaattgcggcgcctgctggagcctcatgaggcggggggcgcaggtgggaacattaacgccagggacgccttttggtggaccccactcatgtgcgcggcccgcgccggacaaggcgcggccgtgtcatacttgctgggcaggtag

SEQ ID NO: 188520 - DNA, 273 bp, synthetic construct
  misc_feature 1..273: note = Description of Artificial Sequence: Synthetic coding sequence
  source 1..273: mol_type = other DNA
atgagccggcccctgctgatcaccttcacccccgccaccgacccctcagacctgtggaaggatggacaacagcagccgcaacccgagaagccagagtccaccctggatggagctgcagcaagagccttctacgaggccctgattggggatgagagtagcgctccagactctcaacgatcccagacagaaccagcgcgtgagcgaaagagaaagaaacgaagaataatgaaggcacctgctgccgaagccgttgctgagggagcgagtggctag

SEQ ID NO: 188521 - DNA, 324 bp, synthetic construct
  misc_feature 1..324: note = Description of Artificial Sequence: Synthetic coding sequence
  source 1..324: mol_type = other DNA
atgagccggcccctgctgatcaccttcacccccgccaccgacccctccgatctgtggaaggatggccagcagcagcctcagccagaaaagcctgagagcaccctggacggagctgcagcgcgggctttctatgaggccctgattggcgatgagtcttccgccccagactctcagcggtcgcagacagaaccggccagggagaggaagaggaaaaagcggaggatcatgaaggctccagccgcagaggccgtcgccgaaggagccagtgggcgacatggacagggccgctctctggaggccgaggataaaatgacacaccgttag

SEQ ID NO: 188522 - DNA, 1071 bp, synthetic construct
  misc_feature 1..1071: note = Description of Artificial Sequence: Synthetic coding sequence
  source 1..1071: mol_type = other DNA
atgagccggcccctgctgatcaccttcacccccgccaccgaccccagtgatctttggaaggatgggcagcagcaaccacagccggagaaacccgagtcaactcttgacggagccgcagcaagagcattctatgaggccctaatcggggacgagtcttctgcgcctgattcacagagaagccagacggaacctgcccgcgaacgcaaacgcaaaaaaaggcgtataatgaaggcccccgctgcagaagccgtcgccgaaggagccagcgggagacatgggcagggcagatctctagaggctgaggacaagatgacccacaggattctgcgagctgctcaagagggggatctccccgagctgcggaggctgctcgaacctcacgaagcaggcggagcagggggaaacatcaacgcccgcgacgcgttttggtggacaccattgatgtgcgccgcccgggccggacaaggtgcagctgtatcttacctgctcgggcggggtgcagcttgggtcggagtttgtgaactgagcggccgcgatgcggcgcagttagcagaggaagccggattccctgaagtcgcacgcatggtgagagaaagccacggggagacacgtagtccggagaatcggagcccaaccccatctctacagtactgtgaaaattgcgacacacacttccaagatagtaatcaccgaacctccaccgcccatctcttatcgctgtcacagggcccccagccccctaacctccccctgggggtccctatctcctcacctggatttaagcttctgctcaggggcggctgggagccaggcatgggcctcggcccccggggcgaaggtagagctaaccccatccccactgttttgaagagagatcaggagggtctaggctacaggagtgctccccaacctcgtgtgacccacttccccgcatgggacacacgagccgtcgctggaagggaacgcccaccgcgcgtggcaaccctcagctggcgagaggagcgccgacgtgaagaaaaagaccgggcttgggagcgggatctgaggacgtatatgaatctcgaattctag

SEQ ID NO: 188523 - DNA, 1071 bp, synthetic construct
  misc_feature 1..1071: note = Description of Artificial Sequence: Synthetic coding sequence
  source 1..1071: mol_type = other DNA
atgagccggcccctgctgatcaccttcacccccgccaccgaccccagtgacctgtggaaggacgggcagcagcagcctcagcctgaaaagccagaaagtacactggatggcgccgcagccttggccttctacgaagctcttattggcgatgaaagctcagcccctgactcccagcgttcgcagacagagccggcacgagaacgcaagcgtaagaaacgtcggataatgaaagctccagcagcagaggccgtcgctgaaggcgcctctgggcgccacggccaggggaggtcattagaagctgaggataaaatgacccaccgcattctgcgggcagcccaggagggagacctgcccgagctgcggcgtttgcttgaaccccatgaggcaggcggtgcaggcggcaacatcaacgctcgagatgcattctggtggacgcctttgatgtgcgccgctcgggccggtcagggagctgccgtaagttacctgttgggtaggggggctgcatgggtgggtgtgtgcgagctgtccgggcgagatgctgcccagttagccgaggaagctgggttcccagaggttgctcgcatggttcgagagtcccatggagagacccgaagccctgagaataggtcaccaaccccatcgctacagtattgcgaaaactgtgacacacacttccaagatagtaaccacagaaccagcactgcacatttactttcactaagccagggcccgcagccccctaatctgcccctcggggtcccgatctcgtcacctggcttcaagctgctcctccgtggtggctgggaaccaggtatgggactcgggccacgaggtgaaggccgggctaacccgatacccacagttctcaagcgcgatcaggaaggccttggatataggtcagcgccacagcctcgagttactcactttccagcgtgggacaccagagcggtggccggccgggaacggcctccacgtgtcgccaccctgtcatggagggaggagcggagacgggaagagaaggatcgagcctgggaacgggacctgagaacatacatgaatctagaattttag

SEQ ID NO: 188524 - DNA, 1071 bp, synthetic construct
  misc_feature 1..1071: note = Description of Artificial Sequence: Synthetic coding sequence
  source 1..1071: mol_type = other DNA
atgagccggcccctgctgatcaccttcacccccgccaccgacccctctgacctctggaaggatggtcagcagcagcctcaacccgagaagccggaatcaacacttgatggtgcagccgctctagcattctacgaagctctcatcggcgatgaatctagcgctcccgactctcagcgttcccagacagagccagcaagggagcggaaaagaaagaaacggaggatcatgaaagctcctgcagcagaagcagtcgccgagggagctagcgggcgccatggccagggcaggtcccttgaggctgaagacaaaatgacccatcgtattttgcgggcggctcaggagggtgacttgccggaactgcggcgtcttctcgaaccccacgaagccgggggcgcaggcggaaatatcaacgccagagacgctttctggtggactcccctgatgtgcgccgcccgagccggccagggcgctgcggtaagttatctgctgggcaggggagccgcctgggttggagtttgtgagctgtccggtcgggacgcagcccaactggctgaggaagcaggattcccagaagtggctaggatggttagagaatcccacggggaaacccgatcccccgaaaatcggtcccccactccatcgcttcagtattgcgagaattgcgatacccatttccaggattcgaaccaccgcacaagtaccgctcacctcctgtccctctcacagggacctcagcctcccaacctgcccctcggagtccccatcagctcgccaggctttaagctgttgttgcgaggcgggtgggaacctggaatgggcctgggtcctcgaggagaggggagagccaacccaatcccgaccgtgctgaagcgagaccaggaaggactgggctataggagcgcaccgcagccgagagtaacccacttccctgcttgggacaccagagccgtggcaggtcgcgaaagaccgcctcgtgttgcgaccttgtcatggagggaggagcggagaagagaagaaaaagatagggcttgggagagagatttgaggacttatatgaatctggagttctag

SEQ ID NO: 188525 - DNA, 273 bp, synthetic construct
  misc_feature 1..273: note = Description of Artificial Sequence: Synthetic coding sequence
  source 1..273: mol_type = other DNA
atgagccggcccctgctgatcaccttcacccccgccaccgacccctccgatctttggaaggatgggcagcagcagccgcagcccgagaagccggaatccaccctggatggtgcagccgcgcgagcgttctacgaggcacttatcggagatgagtcatccgctcccgactcccaacgatctcaaaccgaaccagctagagaaaggaagcggaagaagcgaagaatcatgaaagccccggcggcagaggctgtcgctgagggggcatcaggctag

SEQ ID NO: 188526 - DNA, 1071 bp, synthetic construct
  misc_feature 1..1071: note = Description of Artificial Sequence: Synthetic coding sequence
  source 1..1071: mol_type = other DNA
atgagccggcccctgctgatcaccttcacccccgccaccgacccctctgacctctggaaggatgggcagcagcagccccaaccagagaaaccagaatctactctcgacggcgctgccgcactggcattttacgaagccttaatcggagacgaatcctcagcccccgattctcaaaggagccagactgagccagcaagagagcgtaagagaaagaaacggcggatcatgaaggctccagcagccgaagccgtggccgaaggcgctagcggtagacacggacagggtcggtctctcgaggctgaggataaaatgacccaccgaatcctgcgggccgcccaggagggagacctgcccgaactcaggcggctgctggaaccacacgaggccggtggcgcagggggcaacattaacgcccgggacgctttctggtggactccactgatgtgtgctgctagggccggacagggtgccgccgtgtcatatctgctcgggaggggggctgcttgggtgggcgtgtgcgaactgtctgggcgggatgctgctcagctggccgaagaggcggggtttcctgaagtagctaggatggttcgggagagtcatggggaaacaaggtcacctgagaacaggagccccactccttcactccaatattgtgagaactgcgacacacacttccaggattccaaccaccgcacctctaccgctcatttactatcattgtcccagggcccacaaccccctaatcttcctttaggcgtgccaattagttcgcccggctttaagttactcctgcgggggggatgggaacccgggatgggtcttggaccgagaggagagggacgcgctaaccctattcccactgtgttaaagcgggatcaggagggactggggtatagatctgccccacaacctcgagtaactcattttccagcgtgggatacacgggccgttgctgggagggaacggccaccgagggtcgcaacactgtcctggagagaagaaaggcggcgggaagagaaggacagagcatgggaaagagaccttcgaacctatatgaatctggaattttag

SEQ ID NO: 188527 - DNA, 498 bp, synthetic construct
  misc_feature 1..498: note = Description of Artificial Sequence: Synthetic coding sequence
  source 1..498: mol_type = other DNA
atgagccggcccctgctgatcaccttcacccccgccaccgacccctcagacctatggaaagatggtcagcagcagccacagcccgagaagcccgaatccactcttgatggcgccgccgctagggccttttatgaggccctgatcggggacgagtccagtgcaccagactctcagagatcacagacagaaccggcccgagaacgcaaacggaagaagaggcggattatgaaagcgcctgctgccgaagctgtcgcggaaggcgcctctggcagacatggtcaggggcgctccctggaggctgaggataagatgacccaccggattctgcgcgcagcccaggagggcgatcttccagagttgagacgtctattagagccacacgaagctggcggggctggcggcaatatcaacgcacgagacgcattttggtggacccccctcatgtgtgcagccagagcaggccagggagccgccgtgtcctacctgctcgggcgctag

SEQ ID NO: 188528 - DNA, 459 bp, synthetic construct
  misc_feature 1..459: note = Description of Artificial Sequence: Synthetic coding sequence
  source 1..459: mol_type = other DNA
atgagccggcccctgctgatcaccttcacccccgccaccgaccccagcgatctgtggaaggatggacaacagcaacctcagcctgagaaacctgaatcaacgttagatggagcagctgcaagggcattttacgaggcattaattggcgatgagtcttccgccccagactcccagcgcagtcaaactgagccagcacgcgaacgaaaacgaaagaagcgacgtattatgaaggcgcccgctgccgaggctgtcgcggaaggtgcaagtgggagacatgggcagggtcgctctctggaggccgaagataagatgactcataggatccttcgagctgcccaagagggagacctacctgagctacggcgccttctggagccccatgaagccgggggcgcgggtggcaacatcaatgccagggacgctttctggtggaccccattaatgtgtgcagcaagatag

SEQ ID NO: 188529 - DNA, 4509 bp, synthetic construct
  misc_feature 1..4509: note = Description of Artificial Sequence: Synthetic coding sequence
  source 1..4509: mol_type = other DNA
atggccgaccggttcagccggttcaacgaggaccgggacttccagggaaaccacttcgaccaatacgaagaagggcatctcgaaattgagcaagcatcacttgacaagcccattgagagcgataacattgggcatagattgctgcaaaaacacggctggaagctcggtcaaggactcggcaaatccctccagggaagaaccgaccccatccccattgtggtgaagtacgatgtcatggggatgggaagaatggagatggagcttgattatgccgaggatgcaaccgagcgacgacgcgtcctcgaggttgagaaagaggatacagaggaattgagacagaagtacaaggactatgtcgataaggaaaaggcaatcgctaaagctttggaagacctccgtgcgaacttctactgcgagctctgcgacaagcagtaccagaaacaccaggagttcgataaccatattaatagctatgatcacgcccataagcagcggctgaaggacttgaagcagcgtgaatttgcaagaaatgtgtcatctcggtcccggaaggacgagaagaagcaagagaaggccctccggcggctgcacgagctcgctgaacagaggaagcaggctgaatgcgctcctgggtctggccccatgtttaagccaactaccgtagccgtcgatgaagagggaggcgaggatgataaagatgagagcgcgactaactcaggcactggcgccactgcatcctgtgggctgggctctgagttttcgaccgataagggcggccctttcacggcggtgcagattactaacaccaccggactcgctcaggccccaggcttggcatcgcagggtattagctttggaattaagaacaatctcggaactcccctacagaaattgggtgtgtcattctccttcgccaagaaggccccagtgaaactggaatctatcgcttccgtgttcaaggaccacgcagaagaggggacctctgaggacgggacaaaacccgatgagaaaagcagtgaccaagggctgcagaaagttggtgattccgatgggtcttcgaatctggacgggaagaaggaagatgaagaccctcaggatgggggaagcctagccagtacactgtcaaaactgaagcggatgaaaagagaagagggggccggggccacagagccagagtattaccattatattccacctgcacattgtaaggtgaagcccaacttcccgtttctgctgtttatgcgggcttccgagcagatggacggagacaacaccacacatccaaagaacgcccccgaaagcaagaaaggttcttccccgaaaccaaagagctgcatcaaggcagccgcatctcagggggccgaaaagacagttagcgaggtgtctgagcagcccaaggaaacctctatgaccgagccctcggagcctggctccaaggctgaagccaaaaaggctctaggcggggatgttagcgaccagagcctcgagagtcattctcagaaggtgtcagagacacagatgtgcgagtcaaacagttctaaggagacaagtctcgcgacccctgctggcaaagagagtcaggagggacccaaacatcccaccgggccttttttccccgtgttgagtaaggacgaatcgacagcactccaatggcccagtgaactcctgatctttactaaagcagagccttccatcagctatagttgtaatcctctgtatttcgattttaaactgtcaagaaacaaagatgccagaactaaaggtacggagaaaccaaaggacattgggagcagctctaaagaccatctgcagggtctagatcccggagagcctaataaatctaaggaagtgggcggagaaaaaatcgttcggtcatcagggggacggatggacgctcctgctagtggctctgcatgttctgggctgaataaacaggaacccggaggatcccatgggtctgagacagaggacacaggcaggagcctcccttccaagaaagaaaggtcggggaagagccatcgccataagaagaagaaaaaacacaagaagagcagtaaacacaagagaaagcataaggccgacactgaagagaaaagttccaaggcggaatctggggagaagtctaaaaagcggaaaaagcgtaagagaaaaaaaaataagagtagcgctccggccgactccgagcggggccccaagcctgaaccccctgggagtggatccccagcgcctccacgtagacgcaggagagcccaagatgattcccaaaggcggagtctccccgccgaggagggctcatccggcaagaaagacgagggtggcggcggatcaagtagtcaggatcacggaggccggaaacacaagggggagttgccccccagctcctgccaaaggcgagccggaaccaaaagaagctctcgatcaagccacagatctcagccctcttccggcgacgaagattccgacgatgcctcatcccatcgtcttcaccaaaaatcaccgagccagtattccgaagaggaagaggaagaggacagtgggtcagagcattccaggtcgagatctaggtctgggcgtagacactcctcccaccggagctccagacggtcttactcctcttcttcggacgcttccagcgatcagagctgctattctaggcagagatcatattcagatgattcctattcagactatagcgacagatcccggcgtcactccaaacgcagtcacgactccgacgactccgactacgcaagctcgaaacacaggtccaaacggcataagtatagcagttctgatgacgactactcactaagctgcagtcaatcccgttcacgctcccgcagtcacacacgtgagcggtcaagaagtaggggtcggagccgatcttcctcatgctctagatccagaagtaaacgtagaagtagaagtaccacagcccatagctggcagcggtcgagaagttactcgcgtgataggtctaggtctacgagatcgccgtcacaaagatcaggatctaggaagcggagctgggggcacgagtctcccgaagagagacactccggtcgtagagatttcattcgctcaaaaatatacaggagccagtctccacattactttcggagcggccgcggcgaaggccccgggaagaaggatgacgggcggggagacgactcaaaagccaccgggcctccatctcagaatagcaacatcggcacaggacgtggcagcgaaggcgattgttcccctgaggataaaaattccgtcacagctaagttgctgctcgagaagatccagtcgagaaaggtggagcgcaagcccagcgtctctgaggaagtccaggcaacgcctaataaagcagggccaaagctcaaagaccctcctcagggatacttcggccctaagctgccaccttcactgggaaataagccagtactcccccttatcgggaaacttcctgccactcgcaaaccaaacaagaaatgcgaggaatctggcctggagagaggggaagaacaggagcagtctgaaacagaagaggggcctccaggaagctccgacgcgttgttcggacaccagtttccctcagaagagaccacgggaccgctgctggaccctccacctgaagagagtaaaagtggggaagctacagctgatcaccccgtggcccccctgggtacacccgcacactcagattgctaccccggagacccaaccatctcacacaactaccttcctgaccccagcgatggcgacacactggagagcctggattcatctagtcagccaggcccagttgaatcaagcctactgcctatcgctcctgacttggagcattttcccagctacgcaccccccagcggtgaccctagcatcgagagcaccgacggtgcggaggatgcaagcctagcccctctcgaaagccaacccatcacgtttactccggaggaaatggagaaatactccaagctccagcaggcggctcagcagcacattcagcagcagctactagcaaagcaggtgaaagcgtttccagccagtgcagcactagctccagccactcccgcactgcagccaatccacattcaacagcctgctacagcatctgctacatcgataaccacagttcaacacgccatattacagcaccacgcggcggccgcggcggctgctattgggattcacccccatccacacccacagccactggcacaggtgcaccatataccacagcctcacttgacgcctattagcctgtctcacctcacccacagcataatcccagggcaccccgccacattcttagcctcgcacccaattcatatcattcctgcctctgctatccaccccgggccctttacattccaccctgtgccccatgctgccctgtatccaacactgctggcaccacgaccagctgcagcagcagccaccgctctgcacctacacccattgctccatccaatttttagtgggcaagacctccaacatcctccctcccacggaacatag

SEQ ID NO: 188530 - DNA, 4275 bp, synthetic construct
  misc_feature 1..4275: note = Description of Artificial Sequence: Synthetic coding sequence
  source 1..4275: mol_type = other DNA
atgggcatgggccggatggagatggagctggactacgccgaggacgccacggagcggcgtagagtgttggaggtcgagaaggaggacacagaagagctgaggcagaagtataaggattatgttgacaaggagaaagctatcgccaaggcacttgaggatctccgggccaacttttattgcgagctatgcgacaagcagtaccagaagcaccaggagttcgacaatcacatcaatagttacgaccatgcacacaagcagcggctcaaagacctgaaacaaagggagttcgcgcgaaacgtctcgtctcggagtcgcaaagatgaaaaaaaacaggagaaggccctcaggcggctgcacgagctagcagagcagcggaaacaggccgaatgtgccccaggcagcggtcccatgtttaagcctacaactgtggcagtggacgaggagggtggcgaagacgataaggacgagtctgctacaaactctggcacaggggcaacagcctcctgtggtcttgggagcgagttcagcactgacaagggcggacccttcaccgctgttcagattactaacaccacagggttagctcaggcccccggactggcaagtcaaggaatctccttcggcatcaagaacaatcttggaacgccgctgcaaaagcttggagtctcctttagcttcgccaagaaggctccagtgaagctagaaagcatcgcctcggtatttaaggaccacgccgaagaggggacgagcgaggatgggacaaaacccgatgaaaagtcctccgatcagggtctgcagaaggtaggagattctgacggatctagcaacctggacgggaagaaggaggacgaagacccacaagacggtggatcgctggcaagcactctgtctaagctgaaacggatgaaaagggaagagggtgccggagcaacagaacccgagtactaccattacattccaccggcccattgtaaggtcaaacctaacttcccatttttgttgtttatgagagcctctgagcagatggacggcgataatacgacgcacccaaaaaacgcaccggagtctaaaaaaggtagctccccgaagcctaagagttgtatcaaggccgctgctagtcaaggggctgaaaaaaccgtgagtgaagtctcagagcagcctaaagaaacgagtatgactgaaccctccgagccaggttccaaggctgaggccaaaaaagccctcggcggtgacgtcagcgaccagtccctcgagtctcactcacagaaagtatcggaaacgcagatgtgtgaatctaatagttctaaagaaacttctcttgccacaccagccgggaaggagtctcaggaaggtcccaagcatccaaccggaccattctttcctgtgctctccaaggatgaatctaccgccttacaatggccgagcgaattgctgatttttacaaaggcagagccgtccatttcctatagctgtaacccgctgtacttcgacttcaagttgtcccggaacaaggacgcacgcaccaagggcacagagaaacctaaggacattggctcatcgtcaaaggaccatctgcagggccttgatcccggggaaccgaacaagagcaaggaagttggcggggaaaaaattgtaaggagttccggcggtagaatggacgcaccggcatccggcagcgcctgctccggactcaataaacaagagcctggtggttcccacgggagtgagactgaagataccggaagaagtctgccttccaagaaagagcgctccggaaagtcgcatagacacaaaaagaagaagaagcacaaaaagtcgagcaaacacaaacgcaaacacaaagccgacacggaggagaaatcaagcaaagctgagtcaggcgagaaaagcaagaaacggaaaaagaggaagaggaagaagaataagagtagcgcacccgcggattcggagcgcggacccaagcctgagcctccaggctccggcagccctgccccccctagaaggcgaaggcgcgcccaagatgacagtcagcgacggtccttaccagcagaagaggggagtagcgggaaaaaggacgaagggggcggcggttcaagttctcaggatcatggaggacggaagcataagggagagcttcctccttcaagctgccaacgaagggcaggcaccaagcgcagcagtcggagcagccaccgaagccagccttcatcaggcgacgaggactcagatgacgcctcaagtcataggctccaccagaagtcccctagccagtattccgaggaagaggaggaggaagattctggctccgaacatagcagaagccgctctcggtctgggaggagacatagtagtcaccgtagcagtcgcaggtcctatagttcatctagcgatgccagcagtgatcagagctgctattctcggcagagatcctacagcgatgactcctactcagactacagcgaccggtcgaggcggcactccaagaggagtcatgattcggatgactccgattatgcatcctctaaacaccgaagtaaaagacacaagtattccagtagcgacgatgattactccctgagctgctcacagagccggagtcgctcgagaagccatacccgggaacgtagtagatcccggggcaggtcccggtcatcttcttgcagcagaagccgcagcaaacgacggagcaggtccaccactgcgcactcttggcagcgaagcaggagttatagtagggacagaagccgctccacacggtctccatcccagaggtcgggttcccggaagcgttcttgggggcacgagtcccctgaggagagacattccggtcggcgcgactttatcagaagcaaaatctaccggagtcagtcaccacactactttaggtccggccgcggggaaggaccaggaaaaaaggacgatgggcggggcgacgattcgaaagctacaggacccccctcacaaaatagtaacattgggacaggtcgtggatcagaaggagactgtagccccgaagataagaactcggtgaccgcgaagctccttctagagaagatccagagcaggaaagttgagagaaaaccatccgtgtctgaggaagtgcaggcaaccccaaataaagccggtcccaagctaaaagacccccctcaggggtacttcgggcccaagctcccaccgagccttggcaacaagcctgtacttcctctaataggaaagctcccagctaccaggaagccaaacaagaaatgcgaggaatctgggctcgagagaggagaggaacaggaacagtccgaaactgaggaagggccccccggttcatccgatgccctcttcgggcaccaattccctagtgaggagacgacaggccccctactggatccccctcctgaggagtccaaatctggagaggctactgccgaccaccccgtcgccccgctgggaacccctgcgcattcagattgctatcctggcgaccccacaatctcccataattatctgccagacccatcagacggcgacacgttagaatccctcgattcatcctctcaacctggcccagtggaatccagcctgctcccgatagcacccgacctggagcactttccttcctacgccccaccctctggagaccctagcattgaatcaacagacggggcagaggacgctagcctggcaccgctcgaatctcagcctattacattcacaccagaagaaatggagaagtactccaagctgcagcaggcagcacagcaacacatccagcagcagctactggccaaacaggtgaaggcctttccggcctctgccgcactcgcaccagcaaccccagcactgcagcccatccacatccagcagcccgccactgcgtccgcaacaagcatcaccacggtgcagcatgctatccttcagcatcatgcggcagctgcagctgctgccatcgggatccacccacacccccacccccagccactggcacaagtgcaccatataccacagcctcatttaacgccaatcagcttgagccatctgactcatagcataattccaggacacccagccaccttcctcgccagccatccaatccatatcatcccggcttcagcaatccatcctggtccatttacttttcatccagtgccccatgctgccctatacccaaccctgttagctccaagacccgctgctgctgctgctactgcgctccacctccacccactgcttcaccctattttctctggccaggacctccagcacccaccttcacatggtacctag

SEQ ID NO: 188531 - DNA, 132 bp, synthetic construct
  misc_feature 1..132: note = Description of Artificial Sequence: Synthetic coding sequence
  source 1..132: mol_type = other DNA
atggccgaccggttcagccggttcaacgaggaccgggacttccaggggaatcacttcgatcagtacgaggagggtcatcttgagatcgaacaggcttcacttgacaaaccgatcgaaagctcgtgcttttag

SEQ ID NO: 188532 - DNA, 4509 bp, synthetic construct
  misc_feature 1..4509: note = Description of Artificial Sequence: Synthetic coding sequence
  source 1..4509: mol_type = other DNA
atggccgaccggttcagccggttcaacgaggaccgggacttccaggggaaccatttcgatcagtacgaagaagggcacctcgagattgagcaggcctctctggacaagcccatagagtctgacaacatcggccaccgcctactccaaaagcatgggtggaagctgggacagggcctgggtaagtcattgcagggacggaccgaccccatcccaatcgtggtgaagtatgacgtcatgggcatggggaggatggagatggagctagactatgcggaggatgccactgagaggaggcgtgtcctagaagtggagaaagaggatacggaagaacttcggcaaaagtacaaagactatgtagataaagagaaggccatcgctaaggctctcgaggatttgcgtgccaatttctactgcgagctgtgcgataagcaatatcagaagcaccaggaattcgataaccacatcaattcttacgatcatgcgcacaagcagcgactgaaagatctgaaacagcgcgagtttgctaggaacgtcagttcaaggtctcgcaaggacgagaagaaacaagaaaaagccctgaggcgcttgcatgagctggctgaacagcggaaacaggccgagtgcgcaccagggtcaggtccaatgttcaaacctacaacagtcgctgttgacgaagaagggggtgaggacgacaaggatgagtccgccaccaacagcggaacgggtgccactgcatcgtgtggtcttggttccgagttctcaactgataaaggtggtccattcacagccgtgcaaatcacaaacaccacggggctagcacaggcacctggactcgcctcccaggggatttcgttcgggatcaagaataacctggggaccccactccagaagctcggggtgtccttctccttcgccaagaaggctccagtgaagctcgaatctatcgcgagtgtgttcaaggatcatgcagaggagggaacctccgaggatgggaccaagccagatgagaagtcctccgaccagggactgcagaaagtgggcgattcagatggatcctccaacctggacgggaagaaagaggatgaggatccccaagatggcggctccctggcttcaaccctgtccaagctgaagaggatgaagagagaagagggcgctggcgctacagagccagaatattaccactacatcccacccgctcattgcaaggttaagccaaatttccctttcctgcttttcatgcgagcttcggagcaaatggatggtgataatactacacacccaaagaatgccccagagtctaaaaaggggagtagtcctaagcccaagtcatgtatcaaggcagccgcgagtcagggcgccgagaagactgtgtccgaggtgtccgagcagccgaaggaaactagcatgacagagccttccgagcccgggagcaaggccgaggccaagaaagcccttgggggagatgtgtcagatcaaagcctggaaagtcattctcagaaggtttccgaaacacagatgtgcgaatcaaacagcagcaaggagacgtctctggccacccccgctggcaaagagagccaggagggtcccaagcaccctactggaccattcttccctgtgctctcaaaggatgaaagcaccgcactgcagtggccctcggagctactcatcttcaccaaggccgaaccttctattagttactcgtgcaacccgctttatttcgacttcaagttaagtcgaaacaaagatgctagaactaaaggcacagaaaaaccaaaggatatcggcagtagctctaaagaccacttacagggactggacccgggcgagccaaataaatctaaagaggtgggaggagagaaaattgtgcgatctagcggcggacgtatggacgccccggcatctgggagcgcctgctctgggctgaataagcaggaacccggtggatcccacggctccgagaccgaggacactgggcggtccctcccctcaaagaaggagcgaagcggaaagtcccataggcacaagaagaagaaaaaacataagaagagtagtaagcacaagagaaagcacaaagccgatacagaagaaaaatcctcaaaggctgagagcggcgaaaaaagtaaaaaacgcaaaaagcggaagagaaagaaaaataaatcatcagccccagcagactcggagcgcggccccaaacccgagccccccggcagcggtagccctgcacctccacgccgtcggagaagggctcaggacgacagccagaggagaagcctgcccgcggaagaaggcagctccggcaagaaagatgagggcggcggaggcagctcatctcaggatcatggtggccggaagcacaaaggggagctgcccccctcatcgtgccagcgtagggcaggcacaaagaggagctctcggtcctcgcaccgaagccagccaagtagcggtgacgaggacagcgacgacgcctcctctcatagactccatcagaaatctccatcccagtactcggaagaggaggaagaggaagattccggcagtgaacacagccgctctagatctcgctccggccgccggcactcctcacatagatcctctagaagatcttatagctcaagtagtgatgcctctagtgatcaatcttgttactccaggcagaggtcctactctgacgattcttattctgattattcggataggtctaggcggcatagtaagcgctctcacgactctgacgactccgactacgcgagctctaagcaccgaagcaaacgacacaaatactcttcatccgatgacgattacagcctgagctgtagtcagtccaggtcccgttcacggtcccacacaagggagcgtagccggagtagaggtcgttctagaagctcttcttgcagcaggtcccgttctaaacgcaggagtaggagcacgacagcccattcatggcagaggagccggtcctacagccgggataggtcccgcagtacacggagcccgagtcagcggagcggatcccggaagaggagctgggggcatgagagtccggaagagagacacagcgggagacgagatttcattaggtcaaagatttacagatcgcaaagcccacactattttcggagcggccgaggggaaggtcctgggaagaaagatgacggacgcggcgacgacagcaaggcaaccggacccccttctcagaactccaatattggaactgggaggggaagcgagggggattgctcccctgaggacaagaactccgtcacagccaagttgctgctcgaaaagatccagagccggaaggtagagcgtaagcccagtgtcagtgaggaagtccaggctacacccaataaagccggcccgaagctgaaggatcccccccagggatattttgggcccaagctgccgccgagccttggaaacaagccagtgctccctctgataggaaagctgccagccactagaaagccaaataagaaatgtgaagagagtgggctggaaaggggcgaggagcaagaacaaagcgaaacagaggagggtcctccaggcagttctgacgccctattcgggcaccagtttcccagcgaggaaacgacaggtcctctgctggatcccccccctgaggagagcaagagcggggaggcaaccgccgatcatcccgtcgccccattagggacccctgcccacagcgactgttacccaggtgaccctactataagccacaattacctgcccgacccaagcgacggggacactctggagtcccttgacagttcctcccagccagggccagtggagagcagcctattgccaattgctcccgacttagagcacttcccgtcatatgcccccccatccggagacccctctattgagagcacagacggagcagaggacgctagtctggctcccctggaaagtcaaccgataacattcacccccgaagaaatggagaaatacagtaaattgcagcaggcggcccaacagcacattcagcaacagctcctagcaaaacaggtcaaggcgtttccggcaagcgctgccttggcccctgcgacccccgctctccaaccaatacacatccagcaaccggcaacagctagcgcaacctccattactaccgtccagcacgccatcttgcagcatcatgccgccgctgccgcagccgccattgggattcatccacacccccacccccagcccctggctcaggtccatcacattcctcagccccacctcacacctatttcactttcccacctgacgcacagcattattcccggccaccccgctacttttctggcctcccacccaattcacataatccccgcctctgcgatacacccaggtccttttacctttcatcccgttccgcacgctgcactatatccaactctgcttgcacccagaccagccgcggctgccgcaaccgcactgcacctccatccgctcctgcaccccatttttagcggacaggatcttcagcatcctccatctcacgggacttag

SEQ ID NO: 188533 - DNA, 1476 bp, synthetic construct
  misc_feature 1..1476: note = Description of Artificial Sequence: Synthetic coding sequence
  source 1..1476: mol_type = other DNA
atgcccctgcccgtgcaggtgttcaacctgcagggcgccgtggagcccatgcaaattgacgtggacccccaggaagatccgcagaacgctccagatgtcaactacgtggtagagaatccatcactcgacctagaacagtatgccgctagttactccgggctgatgaggatcgagcggcttcagttcatcgccgatcactgccctacattaagagtggaagctttgaagatggcattgagcttcgtgcagagaacttttaacgtcgacatgtacgaggaaattcaccgcaagttatccgaggcgacccgaagcagcttgcgtgagctgcagaatgcccctgatgccatcccagaaagcggcgtggaacctcccgcactggacaccgcatgggtcgaagcaaccagaaagaaagcactgctgaagctggaaaaattagacaccgatctgaagaactacaaaggtaattccattaaggaaagcatccggcgcggacacgacgaccttggcgatcattatttagactgcggcgatctgagcaacgccctgaagtgttactcccgggctagagattattgcacatctgcgaaacacgtgatcaacatgtgcttgaatgttatcaaggtttccgtgtacttgcagaactggagccatgttcttagctatgttagtaaggcagagtccaccccagagattgcagaacaaagaggggaacgcgactcacagactcaggcaattctgactaaactgaagtgcgctgccggcctggctgaactggcagcgaggaagtacaagcaagccgctaagtgtttgctcctcgccagcttcgaccattgcgactttccggaactcctgagtccatcaaacgtggccatctatggaggactgtgcgccctggcaacatttgatcggcaggagttgcaacgaaacgtgatctctagcagctcgtttaagctgtttctcgagttggagcctcaagtcagggatattatcttcaaattctacgagagcaagtatgctagttgcctgaagatgctggacgagatgaaggataatctgctccttgatatgtacctcgccccacacgttcgcactctgtacacccagatccggaaccgggctctgatccagtatttcagcccgtacgtttctgctgatatgcaccgcatggcagccgctttcaatacaaccgttgccgctttagaggacgaactgacccagttgatcctggaagggctgatttccgccagggtggattctcactccaagattctgtacgctagggacgtcgaccagagaagtaccaccttcgagaagtccctgctcatgggcaaagaatttcagaggcgcgccaaagccatgatgcttagagcagcagttctcaggaatcaaatccacgtgaagtcccctcctcgggaaggaagccagggggaactgacaccggctaactcacagagccgcatgagtacaaacatgtag

SEQ ID NO: 188534 - DNA, 1653 bp, synthetic construct
  misc_feature 1..1653: note = Description of Artificial Sequence: Synthetic coding sequence
  source 1..1653: mol_type = other DNA
atgcccctgcccgtgcaggtgttcaacctgcagcagcccgccagctctgtgagtggatccggaggggccgaaagccaggaccggatgagggactccagtgccccaagctctgcatcctcttccgtcaccgatctctattgtactccccacagttcgcggtctgacctggtacttcccgggactgcaggagatttttctctctcggcgtccctgtccgcctgcactcttctatatgagggagcagtggagcccatgcaaatcgatgtggaccctcaggaggacccacagaatgcaccagatgccatacccgagtcaggagtagaacccccagctctggacacagcttgggttgaagctactaggaagaaagccctgctaaagctggagaaattggacaccgatctgaaaaactacaagggtaactccataaaagagtccatcaggcggggtcatgacgacctgggcgaccactacctcgattgtggcgacctgtcaaacgcactgaagtgctacagccgcgccagagattactgcaccagcgcgaaacatgtgatcaacatgtgtcttaacgtgataaaggtgtcagtttatctccagaactggtcgcacgtgctgtcctacgtgtcaaaagccgaaagcacccccgaaattgccgaacagcgtggggagcgcgattcccagacgcaggccatcctgaccaaactcaagtgcgcagccgggctcgctgagctggcagcaaggaaatacaagcaagccgccaagtgcctactgctcgcctcctttgatcactgcgattttccagagctccttagcccttctaatgtggctatatatggcggactctgcgctctggccacgttcgataggcaagaactgcagcgaaacgtgatctcttcaagcagctttaagctgtttctcgaactggagcctcaggtccgggacatcatatttaagttctacgaatctaagtatgcttcttgcctgaaaatgctggatgagatgaaggacaatctgctgctggatatgtaccttgctcctcacgttcggaccctctatactcaaattaggaaccgggccctcatacagtatttcagcccgtacgtttccgccgacatgcaccggatggctgcggcattcaatacgactgtggcggcgctggaagatgaactgacacaacttatccttgaaggtctgatatctgcccgggtggatagccactctaaaatattgtatgccagggacgtagatcagcgaagcaccacatttgaaaaaagtttactcatgggaaaggaatttcagaggagggccaaggccatgatgctacgggccgcagtcctgcgaaaccagattcatgtcaaacctctgcccacaagtacagatctaggtccacctggcggaagtgtactgcctgctgcacagctgagaggtctcgccaccggatgccatcccgcctgcgtaccgtccctgggtttaagaagacaggcagcagcttcttgcggaccatcctggaaagagaggccagctggtctcgatcccgtgggcttttgcccccagggggccgactgcgcagcaccccggccttcaggaacaatctctcagaccccgccagttcctgccagcgtgaggtgccgccaggtgggaggggtccactag

SEQ ID NO: 188535 - DNA, 1584 bp, synthetic construct
  misc_feature 1..1584: note = Description of Artificial Sequence: Synthetic coding sequence
  source 1..1584: mol_type = other DNA
atgcgggacagcagcgcccccagcagcgccagcagcagcgtgaccgacctgtactgtaccccgcatagcagtagatccgacctggtcctgccaggcacagctggtgatttttctctcagcgcttccctgagtgcctgcaccctcctgtacgagggggccgtggagcccatgcagattgatgttgacccgcaggaagaccctcagaacgcacctgacgtaaactatgtggttgagaatccgtccttggacctcgagcaatacgcggctagctactcagggctgatgagaatagagaggctacagtttattgccgaccactgcccgactctgcgcgttgaggcgctgaaaatggctctctcttttgtgcagcgaacgttcaatgtcgacatgtatgaggagattcaccggaaacttagtgaggccacaagagagctgcagaacgcgccagatgcgatcccagaatctggtgtggagcccccagccctggacacagcgtgggtagaggccacccgtaagaaggctctgttaaagctagagaagctggacactgacctcaaaaattataagggcaatagtattaaagaaagcatccgtcgtggtcacgatgacctgggagatcactacctggactgcggcgatttatcaaacgcactgaaatgttatagtagggcacgcgattattgcacatcggcaaaacacgtcataaacatgtgcctcaacgtcattaaagtcagcgtgtatctgcagaactggagccacgtcctctcttatgtgtccaaagctgagtccacccctgagatcgcagaacaaagaggcgagcgcgactcccagacacaagcaatactgaccaaacttaaatgcgctgccggcctggccgagctggcagctcgcaagtacaagcaggcagccaaatgtctgttgctggcctccttcgaccactgcgactttcctgagctgctttctcccagcaatgtggctatctatggagggctgtgtgcactcgccacttttgacagacaagaactgcagcgtaatgtcatctcttctagcagctttaagctgtttctggaactggaaccccaggtcagagacatcatcttcaaattttacgagagcaaatacgcctcgtgtctcaaaatgcttgatgagatgaaagataatcttctgctcgatatgtatctggcgccacatgtcagaaccctctatacacagatcaggaatagagccctgattcagtacttcagcccatacgttagtgccgatatgcatcgcatggccgcagcgttcaacacaacagttgctgcattggaagacgagctgacacaacttatcctggaaggactcatcagtgcaagagtcgattcacactccaaaattctttacgcacgggatgtcgaccaaaggagcaccacgtttgagaagtcactcctgatgggaaaagagttccaaaggagagccaaagccatgatgctacgggcggctgtactgcggaaccagatccacgtgaaaagccctcccagagaggggtcgcagggagaattgactccagcaaacagccaaagtcgtatgtctactaatatgtag

SEQ ID NO: 188536 - DNA, 855 bp, synthetic construct
  misc_feature 1..855: note = Description of Artificial Sequence: Synthetic coding sequence
  source 1..855: mol_type = other DNA
ggccagcccgagatcggcggcttcctgcccagcagcctggcccccgtgacggcagctattctgatggcacgctctagtctccgagagcttcagaatgcgcccgacgccatcccagagagcggcgttgagcctcctgccctggacaccgcctgggtggaggcaacaagaaaaaaggcactgctgaagctggaaaagctggatacagaccttaaaaactacaagggcaattcgatcaaagaatccatccggagggggcatgatgatcttggcgatcactacctagattgtggagatctttccaatgctctgaagtgttactctagagcacgcgactactgtacttccgcaaaacacgtgataaatatgtgtttgaacgttataaaggtcagtgtatatcttcagaactggtctcatgtcttaagctatgtatcgaaggcagaatccaccccggaaattgctgaagtgcgcgccacgtcgtccgagacccttccgccaggtttcctaactactgctggaccctcatgtccacccccaccacactcacctcctgatctcaacctgccctcatcccccctgtccttgggagccggacatcgggccctgggtaatgtagagcacggaccccacgcctgcggcttcctgttgcagcagcgcggcgaacgagatagtcagactcaggcgatcttgacaaagctgaaatgcgccgctggcgagggactgggacacgcccagcttaccccccgcagtccagtagcaaagtcgtctcagccccgtgccgttggctggagcctgccacagcctggcaagacctcactggccggtcgtcggatgctttgggcccacgtgcaagtatag

SEQ ID NO: 188537 - DNA, 1584 bp, synthetic construct
  misc_feature 1..1584: note = Description of Artificial Sequence: Synthetic coding sequence
  source 1..1584: mol_type = other DNA
atgcgggacagcagcgcccccagcagcgccagcagcagcgtgaccgacctatattgcactccgcatagctcgcgtagcgatctggttcttcccgggacagccggggacttctctctcagtgcttccctgtctgcctgcaccctgctgtacgaaggcgcagtcgaacctatgcagatcgatgtggatccccaagaagacccgcagaacgctcccgatgtgaactatgtggtcgaaaatccttccctggacttggagcaatatgcggctagctatagcggcttaatgcgcattgagcgcttgcaattcattgccgatcactgtcctacgctgcgggttgaggcactgaagatggcgctgagcttcgttcaacgaactttcaatgtcgacatgtatgaggagatccacaggaaactgagtgaagctactcgcgagctgcagaacgccccagacgcaattccagagagtggcgtggagccacccgccctggacacagcttgggtcgaagcaacgcgaaaaaaggccctcctgaagctagagaagcttgatactgacctcaagaattacaaaggcaacagtattaaggagtccattcggcgtggccatgacgatctcggcgaccattatctcgattgcggggatctgtccaatgccttgaagtgctactctagagctagagactactgcacaagtgcaaagcacgttataaacatgtgcttaaatgtcattaaggtgagcgtttacctccaaaactggtcgcacgttttatcctacgtctccaaggctgaatctacacccgagatagcagagcagaggggtgaacgggactctcagacccaagccatccttacaaaacttaagtgcgccgcaggcctggcagagctggccgcgagaaagtataagcaggcggccaaatgtctgttgctggcctcatttgatcactgcgattttcccgaattgctttccccctccaatgtggccatttatggtggactctgtgccttagccactttcgaccgccaggaattgcagagaaatgtcatctctagctcaagttttaaactgttcctcgaactggagcctcaggtgcgggatattatattcaagttctacgaatccaagtacgccagctgcctcaaaatgttagatgagatgaaagacaatctgttgcttgatatgtatctcgctccacatgtgagaactttatacacgcagattagaaaccgggcgctcatccaatatttctcaccttatgtgtcagccgatatgcatcgcatggccgccgcttttaatacaacagtggcagctcttgaagatgagcttacacaactgatcctcgagggtctcatttccgcaagggtggatagccacagtaagatattatacgctcgcgacgtcgaccagagatctacaacattcgaaaagtctctattaatggggaaagaatttcagaggagggctaaagcaatgatgttacgcgccgccgtcttaagaaaccaaatccatgttaagtccccacctcgtgagggcagccagggggaactgacacccgccaattcccagagtaggatgtccaccaacatgtag

SEQ ID NO: 188538 - DNA, 993 bp, synthetic construct
  misc_feature 1..993: note = Description of Artificial Sequence: Synthetic coding sequence
  source 1..993: mol_type = other DNA
atgacccccaacagcaccggcgaggtgcccagccccatccccaagggagccctcggcctcagcctcgcgctagcctccctcatcatcactgccaacttactgctcgccctaggcatagcatgggatcggcgcttacggtcccctcctgccggctgtttcttcttaagtctactgctggctggtttgctgacgggactagctctcccaaccctgccggggctctggaaccagtctcgccgcggatactggagctgtttgctcgtgtacttagccccaaacttcagcttcctcagtctgcttgctaacctgctgttggtccatggtgaacggtatatggctgtgctgagacccctgcaaccccccgggtctatcaggctggcccttctgctcacatgggcagggcccctgcttttcgcgagcctacctgcattaggttggaaccactggacccccggcgccaactgtagtagtcaagctatttttccagcaccatacttgtacttagaggtctacgggttattattacctgccgtcggagccgctgcattcctatccgtgcgagtgctcgccactgctcaccggcagctacaggatatttgccgcctcgagagagccgtttgtagggatgagccctctgcattagcgagagcacttacctggcgccaggcacgggcgcaggctggcgctatgctgttgtttgggttgtgttggggtccttatgtcgccacactgctcctatccgtactggcgtatgagcagcgcccaccattaggacctggcactttactgtctctgctgagtctcggctcagcatccgcagctgccgtacccgtggccatgggtctgggagaccagcggtatacggccccctggagagctgctgcccaacgctgccttcaggggctgtggggaagggcgagccgcgactcacccggcccatccattgcctatcatccatcgagtcagagtagcgtggatctagacctgaactag

SEQ ID NO: 188539 - DNA, 993 bp, synthetic construct
  misc_feature 1..993: note = Description of Artificial Sequence: Synthetic coding sequence
  source 1..993: mol_type = other DNA
atgacccccaacagcaccggcgaggtgcccagccccatccccaagggggcccttggactcagtttggctctggcgtctctgattatcacagctaacctattgctggcgttgggcattgcttgggaccgtcgcctccgttccccgcctgctgggtgcttctttctctccctgctgcttgctggcctcctaaccggcctggccctcccgaccctgccaggcctttggaaccaatcacggcgtggctactggagttgcctacttgtatatctggcacccaatttttctttcttatccctccttgccaatctcctccttgtgcatggcgaaagatatatggcagtgctgcgacccctgcagccccctgggagcatccgcctagccctgcttctgacatgggctgggcccttactcttcgcctctctacctgccttgggctggaaccactggacacctggcgcgaattgctcatcccaggccatcttcccagcaccttatctttacctcgaggtgtatggcttgctgctgcctgctgtgggcgccgccgcctttctgtcagtgcgggtactggctactgcccatagacaactacaggatatttgcaggcttgagcgggccgtgtgccgcgatgagcctagcgcactagcccgcgctctcacctggagacaggctcgggctcaggccggcgctatgctgctcttcggactttgctggggcccgtatgttgccactctgcttctcagtgtactggcatatgagcagcgcccacctctaggacccggtacattgctcagtctgctgtcccttggcagcgctagcgccgcggctgtgccagtagcaatgggtcttggggaccagcgctataccgctccatggcgggcggctgcacagcgctgccttcagggactctggggaagagcctctcgcgacagcccaggtccctccatagcttaccacccctcttctcaaagttctgtcgatcttgacctgaactag

SEQ ID NO: 188540 - DNA, 993 bp, synthetic construct
  misc_feature 1..993: note = Description of Artificial Sequence: Synthetic coding sequence
  source 1..993: mol_type = other DNA
atgacccccaacagcaccggcgaggtgcccagccccatccccaagggggcactcgggctgagcctggcgcttgcctccctgattattactgccaacttgctcttagcgctgggtattgcgtgggacagacgccttcgcagcccccccgccgggtgtttcttccttagtttacttctagcaggcctgcttaccggactggccctccctaccttgcctggcctgtggaatcagtcaaggcgtggctattggagctgccttctggtctaccttgctcccaacttctccttcttgtcccttctggcaaacctgctactcgtccatggagaacgatacatggccgtcctgcgacccctgcaacctccaggaagcatccggctagccctacttcttacctgggctggccccctgctcttcgccagcctccccgccttgggttggaatcattggacgcctggcgcgaattgttcttcccaggcaattttcccagctccctatctgtatctcgaggtgtatggcctgctcctaccggccgtgggagccgcagcctttctttccgtgcgagtactggctactgctcacaggcaactgcaggatatctgtcggctcgaacgtgccgtctgtcgggatgaaccatcagccctggcccgggcactaacttggagacaggccagggcacaggcaggcgccatgctgctgttcggcctctgctggggtccatatgtcgccaccctacttctgagtgtgttggcatatgagcagcgaccacccttaggacccggtactcttctgtcactcctctcacttggatccgctagcgcagccgcggtgcccgtggcgatgggccttggcgatcaaagatacaccgcaccttggcgagccgcagcccaaaggtgtttgcagggtctgtggggcagagcctctcgtgattccccaggaccatccatagcatatcacccctcgtcacagtcttctgtggacctcgatttaaattag

SEQ ID NO: 188541 - DNA, 993 bp, synthetic construct
  misc_feature 1..993: note = Description of Artificial Sequence: Synthetic coding sequence
  source 1..993: mol_type = other DNA
atgacccccaacagcaccggcgaggtgcccagccccatccccaagggagccctcggtctgtctctggcgttggcttcgttaataataaccgctaacctgctgctcgctctcggtatcgcttgggataggagactccggagcccaccggctggctgcttttttctctccctactgctcgcaggcttgctgaccggtttggcactcccaaccttacccgggctttggaaccaatcacgtcgcggctattggtcctgcctgctggtgtatttggcccccaacttctcctttctcagtctcctggccaatctccttctcgttcacggggagcgttatatggcagttctacgaccattgcagccacccggatccattcggctggctctgctgctcacctgggccggacccctgctatttgcaagtctgcccgccctggggtggaaccactggacacctggagcaaactgctcttctcaagcaatctttcctgcgccctacctatacctcgaggtttacgggctcttgctgccagccgtcggcgccgcagccttcctgagtgtgagagtactcgcaacggctcatcgccagctccaagacatatgtagattagaacgggccgtatgcagagatgagccctcagccctggctcgcgccctgacctggagacaggctagggcccaggccggagccatgcttctgtttggattatgttggggaccatacgtggcaactcttcttctctccgttctcgcttacgagcaacggccacctttagggcctgggacgctactaagtctgttatctcttggttccgccagtgccgccgcagttcctgttgcaatgggtttaggggatcaacgctatacagcaccatggcgcgcagccgcccagaggtgcctccaggggctatggggaagagcctctagggattctcccgggcccagtatcgcataccacccgagcagtcagagcagcgttgatctagatctaaattag

SEQ ID NO: 188542 - DNA, 1128 bp, synthetic construct
  misc_feature 1..1128: note = Description of Artificial Sequence: Synthetic coding sequence
  source 1..1128: mol_type = other DNA
atggacgtgaccagccaggcccggggcgtgggcctggagatgtaccccggtacggcgcagcctgccgcccctaatactacatccccggaactgaacttgagtcatcccctgttgggaactgccctcgccaatggcaccggcgaacttagtgaacaccagcagtatgtgatcgggttattcctgagttgtctgtacaccatctttttgttccccatcggtttcgtcgggaacattctgattctcgttgttaacataagcttcagggaaaagatgactattcccgatctgtactttataaacctggccgtcgcagacctcattctggtggcagactcactgatcgaggtctttaaccttcacgagaggtactatgacatcgcagttctgtgtaccttcatgtctctcttccttcaagtaaacatgtatagcagcgtgttcttcctgacgtggatgagcttcgacagatacatcgcactggcccgggctatgagatgcagcctgttcagaactaaacaccacgcccggctgtcctgcggattaatctggatggcctcagtctcagctaccctcgtcccattcacagcagtgcatttacaacacacagacgaggcctgcttttgcttcgccgacgttcgcgaagtgcagtggctggaggtcactctgggcttcatcgtgcctttcgccattataggactgtgttactctctcattgtgcgggtgctggtgagggctcatcgccaccgggggctgagaccccgtagacagaaagctctgcggatgatcctggcagttgttctcgtcttctttgtgtgctggctgcctgagaatgtgtttatttccgtacatctgttgcagagaacacagcctggcgccgccccttgcaagcagtccttcaggcatgctcacccgctgaccggccatatcgtaaacctggccgcattttctaactcctgcctcaacccactcatctactcctttcttggggaaaccttccgcgataagttgaggctgtacatagagcaaaagactaaccttccagcactgaacaggttttgccatgctgccctcaaagcagtgatacctgattccaccgagcagtcagatgtgaggttttcctctgcagtgtag

SEQ ID NO: 188543 - DNA, 531 bp, synthetic construct
  misc_feature 1..531: note = Description of Artificial Sequence: Synthetic coding sequence
  source 1..531: mol_type = other DNA
atgagcctgaactgcggccagatgtggctgctggccccccggggcctggcccgcgtgacactggcctggtcaccttggggttgtttgggaaatctcactacaggacacctggcattattgactcagaattgttataatccgaaggccctcgcaccgcagggccctaaggcctccggcgaccagcctgtgactcagctgctgccagctaatcctgcgtgtcgttgcacatgtctgcccctccaagaaaccttcctgtctgtgttgcatcttccaggatggcagcagtggcgttgtgctgcttcacccgggccgcgtggtgccgccgctctggggcccgagcagcaggaagggccaagtgtcgagcgcccaccctccgcccccggttggttttcgcattgcctcttaacttctacttggcagttgcattcttgtggtctgggcccttgtgagctgccttgtggactggtcgggtgccaggacaacgaaattctccaacacctctggctgacaaatctgttcctgcaaaaatag

SEQ ID NO: 188544 - DNA, 1128 bp, synthetic construct
  misc_feature 1..1128: note = Description of Artificial Sequence: Synthetic coding sequence
  source 1..1128: mol_type = other DNA
atggacgtgaccagccaggcccggggcgtgggcctggagatgtaccctggaacggcgcagcccgcagcccctaacacaacctcacccgaactaaatctttcacacccattgttgggcactgccctggcaaatggtactggagagcttagtgaacatcagcagtatgtcatcggtctgtttttaagctgtctgtataccatcttcctatttccaataggctttgtgggcaatatcctcattctcgtggtgaatatatcattcagggagaaaatgaccatcccagacctctacttcataaacctagcagtggcagacctgatcctcgttgccgatagcctgattgaggtctttaaccttcacgaacgctactatgatatcgctgtcctttgcacatttatgagtctttttctgcaggtgaacatgtactcgtccgtgtttttcctgacatggatgtccttcgatcggtacattgctctagcaagagccatgagatgtagtctttttagaacaaagcaccacgcccggctgagctgcggactaatctggatggcgtccgtctcggccactctcgtgcccttcacagcagtgcatctgcagcacactgacgaggcttgtttctgcttcgcagatgtgcgggaggtgcagtggcttgaagtgactctgggattcatcgtcccgttcgcaattataggcttgtgctactccctgattgtacgtgtgctggtgcgagcacaccgccataggggattgagaccccggaggcagaaggctctcaggatgattctggctgtggtgttggtgttctttgtttgctggctacccgagaatgtctttatatcggttcatcttttacagcgaacccaacccggcgcggctccttgcaaacagagttttagacatgcacacccacttacgggtcacatcgtgaacctcgcggcgttctcgaactcctgtctgaatccgcttatctacagttttctgggggaaaccttcagagacaaactgagactctacatagaacagaagactaacttaccagccttgaatcggttttgccatgcagctctgaaagcagtaatcccagatagtaccgaacaatccgacgtccggttctcctcagctgtctag

SEQ ID NO: 188545 - DNA, 1128 bp, synthetic construct
  misc_feature 1..1128: note = Description of Artificial Sequence: Synthetic coding sequence
  source 1..1128: mol_type = other DNA
atggacgtgaccagccaggcccggggcgtgggcctggagatgtacccgggaaccgcccagccagccgctcctaacactacatcgcctgaactgaatctgagtcatcctttgttgggcacagccctggccaacggtaccggagagcttagtgagcaccaacagtacgtgataggcttgtttttatcctgtctgtataccatattcctattcccaataggtttcgtggggaacattctcatcttagtggttaacatcagctttcgcgagaagatgaccattccggatctttattttatcaacctggccgttgctgacctgatcctggtagccgatagtctgatcgaagtgtttaatttgcatgaacggtattatgacatcgctgtgctctgtacttttatgagcttgtttctccaagtgaatatgtatagctcagtgttctttctgacgtggatgagcttcgatagatacattgctctcgcaagggcaatgcggtgtagccttttccggaccaaacatcatgcacgcttaagttgtggcctgatatggatggcctctgtgtcggccaccttagtgcccttcactgcagtacacttgcaacacaccgatgaagcgtgtttttgcttcgccgatgttagagaggtccagtggctcgaggtgactcttggcttcatcgtccctttcgctataattggtttatgttattcactcatcgttcgcgtcctggttcgggcgcaccgccatagaggattacgcccccggagacagaaagcactcaggatgatcctcgcggtggtgctggtgttctttgtgtgttggcttcctgagaatgtgtttatcagtgtacacctcctacagcggacccagcccggcgctgccccctgtaagcagagcttccgacacgcgcaccctttaaccggccacattgtgaatctggcggcttttagtaactcatgtttgaaccccctgatttattcctttttaggagagactttccgagataaactgcgactgtacattgaacagaaaaccaatctgccggctctgaacagattctgccatgcagccctgaaggctgttattccagattctacggagcagtccgacgtccggttttcctctgccgtctag

SEQ ID NO: 188546 - DNA, 1128 bp, synthetic construct
  misc_feature 1..1128: note = Description of Artificial Sequence: Synthetic coding sequence
  source 1..1128: mol_type = other DNA
atggacgtgaccagccaggcccggggcgtgggcctggagatgtaccctggcaccgcacagccagcagcacctaatactacttctcctgaactcaatctatcgcatccattgctcggcacggctctcgccaacggaaccggtgagctctccgagcatcaacagtatgtgattggcctgtttctgtcctgcctgtataccatatttctgtttccgattggctttgtgggtaatatcctgatactagtcgtcaatattagtttccgcgagaagatgaccatccctgatctttacttcatcaatctcgcagtggcggatctcattctcgtggcggactctctgattgaagtgtttaacttgcacgagagatactacgatattgccgtgctgtgcactttcatgtccctgttcctccaggtgaatatgtatagtagcgtctttttcttaacttggatgtccttcgatagatacatcgccctggccagagctatgagatgtagcctgtttagaacgaaacaccacgccaggctctcctgtgggctgatctggatggcctcggtgtccgccacattagtcccatttactgcagtgcatttgcagcatacggatgaagcttgtttctgctttgccgatgtaagagaggtgcagtggttggaggttactcttggtttcatcgttccgtttgcaataattggcctttgctactctctgatcgttagggtcctcgtgcgtgcacaccggcaccggggcctacgtccaaggcggcagaaagccctgcgtatgatactcgctgtggtgttggtgttcttcgtgtgttggctccctgagaatgtgttcattagcgtgcatctgttacaacggactcaaccaggggccgccccttgcaagcagtcattcaggcacgcccaccccctaaccgggcatatcgtgaatctcgctgcattttcaaattcgtgtctcaatccactgatttactccttcctgggagagacttttagagataaactgaggctttacatcgagcagaagaccaacctccccgcactgaaccgtttttgtcacgctgccctgaaggcagtcatcccagactctacagagcagtctgatgttcgattttcatcggctgtgtag

SEQ ID NO: 188547 - DNA, 222 bp, synthetic construct
  misc_feature 1..222: note = Description of Artificial Sequence: Synthetic coding sequence
  source 1..222: mol_type = other DNA
atggacgtgaccagccaggcccggggcgtgggcctggagatgtaccccggaaccgcccaacctgcggcacctaacaccacctctccagagcttaatctgtcccatcccctgctgggtacggctctcgctaacgggaccggagagttaagcgagcaccaacaatacgtgatcggcttgttcttgagctgcctgtacaccattttcctgttcccaatcgggtag

SEQ ID NO: 188548 - DNA, 1227 bp, synthetic construct
  misc_feature 1..1227: note = Description of Artificial Sequence: Synthetic coding sequence
  source 1..1227: mol_type = other DNA
atggacgtgaccagccaggcccggggcgtgggcctggagatgtaccccggtaccgcacagcccgctgcaccaaacactacgagccctgagcttaacctatcccaccccctcctaggaaccgctctggcaaacggaaccggggaattgtctgaacatcagcagtacgtgattggactattcctgtcttgtctctacactatttttctatttcccattggtttcgtggggaatattttgattctggtggtgaatatcagtttcagggagaagatgaccataccagatctgtacttcataaatttggcagtagccgaccttatcctagttgccgactctttgatcgaagtgttcaacctgcacgaaagatattatgacatcgcagttctttgtacatttatgagcctgtttttgcaggtcaacatgtactctagtgtgttttttctgacatggatgtcttttgaccggtacatagcactcgctcgagccatgaggtgctccctgttccgaaccaagcatcacgccagattgagctgtggattgatctggatggcctctgtgagcgcaaccctggtgccatttactgccgtgcacctgcaacataccgatgaagcttgcttctgtttcgccgacgttcgagaagtgcaatggctcgaggtgaccctgggatttatagtgcctttcgccataatcggactatgttattccctaatcgtgcgggtcctggtacgggcccatcgacataggggacttcgtccacgacggcaaaaggccttaagaatgatcctcgcagtggtgttggtgttctttgtgtgctggctgcctgagaatgtgttcataagcgtgcacctgctgcagagaactcagcctggcgccgctccctgcaaacagagcttccggcacgcacatcccctgactcatggccatgttatgtctctgaattgtggccaaatgtggctgttggccccacgaggcctggctcgtgttacactggcctggagcccctggggatgcttaggtaacctgacaacaggtcacctggcgttgcttacacagaactgctacaatcctaaagcattagctccccagggccctaaagcatccggcgaccagccagtgacgcagctgctgccggccaacccagcatgtagatgtacttgcctgccactccaagagacttttttgacccctagcaccagaaaggcaactcggcgggggcactgtgggtag

SEQ ID NO: 188549 - DNA, 1068 bp, synthetic construct
  misc_feature 1..1068: note = Description of Artificial Sequence: Synthetic coding sequence
  source 1..1068: mol_type = other DNA
atggaggacctggaggagaccctgttcgaggagttcgagaactacagttacgacctggactattacagcttggaatctgatctggaggaaaaggtgcagcttggtgttgtccattgggtcagcctggtcctttattgtcttgccttcgtgttggggatccccggtaatgccatagttatctggtttaccggattcaaatggaagaagactgtcactacactgtggttcttgaacttagcaatcgccgattttatttttctgctgttccttccattgtatatttcatacgtggcgatgaactttcactggccatttggcatttggctgtgcaaggctaacagtttcacagctcaactgaatatgttcgcatcagtcttcttcctaacagtgatctccttagaccactatattcatctgatccatccggtgttgtcccataggcaccgaaccctgaaaaactcgcttatcgtaataatcttcatctggctgctggcttctctaatcggtggcccagctctgtactttagggacactgtcgaatttaacaatcacaccctctgttacaacaattttcagaaacatgatcctgacctcacactgattcggcaccatgtgctcacttgggtgaagtttattataggctacctttttcctctcctcaccatgtccatctgttatctgtgtctgatctttaaagtcaagaagcggtccattctgatttcatcccgacacttttggacaattttagtggtcgtggtagcattcgtcgtgtgctggaccccatatcatctattcagcatatgggaactcaccatccaccataattcttatagccaccatgtgatgcaggccggtatcccactgtccaccggccttgccttcctaaactcctgtttgaaccctatcctctacgtgttgatctcaaaaaagttccaggcccgcttccgatcctctgtggcagagatacttaagtataccttgtgggaggtctcctgttccggcacagtgtcagagcagttgcggaactcggaaacaaagaacctgtgcctgcttgaaacagcccagtag

SEQ ID NO: 188550 - DNA, 225 bp, synthetic construct
  misc_feature 1..225: note = Description of Artificial Sequence: Synthetic coding sequence
  source 1..225: mol_type = other DNA
atggaggacctggaggagaccctgttcgaggagttcgagaactactcatacgacctggattactattcgttggagagtgatttggaagaaaaggtgcagttgggagtggtacattgggtttccctggtgttatattgtcttgcgttcgtgctgggcatccccggcaacgcaatagtaatatggttcactggcttcaaatggaagaaaactgtgactactctctag

SEQ ID NO: 188551 - DNA, 1068 bp, synthetic construct
  misc_feature 1..1068: note = Description of Artificial Sequence: Synthetic coding sequence
  source 1..1068: mol_type = other DNA
atggaggacctggaggagaccctgttcgaggagttcgagaactactcttacgacctggactactattccctcgagtctgatctggaggagaaagtgcagctcggggtggtacactgggtttcactggtgctgtactgtctagctttcgtgcttgggattcctggtaacgccatagtgatctggttcaccggtttcaaatggaaaaagactgtgaccacgttatggtttttgaacttggccatcgcggatttcatcttcttgctgtttttgcctctgtatatttcatacgtggctatgaactttcactggcccttcggtatttggctgtgcaaggctaactctttcacagcccagctgaacatgttcgccagtgttttcttccttaccgtaattagtctcgatcattatattcatctcatccatcctgtgctgagccaccggcaccgcacgctcaagaattctctcatcgtgattatattcatatggctgctggctagcctgattggaggcccagccctctacttcagggatacagtagagttcaacaaccacaccctttgttacaataactttcagaagcacgaccccgatttaacattgattaggcaccacgttctgacctgggttaaatttataattgggtacctttttccacttttgactatgtcaatttgctatctgtgtcttatctttaaggttaagaaaagatcaattctcatcagctcacggcacttttggaccattttggtagtcgtcgtggctttcgtggtgtgttggaccccatatcacttgtttagcatatgggagctgaccattcatcataattcctacagccaccacgttatgcaggccggcattcccctcagcaccggcctcgctttcctcaatagctgtctgaacccgatcctgtatgtgctaattagtaaaaaattccaggctagattcaggtccagtgtggctgaaatactgaagtacaccttatgggaggtttcttgctctggcacagtcagtgagcaactgaggaacagtgaaacaaagaacctgtgtttgctcgagacagctcagtag

SEQ ID NO: 188552 - DNA, 249 bp, synthetic construct
  misc_feature 1..249: note = Description of Artificial Sequence: Synthetic coding sequence
  source 1..249: mol_type = other DNA
atggaggacctggaggagaccctgttcgaggagttcgagaactacagctacgatcttgattactattctctagaaagcgacttggaggaaaaagtgcagctgggagtcgtgcactgggtgtccttggtgctctactgtttggctttcgtgctgggtattccagggaacgctattgtcatttggttcactggctttaagtggaagaagacagtgactacgctgtggttcctgaatctggccatagcgtag

SEQ ID NO: 188553 - DNA, 684 bp, synthetic construct
  misc_feature 1..684: note = Description of Artificial Sequence: Synthetic coding sequence
  source 1..684: mol_type = other DNA
atggaggacctggaggagaccctgttcgaggagttcgagaactacagctatgacctggactactacagccttgagagcgatctcgaggagaaggtgcagctcggggtggtgcactgggtgtctttggtgctgtactgccttgctttcgtcctcggcatccctggtaatgccatcgtcatctggtttacaggatttaaatggaagaagaccgtgaccaccctgtggttcttaaacttggccatcgcggactttatcttccttttgtttctgcctctgtacatcagctacgtcgccatgaactttcactggcccttcggcatctggctttgcaaagccaacagctttaccgcccagctcaatatgttcgcatctgtttttttcctcaccgtgatcagtttggatcactacattcacctcatccacccagtgctgagccaccgtcatcggactctcaagaactccttgatcgtgatcatcttcatctggctgttagcgtccttgattggcggtcccgcactgtacttccgtgacaccgtcgaatttaacaaccacacactttgctacaataattttcagaagcacgacccagacctaaccttgattcggcatcatgttttgacgtgggtcaaattcatcatcgggtacttgttcccattgctgacaatgtccatttgctacctctag

SEQ ID NO: 188554 - DNA, 414 bp, synthetic construct
  misc_feature 1..414: note = Description of Artificial Sequence: Synthetic coding sequence
  source 1..414: mol_type = other DNA
atggaggacctggaggagaccctgttcgaggagttcgagaactacagttacgacttggactactacagcctcgaaagcgacctggaagagaaggtacagctgggggtggttcattgggtgtcactggtgttgtattgtcttgccttcgtgcttggcattcccgggaatgctattgtgatctggttcaccggtttcaaatggaaaaagacagtgacaactctgtggtttctgaatctggccatagccgatttcatctttttgcttttcctccccctgtacatcagctacgtggccatgaacttccactggccatttggtatctggctgtgtaaggcaaacagttttactgcccagctcaatatgtttgcgagcgtattcttcctaacggtgatttcattagatcattacatctag

SEQ ID NO: 188555 - DNA, 537 bp, synthetic construct
  misc_feature 1..537: note = Description of Artificial Sequence: Synthetic coding sequence
  source 1..537: mol_type = other DNA
atggaggacctggaggagaccctgttcgaggagttcgagaactactcctatgatctggactattactccttggagagcgacctggaagagaaagttcagttgggtgtggtccattgggtatcgcttgtgctgtactgcctggccttcgtgctcggcatcccgggcaatgcaattgtgatttggttcacaggcttcaagtggaagaaaaccgtcacaaccctatggttcctaaatctcgccattgccgattttatttttctgctgttcctgccactgtatatctcatacgtagccatgaattttcattggcccttcggtatatggctttgcaaggcgaactcctttacagcccagctgaatatgtttgcctccgtgttcttcctgacagtcatcagcctggaccactacattcatctgatccatccagtgctcagccaccggcaccgtactttaaagaatagtctgatcgtgattatatttatctggctattagcgtctctaattggcggaccggcattatactttcgggacacatag

SEQ ID NO: 188556 - DNA, 60 bp, synthetic construct
  misc_feature 1..60: note = Description of Artificial Sequence: Synthetic coding sequence
  source 1..60: mol_type = other DNA
atggaggacctggaggagaccctgttcgaggagttcgagaactactcatacgatctatag

SEQ ID NO: 188557 - DNA, 1527 bp, synthetic construct
  misc_feature 1..1527: note = Description of Artificial Sequence: Synthetic coding sequence
  source 1..1527: mol_type = other DNA
atgaccagcacctgcaccaacagcacccgggagagcaacagcagccatacatgtatgcccttgagcaaaatgcccatttctctggcacacgggattattaggagcactgtgctggtgatatttttggctgcatctttcgtaggaaatatcgtactagccctcgtcctgcagaggaagccccagctgttacaggtgacaaataggtttattttcaacctgctggtgactgacctcctgcagatttctttggtggccccctgggtggtcgcaacgagcgtgccactgttttggcccttaaactcacacttctgcacagctcttgtctctttaacacacttgttcgcctttgcaagcgtgaatacgatcgttgtggtcagtgtggacagatacctgtcaattatccaccctttaagttacccatctaagatgacccaacgccggggctatctgctgctgtacggaacgtggatcgtcgccattctgcagagcactccaccgctgtatggatgggggcaggctgcttttgatgagagaaacgctctgtgttcaatgatttggggggcatcaccatcatatacaatcctaagcgtggtcagctttattgttatacccctgattgtgatgatcgcatgttactcagtcgttttctgcgccgccagaaggcagcacgctttactgtataatgtgaaacgtcattcgctggaagttagggtaaaagattgcgtggagaacgaggatgaggagggggccgaaaaaaaggaggaatttcaagatgaatccgagttcaggagacagcacgaaggtgaagtgaaggcgaaagagggtaggatggaagcaaaggatgggagcctcaaagcaaaagaggggagtaccgggacgtcagaaagtagtgtagaagcccgggggtctgaggaagtgagagaaagcagcactgtggccagcgatggatcaatggagggaaaggaaggctcaacaaaagtggaagagaactcaatgaaagcagataaaggtagaaccgaggtgaatcagtgcagtatcgatctgggggaggacgacatggagttcggagaagatgacattaatttctctgaagacgacgtggaggcggtgaatatccctgagagtttgccccctagcagacgtaacagcaactcaaacccccctctacctaggtgttatcagtgtaaagcagctaaggtgatctttatcattattttctcatatgtattgagcctggggccttactgttttctggccgtgcttgccgtatgggtcgatgtagagacacaagtcccccagtgggtcatcactatcatcatatggttattcttcctgcagtgttgtattcacccctatgtatacggatatatgcacaaaacaatcaagaaggaaattcaggatatgctcaagaaatttttttgcaaggaaaagcctcctaaagaagactctcaccctgatctcccggggacagaagggggaacggaggggaaaattgtaccaagctatgactcagctactttcccttag

SEQ ID NO: 188558 - DNA, 2088 bp, synthetic construct
  misc_feature 1..2088: note = Description of Artificial Sequence: Synthetic coding sequence
  source 1..2088: mol_type = other DNA
atgaagatgaagagccaggccaccatgatctgctgcctggtgttcttcttaagtactgagtgcagccactacaggtccaagatccacctgaaggctggcgacaagttgcagagcccagaagggaaacccaaaaccggtcggatacaggagaagtgcgaagggccatgcatttcctcatccaattgctcacagccttgtgctaaggactttcacggagagatcgggtttacttgcaatcagaagaagtggcagaaatccgcagagacttgtacctccctctccgtggagaagctgtttaaagatagcacgggcgcttcccgtctcagcgtagccgccccatccattcctctgcacatcctcgattttcgggcgcccgagacaatagagtcagtcgcacaggggatcagaaaaaactgtccatttgattatgcttgtatcactgacatggtgaagtcatcagagactactagcggaaatatagctttcatcgttgaactgctgaaaaatatcagtactgatttgtctgacaatgtgacacgggaaaagatgaagagttacagcgaggtcgctaatcacatattagacaccgcggctatctccaattgggcttttattcctaataagaacgcctctagcgatctgctgcaaagcgtgaatctttttgcccgccagctccacatccacaataatagtgagaacatcgttaacgaattattcatccaaaccaagggttttcatatcaatcataacacgagcgaaaagagcctgaactttagcatgagcatgaacaacaccacagaagatatcctgggaatggtgcaaatcccaagacaggagttgcgtaagctctggcccaatgctagtcaggctatctcgattgcttttcccactctgggtgccatactgagggaggcacacttgcagaatgtctccctccccagacaagtgaacgggctcgtcctgtccgtggtcctcccagaacggttgcaggaaataattttgaccttcgagaaaatcaacaagacccgtaatgcccgagcacagtgtgtcggatggcattccaaaaaacggcggtgggatgagaaagcatgtcagatgatgctcgacattcggaatgaagtgaagtgtcggtgtaactacaccagtgtggtgatgtccttcagtatactgatgagctccaagtccatgaccgacaaagtgttggactacattacgtgcattggcctgagcgtttctatcctttctctggtgttgtgtctcatcatcgaggctacagtctggtctagggtcgtggtgaccgaaatatcctatatgcggcacgtctgtatagtcaacatagccgtatcactgctgactgctaacgtgtggtttatcattggaagtcattttaacatcaaagcacaagactataacatgtgcgtggctgtcacgtttttttcccatttcttttacctcagcctttttttctggatgctctttaaggctctgttgatcatttatgggattctggttatatttcgacggatgatgaagagcaggatgatggtaatcgggtttgccattggctacggatgcccacttattatcgctgtgacgaccgtggccataaccgagccagaaaaaggttatatgcggcctgaagcctgctggttgaactgggataacaccaaagcgctactcgcattcgccatccccgcctttgtaattgtggcagtcaatctgatcgtggttcttgttgtggcggtgaacacgcagaggccatccatcgggagttccaaatctcaggatgtagtgattatcatgcgaatttcgaaaaatgtggccatcctcaccccgcttctcggcctgacctggggttttggcatagccactctcatagaaggcacttcacttaccttccacatcatcttcgccctgctcaacgcgttccagggtttttttatccttctgttcggcacaatcatggatcacaagatccgagacgctctgaggatgagaatgagcagtctcaaaggaaagagcagggccgcagagaatgctagtttgggccctactaatgggagcaagctgatgaacaggcaaggatag

SEQ ID NO: 188559 - DNA, 2088 bp, synthetic construct
  misc_feature 1..2088: note = Description of Artificial Sequence: Synthetic coding sequence
  source 1..2088: mol_type = other DNA
atgaagatgaagagccaggccaccatgatctgctgcctggtgttcttccttagtacagaatgttcacattacagaagcaaaatacatcttaaggccggcgataagctccagtcacctgagggcaagccaaagactggtcgaatacaggaaaagtgcgaaggaccgtgcatctccagcagcaattgtagccagccatgtgctaaagactttcacggcgaaatcggattcacttgtaatcaaaagaagtggcagaaatcagcagagacttgcacctccctgtccgttgagaaactatttaaggactcgactggcgcttcacggttatcggtggcggctccttccatccccctgcacatcctggattttagagccccggagaccattgagtctgtagcacagggcattcgcaagaactgccccttcgactatgcttgcatcacagacatggtgaagagcagtgagacaacttctggcaatatcgccttcattgtcgaattgcttaaaaatatcagcacagacctcagcgacaatgttaccagggagaaaatgaaatcttattccgaggttgccaaccacatactggacactgctgccatttctaactgggccttcatacccaataagaatgccagcagtgaccttctgcagagcgtgaatttattcgccagacaactgcatatccacaataacagtgagaatatagtgaacgaactgtttattcaaacaaagggcttccacatcaatcacaatacctcagagaaatcactgaacttctcaatgtccatgaacaataccaccgaggatatcttaggcatggtccagattccaagacaggagcttcgtaaactgtggcctaacgcgtcccaagctatctcaattgcgtttccaacactgggtgcaatacttagggaggcacatctgcagaacgtaagtctgccccgccaggttaatgggctagtgctttctgtggtactgccagagagactgcaggaaataatcctgacctttgaaaagatcaataaaaccaggaatgcccgggcccagtgtgtgggatggcactctaagaagcgaaggtgggatgagaaggcctgccagatgatgcttgatattcgaaacgaggtaaagtgcagatgcaattacacgagcgtcgttatgagcttctcaatcctgatgtcctcaaagagcatgacagacaaggttctcgactatatcacatgtataggcctgagtgtgagcattctgagcctcgtgctctgtctcataatcgaagccacagtgtggagccgtgttgttgtgaccgagatcagctacatgcggcatgtttgtattgtgaacattgctgtctcactgctgaccgcgaatgtgtggtttataattgggagccatttcaatatcaaggcacaggattataacatgtgcgtcgcagtcacctttttctcacatttcttttacctgagcctgttcttctggatgctctttaaagcattgctcattatttatgggatcctcgttatcttcagacgaatgatgaaatcccgcatgatggtgatcgggttcgcaattggatacggctgtccgctcattatcgccgtgacaaccgttgccatcaccgagcccgagaaaggctacatgcggcccgaagcctgctggctgaattgggacaacacaaaagctctgctggcgttcgcaattcccgcattcgttatcgtcgccgtcaatttaatcgtggtgttagtggtagcggtgaacacacagcggcctagcatcggtagttctaaatctcaggacgtagtcattatcatgcggattagcaaaaatgttgcaattctcactcccctgctgggattgacgtggggcttcggaatcgcaacattgatcgaggggacctcactcaccttccacatcatttttgctctgttaaacgcgttccagggcttctttatcttgcttttcggtaccatcatggaccacaagatcagggacgccctaagaatgcggatgtcctcacttaagggaaagagcagggcagctgaaaacgcatcactgggccctacaaacggcagcaagttgatgaacaggcaaggatag

SEQ ID NO: 188560 - DNA, 2259 bp, synthetic construct
  misc_feature 1..2259: note = Description of Artificial Sequence: Synthetic coding sequence
  source 1..2259: mol_type = other DNA
atgtacaccggcccctgcaaggtgctgcacctgagcagcggcctgctgccaaacagcggtcgcttcggtatagtactgtccgatgaataccaagtagtgacatccctgtggtgccaactttacactacacatgctccacagcaggcctctggaatgctgctgctgaactacctcgtcatcccctctaaggctcaggtcaataaacccggctacattccgaatcttggcgagtgctctcattatcggtcaaagattcacctgaaagcaggagataagcttcagtcccccgaggggaagcccaagaccggtcgtatccaggagaagtgcgagggcccgtgcatatctagcagtaattgttctcagccatgcgccaaagacttccatggcgagatcggcttcacctgcaaccagaaaaagtggcagaagagtgctgagacctgtacctccctgagtgttgaaaaactgttcaaggatagcaccggagcctcgaggctgtctgtagctgcaccttccatcccccttcatatcctagatttccgcgcaccagagacaattgaatcggtagcacaagggataagaaaaaattgtcctttcgattacgcatgcatcacagacatggtcaagagctcggagaccactagtggcaatattgccttcattgtagagctcctaaagaacatctctactgatctgagcgacaatgttactcgtgagaagatgaagtcatacagcgaagttgcaaatcacattttggacactgccgccatatctaattgggcttttataccaaacaagaatgcctcgagtgaccttcttcagtcagtgaacctcttcgcacgacagttacacattcacaataactctgagaacatcgtcaacgaactgtttatccaaaccaagggattccatatcaatcacaatacatcggaaaaaagcctcaacttttccatgtctatgaataataccacagaagatattctcgggatggtccagattccaaggcaggagttgagaaagctgtggcctaatgcaagtcaggctatctcaatcgctttccctactctgggggccatcctgcgggaggcgcacctgcaaaacgtcagcttgccccggcaagtgaatgggctggtgctctcagttgtgttgcctgagagactccaagagatcatcctgacattcgaaaagattaacaagactagaaatgccagagctcagtgcgtcgggtggcacagcaagaaaaggagatgggatgaaaaggcctgtcaaatgatgctggacatccggaatgaggtgaaatgccgatgcaactacacatctgttgtgatgagcttcagtattttaatgagttctaaaagcatgacagataaagttcttgattatatcacctgcataggcctgtcagtctctattctttctttagttttgtgcttgataattgaggccacagtctggtcaagagtggttgtgacagagatttcgtacatgaggcacgtctgtattgtgaatattgcggtgtccctcctgacggcaaacgtctggtttattattggttcacattttaatattaaggcccaggactataacatgtgcgtggccgtgacattcttctcacactttttttaccttagcttgttcttttggatgctattcaaggctctactgattatctatggcatcttagtgatattcagacggatgatgaagtctcgcatgatggtgattggattcgccattggctacgggtgtcctcttataatagctgtcaccaccgtcgctattacagagcctgaaaaaggctacatgcggccagaagcttgttggctgaactgggataacacaaaggcccttttggctttcgccattccagctttcgtgattgtagctgtgaacctcatcgttgtcctggtggtggcagtcaatactcaacggccgagcattgggtcaagcaagtcacaagatgtcgtgatcatcatgcgcatctccaagaatgttgcaatccttaccccactgctggggttaacatggggattcggcatagcaaccctcattgagggtacaagtctgaccttccacattatctttgctttgctcaacgcctttcaaggcttctttatcttactatttggtaccatcatggatcataaaatcagagacgccctaaggatgcgtatgtcgtccctcaagggaaagagtcgagctgcagagaacgcttccctcgggccaacaaacggtagtaaattgatgaaccggcagggctag

SEQ ID NO: 188561 - DNA, 1005 bp, synthetic construct
  misc_feature 1..1005: note = Description of Artificial Sequence: Synthetic coding sequence
  source 1..1005: mol_type = other DNA
atgaacgaggacctgaaggtgaacctgagcggcctgccccgggactatctggatgcggccgccgccgagaacatctctgcggcagtgtcatcccgcgtgcctgctgttgaacccgagccggaacttgtggtcaacccttgggatatcgtgctctgcacttccggcaccttgatcagttgcgaaaacgcaatagtggtactgatcatcttccacaacccctcccttagagcccccatgttcctgcttattggcagcctcgcgcttgccgatctgttggcaggtatagggttaattacgaatttcgtctttgcctatttgctgcaatctgaggcaacaaaactagtcaccattgggttaatagtcgcgagtttcagcgcctccgtctgtagcctccttgcaatcacggtcgaccggtacctctccctctattacgccctaacatatcattccgagaggactgtcacattcacttacgtgatgctggtaatgctttgggggacaagcatatgcctcgggttgctgcccgtgatgggttggaactgcctgcgagacgagtctacatgctctgtcgtgaggccactgacaaagaataacgctgccatacttagtgtcagttttctgtttatgtttgcgcttatgcttcaactgtatatacaaatttgcaaaattgtgatgcgacatgcacaccaaatcgcccttcaacaccacttccttgccacatcccattatgttacaacccgaaagggtgtcagtactctggcgattatactggggacctttgccgcgtgctggatgcctttcacactgtattctctcattgcagactatacatacccatccatttacacttatgccacgctgctgcctgccacttacaactctatcattaatccagtaatctacgccttcaggaaccaggagatacagaaggctctctgcctgatatgttgcggatgtatcccttcctctctcgctcagagggcccgcagcccctccgatgtctag

SEQ ID NO: 188562 - DNA, 1005 bp, synthetic construct
  misc_feature 1..1005: note = Description of Artificial Sequence: Synthetic coding sequence
  source 1..1005: mol_type = other DNA
atgaacgaggacctgaaggtgaacctgagcggcctgccccgggactacctggacgcggcagctgccgagaacatctccgccgctgtctcttctagggtgcccgccgttgagcccgaaccagagctggtagtgaacccctgggatattgtgttgtgtaccagtgggactctcatctcatgtgagaacgccattgttgtgctcattatctttcataatccatccctcagggcaccaatgtttttgctgatcggctcactcgcattggccgacttgctagcaggtatcggacttatcaccaacttcgtttttgcgtacttgctgcagtcagaagctactaaactggtgacaatcggactcatcgtcgcgtcattttctgcttctgtatgttccctgcttgcaatcacagtggaccgctatctgtccctgtactacgccttaacataccactcagaacgcaccgtgaccttcacttacgtcatgcttgtaatgctgtggggcacctctatctgtcttggtcttctaccagtgatgggatggaactgcctcagagacgaatccacttgttccgtggttagacccctgaccaagaacaatgcagctatcctctctgtctccttcctgttcatgttcgccctgatgctgcagttgtatatccagatctgtaagatagtgatgcgccacgcacatcaaatcgcactgcagcatcatttcctggcgacatcacattacgttacaacccgaaaaggagtctccaccctagccatcattttggggacatttgcagcttgttggatgccgttcactttgtattctctgatagccgactacacatacccctctatttatacatatgccacattgctgccagccacgtacaattccatcatcaacccagttatttatgccttcaggaatcaagaaattcagaaggccctttgtctcatctgttgtggctgcatcccgtcatcacttgctcagcgagccaggagcccttcagacgtgtag

SEQ ID NO: 188563 - DNA, 3840 bp, synthetic construct
  misc_feature 1..3840: note = Description of Artificial Sequence: Synthetic coding sequence
  source 1..3840: mol_type = other DNA
atgcggggccacggcaaccacagccggctgaagagccggtgcgcctctttgggcaacgtgcaccaccatcaggcccagatggcccatggcgcgcactgtcgcggtgggcgcactccccagtcacccgactctcgggggcctacagctgggggacacaccagaggccgatggacttatagacctatcgaagccttaattaatgtgagtttccctggagctaagggtggtcggacggccgagggcgagccatcttgggcatgggtcttcagaagcggatatttgcagaggcaggcgctgccgggcctacctgtcagtactagagtggctgcatgttggtggcaacatcaccccgggagagacagtggctttctcggcccaggtttcatcgacttgctcagagaggagccttcaggccgtgccgacggcaaagcagcagcccaaaagacaggcagactttacctttttccaactttcctcgggaacaaactcccagaggccgccgattcttttggcgagatcgcgtcgggcaactcagtgattttcacttctgtattgcagtcaagccatcctcccgggactcctccgccttccgcaaggaagccctcgccgggcgcggcaatgctggtgtgcgaggagaccctcgaactcggggcccagggctgttggggcagcacttctccccgcggtcaggcggtgagcctggtggggggtccaacagcaggcggcagtagattagggggggctgggtgtaccatgggccttctaatggcattgcaggcaaggaggcctagagatgggacctgggctgacccacgcagatgcagcagagccgttgagggatccggtctgacacgggcagcgctggtgagccccggcccctctggtgttgaggaagatacgaggcgagaagggtgtgttttagtcggatcatggaggtcatctacgcataggtctcgggtgctcataattaacaccccatctggtcgaactccctggagtcaaggtagcctcggctctacgggccgctacaatcagacaagagctccgggttcacagcaacaggggctgtgcagcgacgcagctcttcacgaagactttgtcccggagcctacaccggccttcttccagtacccaccgcaggccttttccaagaccaaagttcgcgatctgggacgcggcgggctgtacgcattctcgaaggaggaaaaggtatccgaggcccagcgcgtagaggcatacgaaactcatggtttaggactttcaaccgggaggcagaatcccgtgccatccccttgtaaaccggggtgcgtctgccagggactggcgctggacgctgaggcctggcccaggcatcccgggcgtcgtccctgtgccgctaaggaggcttgtttggggccacctggttgctctggcgagctgtcgctgcccgaggaagaaggcattgcacctggggctgcaactgccgcacctgcctgggttcctcacggacgagtatcgcgcttcctgaccgtcaaactgtttacgtatgtgactatgtatcagtgcaagcaggagcgaatcctgagactttgcatctctggagagagtgggcgctatgtccgccgttcccgattccgcaatttcgccgccctgatggtgagtaccggggtccctggcgtattacagcttggggcacgacccctgaggggaggcgggcacccctacggcgattctcaggcaggcaaagtggtggagtggcgggctggagaccgggcatccgggctgtccgccggagaacgtcgatttctcagtcaatccgagctccagacatggcctcggactccccactgcgtcggcaaaaaggtgcctcaaccggttggtgcagccgatcttgcacctgacactagtctctgccggaaagagggaagctccgcttctcgaagctgtcggcctggcccgggacacctgactcgccgcgaggaggattcatttcgccagctggccttcccgaggttcgaagaggtgactttccctccacttactgcagcagagagggcaccgagcgtccatggaggacactctctggctagccaaggactggtgttagcagggaggaccaggtctgtcgctagcggcggaaagcaagaactctcgggacccctggccgcttgcatcccgacacaggatcttaagaccgtgctgtctctacctcgctatcccggggaatttctacacccagtggtgtacgcctgtaccgctgtcatgttgctgtgcctcctggcttcttttgtcacgtacattgtgcatcagagcgcaatacggatcagccggaagggccgtcacacgctgctaaacttctgttttcacgcagccctgacctttacagtgttcgccggcggaataaacagaactaagtaccccatactctgccaagcggtgggtattgtgcttcattacagcacactgagcaccatgttgtggattggcgttactgccaggaatatatacaagcaagtgacaaagaaggcccctttgtgcttagataccgatcagcccccctatccaagacagcctctgttgcgtttctatctggtttccggtggtgtgccattcatcatctgtggagtcactgcggctacaaatattcgaaactatggtactgaggacgaagacacagcctgctggatggcgtgggaaccctctcttggagccttctacggccctgctgccatcatcaccctcgtcacctgtgtatacttccttggcacgtatgttcagcttcggcgccatccaggccgccggtacgaactgcggacccagcctgaagaacagcgtcggctggctactccggagggcggacgaggaatcagaccgggtacgcctccagcccacgatgccccgggagcatcagtccttcaaaacgaacacagcttccaagcccaactgcgcgctgcagccttcaccctattcctatttacagccacctgggcatttggcgccttggccgttagccaaggccactttcttgatatggtatttagctgtctttatggggcgttctgcgttacactgggtttgttcgtgcttattcatcattgcgcaaaacgtgaggatgtgtggcagtgttggtgggcatgctgtccgccccgcaaggatgctcatcctgcactcgacgccaatggagccgccctcggtcgagctgcttgtcttcactcacctggcctggggcagccaagaggtttcgcccacccaccaggcccatgtaaaatgacaaacctgcaggcggctcaggggcacgcctcctgtttgagtccagccacaccctgttgcgcaaagatgcactgcgaacctctcacagctgacgaagctcacgtccacctgcaggaggagggggcattcggccacgacccccatctccacgggtgccttcagggtcgcactaagccgccatacttcagccgacatccagccgaagaaccggagtacgcttatcatatcccctcttccctggatggttcacccagaagcagtcgcacagacagtcctccatcaagtctggacggcccagcagggactcacactctggcatgttgcacacagggagacccattcccgatggttacccaacctgaggggtcggatggatccccagctttgtacagctgccccacccagcctggccgcgaagctgcactgggacctggccacctggaaatgcttcgcaggacccagtccctgccctttggtggccctagccagaacgggctgccaaagggcaaactgctagaggggctcccattcgggactgacggcactggcaatattaggaccggcccttggaagaatgagactacagtatag

SEQ ID NO: 188564 - DNA, 1395 bp, synthetic construct
  misc_feature 1..1395: note = Description of Artificial Sequence: Synthetic coding sequence
  source 1..1395: mol_type = other DNA
atgctgtggatcggcgtgaccgcccggaacatctacaagcaggtgactaaaaaggccccactgtgcttagacaccgatcagcctccatatccgcggcagccactcttgtctcggttttaccttgtatcggggggcgtgccgttcatcatctgcggcgtgaccgcggccaccaacatccgaaattacggcaccgaagatgaggataccgcatattgctggatggcttgggagccatccctcggcgcattctacggaccggccgcgatcattacgctcgttacgtgcgtctatttcctgggtacctacgtacagctgagacgccaccctggaaggaggtacgaattgaggactcagcctgaagagcagagacggttggccactcctgagggtgggaggggcattaggcctggaaccccacctgctcacgatgctccaggagcatccgtgttgcagaatgagcactcattccaggcacagctgcgtgccgctgcgttcaccttattcctgttcacagcaacctgggctttcggtgccttagctgtcagccaggggcactttctcgatatggtattctcttgcctttatggagcattctgcgtgacgttagggctttttgtgcttatacaccattgtgcaaaacgcgaagatgtctggcaatgttggtgggcgtgctgcccacctcgtaaggatgcccaccccgcacttgacgccaatggtgctgcactggggagagctgcgtgccttcactcaccagggttaggtcagcctcgcgggttcgctcatcccccggggccttgtaagatgaccaacctgcaagctgcccaggggcacgcatcctgtttgtcacccgcgactccatgttgcgctaaaatgcactgtgaacccctgactgcagatgaagcccatgtgcatctacaagaagagggcgcattcggacatgatccccatttacatggctgtctacagggaaggaccaaacctccctacttcagtcgccaccctgctgaggaaccagaatacgcatatcacataccctcatccctggatgggagtccccggtcttcccgcacagattctccaccttcatccctcgatggccccgccggcacacacactctcgcttgctgtacacagggagaccccttccctatggtaacccagcctgagggatcggacggcagccctgcactgtatagctgcccgacccaaccaggacgcgaagctgcactggggcctggtcatctggaaatgttgagacgaacacagtcactgccctttggtggtcccagccagaatggactgccgaaaggcaagctgctggagggcctgccttttggcactgatggtacaggaaacataagaaccggaccttggaaaaatgagacaacggtgtag

SEQ ID NO: 188565 - DNA, 1683 bp, synthetic construct
  misc_feature 1..1683: note = Description of Artificial Sequence: Synthetic coding sequence
  source 1..1683: mol_type = other DNA
atggacctgaagaccgtgctgagcctgccccggtaccccggcgagttcctgcacccggttgtctatgcgtgcactgcggtaatgctgctctgcctgttggcttctttcgtgacctatatcgtgcaccaatccgccatcagaatcagcagaaaggggagacacacactcctcaatttctgctttcatgccgctctcacattcactgtgtttgccggaggtatcaacagaaccaagtacccaatcctctgtcaggccgtgggcatcgttctgcattactctactctgtccactatgctgtggattggagtgaccgccaggaacatttataagcaggtcacgaaaaaagcacctctttgcctggataccgatcagcctccatatccgcgtcagccacttctgcgcttttacttggtgagtggcggagtgccttttattatctgtggcgtgacagcagccacaaacatccgaaactatggaacagaagatgaggacacggcctactgctggatggcctgggagcccagcctgggggcattttatggccccgctgcaatcatcactctcgtcacctgcgtctactttttggggacctatgttcagctgcgaaggcacccaggacgccggtacgagctcagaactcagcctgaagagcagcgtaggcttgccacgccagaaggcggtagaggaatccggcccggaacgcctcccgcccacgacgctcctggtgccagcgttttgcagaacgagcactcgtttcaggcccaattgcgcgccgcggcattcaccctgtttctgtttacagcaacttgggcgttcggcgctcttgccgtgtcccaaggccacttcctggatatggtttttagttgcctgtacggcgccttctgtgttacactgggcctgttcgtgcttatccaccattgcgctaagagagaggatgtgtggcagtgctggtgggcctgttgcccaccgagaaaagatgcccatcccgctctcgacgcgaacggggctgctttaggtagagctgcatgtctgcatagccccggcttgggccagcctcgcggtttcgctcatccgccgggaccatgcaagatgactaacttgcaggcagcccagggccacgcaagttgtctgtctcctgcaactccctgctgtgcaaaaatgcactgtgaacctctcaccgctgatgaagcacacgtgcatcttcaggaggaaggcgcttttggtcatgacccccatttgcacggctgtctgcaaggaaggaccaagcccccctacttcagcagacaccccgctgaagagccagaatatgcttatcacattccatcatcactggatgggtctcctcgtagttctcgcacagatagcccaccgtcctccttggatggccctgcgggcacacacacacttgcctgctgtacccagggcgatcccttcccaatggtgactcagccagaaggctctgacggcagtccggcactctatagttgccctacccagccagggcgcgaggcggctcttggcccgggacacctggaaatgctgcggcgcacccaatctctgccctttggtggcccctcccagaacggcctgccaaagggcaagctcctggaagggctgccttttggaaccgacgggacgggcaatatacgtacaggcccttggaagaacgaaactaccgtctag

SEQ ID NO: 188566 - DNA, 2562 bp, synthetic construct
  misc_feature 1..2562: note = Description of Artificial Sequence: Synthetic coding sequence
  source 1..2562: mol_type = other DNA
atgcggggccacggcaaccacagccggctgaagagccggtgcgccagtctggggaatgtacatcaccatcaggcgcagatggcccatggcgcgcactgcagagggggaagaaccccccaatcccccgatagccggggccctactgctgggggacacaccaggggcaggtggacatatcgccccatcgaggcactgataaatgtcagtttccccggggcaaaaggcggtcggacagcagagggggaaccgtcctgggcttgggtgttccggtcaggctacttgcagaggcaggcgcttcctgggctgcccgtctctactcgagtggccgcctgttggtggcagcatcaccccggtagggattcagggttccttggccctggctttatagatctgctgcgagaagaacccagtggaagggcagatgggaaggccgccgcccagaagaccgggcggttgtacctctttcctacatttttaggtaataaattacccgaagcagctgattcattcggcgaaatcgcttcaggtaactcagtcattttcacctccgtgctgcaaagctcacacccaccagggactccccccccatctgccaggaaaccttccccgggcgcagcaatgttggtctgtgaggaaaccctcgagctcggtgcacagggatgctgggggtctaccagtccaaggggccaagcggtttcattggtcggcggacccaccgctggtggttcacgactgggtggcgccgggtgtacaatgggcctgctcatggctctccaggcacgccgtccccgcgacggtacctgggccgatccgcgtagatgttctcgggccgtcgagggctcgggtcttacgagagccgccctggtgagccccggtcctagtggggtggaagaggacacaaggcgcgagggctgcgtccttgtggggagttggcgctcaagcacacacagatccagagtgctaattatcaatacgccgtccgggaggaccccatggtctcaaggaagcttaggaagcactggaagatacaatcagacaagggccccaggcagtcaacaacaggggttgtgcagtgatgctgccctacacgaggacttcgttcccgagcctacaccagctttcttccaatatcccccgcaagcattcagtaaaactaaggtaagagaccttggcaggggggggctgtacgccttctccaaagaggagaaagtgtctgaggctcagcgtgtcgaggcctatgagacgcatggcctgggactgtctaccggccggcagaaccccgtcccatcaccttgcaaacctggctgtgtgtgtcagggcctggcgcttgatgcagaagcgtggccaagacacccagggaggagaccgtgcgccgctaaggaggcatgcctaggtcctcctggatgcagtggggagctatcattaccagaagaagagggcatagcccctggagccgccaccgctgctcccgcatgggtgccgcacggccgagtctccagattccttaccgtgaagctgttcacctatgtcaccatgtatcagtgcaaacaggaaaggatcctgcggctgtgtattagtggcgagtccggtcgctatgttcgcaggagtaggtttagaaattttgctgccctaatggtgtccactggcgtgccaggagtgttacagctgggagcgcgccccctgaggggcggcgggcacccttacggcgattcccaggctggaaaagtcgtggagtggagggcgggcgatcgcgcctcgggtctttccgccggagaaaggagattcctatctcaaagcgaattacagacttggcccagaaccccccattgtgtgggcaaaaaagttccacaaccagtgggtgctgctgatctcgcacctgatacgtcactgtgtcgcaaggaggggagcagtgcatctcgctcatgtcgccctggacctggccatttaacccgccgcgaagaagactctttccggcagttggctttcccccgatttgaggaagtcactttcccaccactcaccgccgcagaacgcgctccatctgttcacggtggccactcactggcttcgcaaggcctggtgttggccggtcggactaggagcgtagcctctggcggaaagcaagaactgagcggacccctggcagcctgcattcccacacaagacctgaagaccgtgctttcactgccccggtaccccggagagtttctgcacccggtagtttacgcctgtacagctgttatgttgctttgcctgctcgcgtcattcgttacatatatagttcaccaatccgccattcgaatctccaggaaaggcaggcatacactgctcaatttctgttttcacgcagcggaacaccccggcgtgacccctcttcgtacgtcacctcctctgccttggtggaccccaattcaggtcggcattgtactgcactactctactttatccaccatgctgtggatcggcgtcactgcgcgtaatatatacaaacaggtgacaaagaaagctccactgtgcctagacaccgaccagcccccctatcctcgccagccactcttatag

SEQ ID NO: 188567 - DNA, 3366 bp, synthetic construct
  misc_feature 1..3366: note = Description of Artificial Sequence: Synthetic coding sequence
  source 1..3366: mol_type = other DNA
atgggcgccggcggccggcggatgcggggcgcccccgcccggctgctgctgcccctattgccttggctgctcctgttgctggcccctgaggcgaggggcgccccaggttgtcccctgtccatcagaagctgtaagtgctctggcgagcgccctaaaggcctgtccggaggtgtaccaggtccagcgaggaggagggtggtgtgctctggcggggacttaccggaacccccggagcccgggttactccccaacgggaccgtgacactgctcctctcaaataacaaaattacaggattgcgtaatggatcgtttctgggtctgtcactgctcgaaaaactggatctgcggaataatatcatctctactgtgcaaccaggtgcattcttaggactaggtgaacttaaaagactcgaccttagcaataataggatcggctgcctgacatccgaaacttttcaaggcctgccccggttgctgcgtctcaatatttctgggaacattttctcgtccctacagcctggggtgtttgatgaactgcccgccctgaaagttgtggatctggggaccgaattcctgacatgtgattgtcatctgagatggctgctaccgtgggctcagaaccgctccctccagctgtcggagcatacactgtgcgcttaccccagcgccttgcacgctcaggcgcttggctctctacaagaggcacagctatgttgcgaaggcgcactggagttacatacgcatcatttaatccctagtctccggcaggttgtcttccagggggaccgactgcccttccagtgtagtgcaagctaccttggtaacgatacacgtattcggtggtatcacaaccgcgctcccgtggagggtgacgaacaggctgggatcctgctggctgagtctttgatccacgactgtacattcatcacttcagagctgaccctatcacatatcggcgtttgggcgagtggcgagtgggagtgtaccgtatcgatggcacagggcaatgcatctaagaaagtcgaaatagtcgtcctggagacatccgcttcctattgcccagcagagcgagtcgcaaataatcgcggggactttcggtggcctaggacgttggcaggaataacagcctatcagtcatgcctccagtatccttttacatccgtacctctaggcgggggagcaccgggtactcgagcctcccggcggtgcgatagggccggccgctgggagccgggggattactcacactgcctttacacgaatgacatcacgcgggttctctacacgtttgtgctgatgcctatcaacgcttcgaatgcacttacactggctcatcagctgagagtgtataccgctgaagcggcctctttcagtgatatgatggacgtagtctacgttgcgcagatgatccagaaatttctcggctatgtcgatcagataaaggagctcgtcgaggtgatggttgacatggcgtcaaacctgatgctggtggatgaacatctgctttggcttgcccagcgcgaagacaaggcttgctccagaatcgtgggcgctctcgagcggatcggcggcgccgcgctttcccctcatgcccaacacatctccgtggagctgtccgcattcccaagggaagtgggcggcgctggagcaggtctgcatcctgtggtatatccttgtacagctctgctgcttctctgcctctttgcgacaatcataacctacatcctgaaccatagcagcattagggtgtcacgcaagggctggcatatgctgctgaatctgtgtttccacattgctatgaccagtgccgtcttcgccggtggaataaccttgaccaactaccagatggtgtgccaagcagtgggtatcaccctgcactatagcagtctgagcactctcctttggatgggggtgaaagcgagggtcttacacaaggaattgacctggcgagctcctcctccacaggaaggagacccagctctgccaacgccatctcccatgctgcgcttctacctcatcgcaggcggcatccctctgatcatctgcggtatcaccgccgctgtgaacatacataattacagagaccacagcccctactgctggctggtatggagaccatcactcggcgccttctacataccagtcgcactgatcctgctcatcacctggatttattttttgtgcgctgggcttagactgcgaggacccctggcccaaaatccgaaggctgggaacagcagggcgagcctggaagcgggtgaggagcttaggggtagcacaaggctgaggggcagcggcccactcctgtccgactcagggtccttattagccacaggtagcgcgagagtgggtacacctggcccgcctgaagatggagatagcctatatagcccaggggtccagctgggagcactggtcaccacccatttcttgtacctggctatgtgggcctgcggagccttagctgtgtcacagaggtggctgccaagggtggtgtgctcctgcctgtacggagtggcagcttctgcattgggactgttcgtgttcacccaccactgcgctcgcaggagggatgtcagggcctcttggcgcgcatgttgcccccctgcatcacctgctgcacctcacgctccgcccagggcactccccgctgcggctgaggacggttcgcccgtcttcggggagggtccccctagccttaaatccagcccttcgggatcctccggccaccccttagcattggggccttgtaaactaaccaacttgcagttggctcagtctcaggtgtgtgaggcaggggcagcggcagggggcgagggagagcccgagcctgccggaactcgaggcaacctagcccacagacacccgaacaacgtgcatcatggtcgaagagcgcacaagtcacgggctaaaggccatcgcgctggcgaggcatgcggaaaaaaccgactgaaagcattgcgcggaggcgctgccggagctctggaactgttgtcttccgagtctggatcactccacaatagtccaaccgatagctatctgggctctagcagaaactctccaggggcgggactccagcttgaaggcgaacctatgctgacacctagcgagggttcggatacatccgctgcacccctgagcgaagccggcagggcaggccaacgacgatctgcaagccgagactcactgaagggaggaggcgctttggaaaaagagtcacatcggcgctcatatccactgaatgccgcttctctgaacggagctcccaagggcggtaaatacgacgatgtgacactgatgggggccgaagttgcttcaggaggctgcatgaaaaccggtttgtggaagtcagaaaccaccgtgtag

SEQ ID NO: 188568 - DNA, 4017 bp, synthetic construct
  misc_feature 1..4017: note = Description of Artificial Sequence: Synthetic coding sequence
  source 1..4017: mol_type = other DNA
atgggcgccggcggccggcggatgcggggcgcccccgcccggctgcttctccctcttctgccttggctgctacttctgctagctccagaagcacggggcgcccccggctgtcctctgtctatccgctcatgcaagtgtagcggcgaaagacctaaagggctgagcggaggcgtacctggacccgcccggcggagggtggtttgcagtggtggtgatttacctgaaccccccgaaccaggactgcttcccaacgggaccgtgacactcctgttgtccaacaataaaatcaccgggcttcgtaacggcagcttcctcggcctctccctcctggagaaactggatctacggaataacattatctcaactgttcagcctggagccttcctggggctcggtgagttgaagcgcttagatctgtcgaataatagaattggttgcctgaccagcgagacttttcaggggcttccccggctccttaggttaaacatatcggggaacatttttagctccctgcagcccggcgtgtttgatgaactcccggccctgaaagtggtggatttagggactgaattcctgacttgcgattgccatctccggtggctgctgccttgggcccaaaacagatccctacagctcagcgagcatactctgtgtgcatatccaagtgcactgcacgcccaggcactaggttctttacaagaggctcagctctgttgtgaaggggcactagaactacacacacaccacctcattccttccctgcgccaggtggttttccagggggatcgcctccccttccagtgttctgccagctatctgggaaatgatacacgcattaggtggtatcacaaccgcgctcccgttgaaggggacgagcaggcgggcatcttactggctgagtctcttattcacgactgcacgtttatcaccagcgaactgactcttagccatattggggtttgggccagtggcgaatgggagtgcacggttagtatggctcaggggaatgctagcaagaaggttgaaatcgtcgtgctcgagacgtctgcttcttattgccccgcggaacgagtggccaacaaccggggagattttcggtggccccggacactcgctggaattactgcatatcagagttgcctacagtacccatttacctcagtccccctgggaggaggcgcgcccggaacacgcgcatctcgccggtgcgatcgtgcgggccgctgggagccgggtgactacagccactgtctctatacaaatgacattacaagagtgctctatacttttgtactgatgccgattaacgcctcaaatgcgcttacactcgctcatcagctgcgcgtgtacactgctgaggcggccagcttttctgacatgatggacgtggtctacgtggcacagatgatccagaagtttttggggtatgtcgaccagattaaagagctagtcgaggtgatggtggacatggcgagtaatctgatgttagtggatgagcacctgctgtggctggctcagagagaggataaagcctgcagcaggatcgtgggagcactggaacggatcgggggggccgccctctccccccatgcccaacacatatctgtcaatgccagaaacgtggcactcgaggcatatttaattaagccccatagctatgtgggactcacctgtaccgcttttcagagacgcgaggggggtgtgccaggcacacggccaggcagccccggtcagaacccacccccagagcccgaaccacccgcagatcagcagctgcgattccgttgcaccactggtcgcccaaacgtgtctctatccagctttcacatcaaaaacagtgtggcccttgcctctatccaactgcccccctcgctgttttcctcgctgccagcggcattggcccctccagtgccaccagactgtactttgcagctgttggtgtttaggaatggacgcctttttcattctcacagcaacacttcaagaccgggagccgcggggccaggtaagcgaagaggggtcgctacccctgtgattttcgcgggtacgagcggatgcggggtaggcaatcttaccgaaccggtggctgtgtctctacgccactgggctgagggtgctgagccggtcgccgcgtggtggtctcaggaaggccctggcgaggcaggcggctggaccagcgagggatgtcagctccgcagctcccagccaaacgttagtgccctgcactgtcagcatctggggaacgtcgcagtcctgatggaactttcagcgtttccgcgggaagtggggggagccggagccggactgcatcccgtagtatatccatgtaccgcactgttgttgctctgcctgttcgccaccattattacttacattctgaaccattctagtatcagggttagccggaaggggtggcatatgctgctgaatctctgttttcacattgccatgacctccgccgtgttcgcaggcggcattactttaacaaactaccaaatggtatgccaggcagttggaattacactccactattcttcccttagcacactgctgtggatgggcgttaaggcgagagttctgcataaagaactcacctggagggccccccccccacaggagggggaccctgctctgcccaccccatccccaatgttgcggttttacttaattgctgggggtatacctcttattatttgcggcatcaccgctgccgtcaatattcacaattatcgtgatcacagcccctactgctggctggtgtggaggccgtcactcggcgcattctacattccggtggcattgatattgttaatcacatggatctactttctttgcgccggactgaggttgaggggcccgcttgcacaaaacccaaaggcaggcaacagccgcgccagcctggaggctggtgaggaactgcgtggctcaacacgtctccgcggcagcgggcccctgcttagtgatagcggcagcttgctggcaaccggctcagcccgcgtggggacccccgggccccccgaagatggcgactccctgtatagtcctggggtgcagctgggggccctggttactacccattttctgtacctagccatgtgggcatgtggcgcccttgcggtaagccagcggtggttaccccgtgtggtgtgcagctgcctttacggcgtcgctgctagcgctttgggactctttgttttcacccatcactgtgccagacggcgagatgtcagagcctcgtggcgggcctgctgtccaccggcatctcccgctgccccgcacgcgccacccagagcacttcctgccgctgccgaggatgggtcgcccgtgtttggggagggtcccccatctcttaagtcatccccatctgggtctagtggacacccactcgctctgggtccgtgcaaactcactaatctgcagctggcccagtctcaggtatgcgaagccggggccgcagctgggggtgagggggaaccagagcctgcgggtacccggggaaacctggcacaccgccacccgaacaacgtacatcacggcaggagagcacacaagtcaagagcaaagggtcaccgggccggcgaagcttgtggtaagaaccgcctgaaggctttaaggggtggcgcagctggcgccctcgagctgctaagttcagagtccggctctctgcacaattcacccacagattcctaccttgggtcatcaagaaactctccaggcgccggcctccagttggagggcgagcctatgctaacccccagcgagggatccgatacttctgctgccccactctcggaggctggtcgagctggccaacgtaggtccgccagccgggattctctgaagggcggcggcgcactcgagaaggaaagtcatcgcaggtcctatcccctcaacgccgcctcccttaacggtgctccaaaaggaggaaagtatgatgatgtgaccctgatgggcgccgaggtggcctcaggaggatgcatgaaaaccgggctgtggaagtccgagacaactgtctag

SEQ ID NO: 188569 - DNA, 3771 bp, synthetic construct
  misc_feature 1..3771: note = Description of Artificial Sequence: Synthetic coding sequence
  source 1..3771: mol_type = other DNA
atgcggggcgcccccgcccggctgctgctgcccctgctgccctggttactcctcttactcgcacctgaagcacgtggcgcccccggttgtccactctcgatccgctcctgcaagtgttctggggagcgtcccaaaggcttatccggaggtgtcccagggcccgccaggagacgggttgtatgcagcggcggcgacttgccagaacctcccgaacctggtcttctgccaaatggcaccgtcaccttgttgctctctaacaacaaaattaccggtttacggaacggctctttcctcgggctgtcccttttggagaagctagacctgcgtaacaacatcatctctaccgtgcagcccggcgccttcctgggcttgggcgagttaaaaagacttgacctctctaataacaggataggttgtttgacaagcgagactttccaaggacttccacgcctgctgagactgaacataagtggtaatattttttcttctctgcagcctggcgtgtttgacgagctgcccgccctcaaagtggtggacctgggcaccgagttccttacctgtgactgccatctgcgatggttactgccctgggcccaaaataggtcactgcagctgtcagaacacaccctgtgtgcctacccgagcgcactgcatgctcaggccctaggaagcctgcaggaagcccaactatgctgcgaaggcgcacttgaactgcacacccatcacctgataccaagcctcagacaggtcgtcttccagggagatagattaccttttcagtgcagtgccagctacttggggaatgacactaggattcgttggtaccataatcgggctccagttgagggtgatgagcaagccggtattctgcttgccgaatctttgatccacgactgcaccttcattacctcagagctgacgctctctcacataggggtgtgggcttccggagaatgggagtgtaccgtttctatggcacaagggaatgcgtcaaaaaaagtggagatagttgtcttggaaactagcgcatcgtattgccccgccgagcgggtggccaataatagaggagacttcagatggccacggaccctcgccggaatcaccgcttaccagtcttgcttgcagtacccgttcacatctgtgccacttggaggaggcgctcccggaacgcgcgctagcaggcggtgtgatagggcagggcgctgggaaccaggggattatagccattgtctgtacacgaacgacattaccagagttctgtacactttcgtcttgatgccaatcaatgcttctaacgccctgacgctcgcacaccagctcagggtctacacagccgaggctgcaagtttcagtgacatgatggatgtagtctacgtggcccagatgatccagaaattcctgggctatgtggaccagatcaaggaactggtggaagtcatggttgacatggcgagcaacctcatgctcgtggatgagcacctgctctggttagcccagcgggaagataaagcatgttcaaggatcgtcggggcccttgagcgaatcggaggcgcggcactcagcccccacgcacagcacatatctgttaatgcgcgcaatgtggccctggaagcctacctgataaagcctcatagctatgtcggtctcacttgtacggcattccagaggagagaaggcggcgtcccaggcacccgcccagggagccccggacagaacccccctcctgagcctgaaccccccgctgatcaacaactgcggttcaggtgtaccaccgggcgcccaaatgtgagcctcagctctttccacattaaaaacagcgtagccctggcatctatacagttgccaccgtctctattcagctcccttcccgccgccctggcgccgccagtgccaccagactgcacgctccagctgttagtgttccgcaacgggcggttgtttcatagtcactctaatacctcaagacctggcgcagcaggtcctgggaaaaggcggggggtggctaccccagtcatttttgccggcaccagcggatgtggagtgggaaacttgaccgagccggtggcggtcagtctgcgccactgggcagagggcgccgaaccggtggctgcttggtggtcccaggaaggaccaggcgaggctgggggatggacttcagaggggtgtcagctgcgttccagccagcccaacgttagcgcgttacactgtcagcacctcgggaatgtagctgtcctgatggaactgtcagcattccctcgcgaagtgggcggcgccggggccgggcttcacccagtagtgtacccctgcaccgctctccttctgctgtgcctgttcgccaccataatcacatatatcttgaaccacagctctattcgcgtgtcccggaagggctggcacatgttgctgaacctatgcttccacatcgcaatgacatcggctgtatttgccggtggtatcaccctgaccaactaccagatggtctgccaggccgtgggaatcacactgcattacagtagcttgagtacattactgtggatgggagtcaaggcgcgggtcttgcataaagagctgacttggcgggccccacctcctcaggaaggggacccagcccttcctaccccctctcctatgttgaggttttatctaatcgccggcgggatccccctgatcatatgcggcatcaccgccgccgtgaatatccacaactaccgagaccactccccatactgctggctggtatggcgaccgtctctcggagctttttacattccagtggctctcattctcctgattacatggatttactttttatgcgccggcctgcgcctcaggggcccactggcacagaaccctaaggccgggaacagcagagcaagcttggaagctggtgaagagctgagaggcagtacgaggcttcgggggagcgggcctctgctatcggacagcgggtccctcctggctaccggatctgccagagtaggaacaccaggccccccagaggatggggatagcctgtattcccccggtgtccaacggggtgccggggatcacgcacttccggttttgggacatgtgggactgcgtggcagcggctccgtgcctgccctggcagcgcctggtggtgtacagctgctggtccgggggggctccctcaggcctggtccactcaggctgcattcgcccctgtgtcaggctgagggacgcgaatcccttgtagcaaggctgctacctccctgcctctctcgcggaccaccttgtcccgcccccggccctgcccgtaggcggagggggagattccctggggtgcggggaggacctccattgccccaggtgcttcccaaaaggcagcagaggccttcagccggatctggacccctacaggcacatcagcccgccgccggccccgagagtggggtgcgtgggggaggcggcgggcgtcgcggtcgcagggcaggagcaggggggcacccaggcaaacctaggccccctcctcctcagcagagagcacctagggcatcaggagcgcaggagccgggacagggaacccctcggggaggtggattgaggcaagagccagcacaaggcccagcaagggggaggggtggcggcgctggagctgctgtccaaagggaacgacagagtgcccagcagccacataggcagctgcccggccagcagcctcaacaaccagggcggcggcctgcagctggcaggcgcgcgcacgcacatgctgtgagaggacagcggcaccaaagacgggcagccttctag

SEQ ID NO: 188570 - DNA, 3966 bp, synthetic construct
  misc_feature 1..3966: note = Description of Artificial Sequence: Synthetic coding sequence
  source 1..3966: mol_type = other DNA
atggagccccccggccggcggcggggccgggcccagccccccctgttactccccctgtccttgctggcacttctcgcattgctaggcggggggggcggaggcggcgcagcggccctaccagccggatgcaagcacgatgggagacctcgaggagcgggccgagcagctggcgccgctgaaggcaaggtagtgtgctcttccttagagctcgcacaagtgctgccacccgacaccctgcctaacaggacagtgaccctgattctctccaacaataagataagtgagctcaaaaatggatcattctccggcctgagcctactggagaggttagacttgcggaacaacctgatctcatctatcgaccccggagcgttctggggcctctcctccctgaagaggctcgatttaaccaataatcggattggctgtttgaatgcagatatttttagaggtctgactaatctcgttcggctcaatttatctgggaacctgtttagcagcctgtcacagggaacattcgactatttggcatctttacgtagccttgaattccagaccgaatatctgctgtgtgactgcaatatactctggatgcatagatgggtcaaggaaaagaatataactgtgagggacactaggtgcgtataccccaaatcccttcaggctcaacccgtcactggagttaagcaagaacttttgacctgtgacccccccctagagctcccatcattctacatgacacccagtcacagacaggtggtgttcgagggcgacagcctgccattccagtgcatggccagttatatcgaccaagatatgcaggtgctttggtaccaggatgggcgcattgttgagacagacgagtcccagggaatctttgttgaaaaaaatatgatccacaattgttcccttatcgcaagtgcactgaccatcagcaacatacaagctgggtccactggtaactggggctgccacgttcaaacaaaaagaggcaacaacactcggacggtagatattgtggtactggagtcctccgcccaatattgccctccagagagggtcgttaacaataagggtgattttagatggccacggacccttgcgggtataactgcttacctgcagtgcacccgcaatacccacggctctggtatttaccctggtaacccccaagacgagcgtaaggcgtggcgcaggtgtgatcgggggggattctgggccgatgatgattactcccgctgccagtacgctaatgacgtcaccagagtgctgtatatgttcaatcagatgccattaaatcttaccaacgccgtcgcgactgcaagacagctgttggcttacacagtggaggccgccaacttcagtgacaagatggacgttatctttgttgcggaaatgattgaaaagttcggccggtttacaaaggaagaaaagagcaaggagctgggggacgttatggtcgacattgcctccaatatcatgcttgcagatgagcgggtcctgtggcttgcacagcgcgaggccaaagcatgcagtcgcatcgtgcaatgcttgcagaggatcgcaacctatcgactggccggcggtgcccatgtttacagcacatatagccccaacatcgcgctggaagcatacgtcatcaagtctaccggctttaccggcatgacatgtaccgtcttccagaaagtagcagcatccgaccgtacaggcctgtctgactacgggagacgggaccctgaagggaatttagataaacagttaagctttaagtgtaacgtgagcaatacgttctcgtcactcgctctgaaaaacaccatagtggaggcctctatccagctgccaccaagcctattctctccaaaacagaaaagggagcttcggcccaccgatgactccctttacaagctgcaactgatcgcttttcgcaatggaaagctattccctgccacagggaattccacaaacctggctgacgatggcaagcgccgcaccgtggtaacgcccgtcatcttgaccaaaatcgacggggtcaacgtcgatacacatcacataccagttaacgtgactcttaggcggatcgcacacggcgcagacgccgtggcagctcgatgggacttcgacctgctgaatgggcagggtggatggaaatcagatggatgtcacatcctttatagtgacgagaacatcacaaccattcagtgttactccctcagtaactacgccgttttgatggacctgacgggcagcgaattgtacactcaggccgctagtctgctgcatcctgtggtctatactacagccatcatccttctgttatgcttgctggcagtcatagtctcatacatctatcaccattccctcatccggatcagtctcaagagctggcacatgctagtcaatctgtgcttccacatattcttaacatgtgttgtgttcgtcggcggcattacacaaacaaggaacgcttctatttgccaagctgtggggatcattctgcactactccacactcgccacagttctgtgggtcggggttactgccagaaatatctacaaacaggtgaccaagaaggccaaacgatgccaggacccagacgaacccccacccccaccccgaccaatgcttagattttacctcatcggaggaggcattccgattatcgtttgtggcatcaccgctgccgccaacataaagaattacggaagcagacccaacgctccatactgttggatggcgtgggagccaagcctgggggctttctacggtcccgcctcatttattaccttcgtgaactgcatgtatttcctgtctatctttatccaactgaagagacatccggaaagaaagtatgagctgaaggagcccacggaagaacagcagaggctggcggcaaacgagaacggcgagataaatcatcaagacagtatgagcctgtccttgatctcgacaagcgccctagagaatgagcacactttccacagccagttgcttggagcatcgctgaccctgcttctctatgtggccctttggatgttcggtgcacttgcagtctctttatattatcctcttgacctcgtgttttcctttgtattcggcgccacctctctgtccttctcggccttctttgtagtgcatcactgcgtgaaccgcgaggacgtacgccttgcatggatcatgacatgctgtcctggacggagttcgtatagtgtgcaggtgaacgtacagcccccaaattctaatggcacaaacggggaagccccaaagtgcccaaactcctccgctgagagctcttgcaccaacaagagtgcttcgtcttttaagaacagttctcaggggtgcaagctgactaacttgcaggccgccgccgcccaatgccatgccaactctctgcccttgaattctacccctcagcttgacaactctctaactgagcatagcatggacaatgacatcaagatgcatgttgcccccctggaggtacagttcagaacaaatgtgcattcttcaagacaccacaagaacaggagcaagggccatagggcctctcgcctcacggtgctgagagaatacgcttacgatgtcccaacctctgtggaaggatcggtgcagaacggcttgcccaagagtcgtctgggaaacaacgaaggccattcccgctctcgacgggcttatcttgcctatcgggagcgccagtacaacccacctcagcaagactcaagcgacgcttgcagcacacttcctaagagctcccgtaacttcgaaaagcctgtaagcaccacttcaaaaaaggatgccctgaggaaacccgcagtggtggagctggagaatcagcagaaaagctacggtctgaatctagctattcagaatggaccaattaaaagcaatgggcaagaagggcccctgctgggtacagactcaaccggcaacgtgagaaccggcctctggaagcacgaaaccaccgtgtag

SEQ ID NO: 188571 - DNA, 1851 bp, synthetic construct
  misc_feature 1..1851: note = Description of Artificial Sequence: Synthetic coding sequence
  source 1..1851: mol_type = other DNA
atggagccccccggccggcggcggggccgggcccagccccccctgcttctcccactgagtctgcttgcattgttggccctcttaggaggagggggaggtggcggagcagccgcactgccagcgggatgcaaacacgacggacgccccaggggagccggaagagcggccggagccgccgaagggaaagtggtgtgctcgtccctggagctcgcccaggtgctaccacctgacaccctgccaaatcgtactgtcacactaatcctatctaacaacaagattagcgagttgaaaaacgggtcgttctccggactcagcctcctcgagaggcttgacctccggaacaacctgatctcctctatcgacccaggggccttttggggcctgagtagtcttaagcgtcttgatctcactaacaatcggatcggctgcctaaatgctgatatcttccggggcttgaccaacctcgtgagactgaacttgtcaggcaatttgtttagctcactgtctcaggggacttttgactacctcgccagtttgaggagccttgaattccaaacagaatatctgctctgcgattgtaacatcctttggatgcaccgatgggtaaaagagaagaatataaccgtcagggacacccgatgtgtgtaccccaagtcactgcaagcacagcctgtgacgggggtgaaacaagagctgctgacctgtgaccccccgcttgaactcccttcattctacatgactccttcccacaggcaggttgtgttcgagggcgacagcctcccctttcagtgcatggctagctacattgaccaggacatgcaggtgctgtggtaccaggacggaaggatcgtggagaccgatgaatctcaagggatattcgtggagaagaacatgatccataattgctccctcatcgcttctgctctgacgatttccaatatccaagccggcagcacgggtaactggggttgtcacgttcagactaaacgtggcaataatacacgtaccgtggacatcgtggtgttagaaagtagcgcacagtactgccctccagaacgcgtggtgaataataagggcgattttaggtggcccagaacactcgctggaatcaccgcatatcttcagtgcactagaaatacacatggctccggaatctatccagggaaccctcaggatgaacgaaaggcatggagaaggtgtgacaggggtggcttttgggctgacgatgactacagccgctgccagtatgctaatgacgtcaccagagtcctatatatgtttaaccagatgccgttaaacctcaccaacgcggtcgccacagctagacagctgcttgcttacaccgtcgaagccgcaaacttcagcgataaaatggacgtgatttttgtagcggaaatgattgagaaattcgggagattcacgaaagaagagaaatcaaaagaacttggagacgtcatggtggatatcgcgtctaacataatgctggctgacgaacgggtgttatggctggctcaaagagaggcaaaggcttgctcccgtattgtgcagtgcctgcagagaattgccacctaccgcctcgccggaggagcccacgtgtatagtacatattctcccaatattgccctggaggcctatgtaatcaagtccaccggcttcactgggatgacttgtacggtgttccagaaagtggccgccagcgaccgcacaggcttatctgactatggtagaagggaccccgaaggcaatctcgacaagcagctgagctttaaatgcaacgtgtccaatactttctcaagcctggcgctaaaggtctgctacatcctgcagtcgtttaagactatatatagctag

SEQ ID NO: 188572 - DNA, 1146 bp, synthetic construct
  misc_feature 1..1146: note = Description of Artificial Sequence: Synthetic coding sequence
  source 1..1146: mol_type = other DNA
atgcccctgaagcggaacaacagcaagtacccccccctggagctgcctagtttctacatgaccccaagtcaccgccaggtggtcttcgagggcgacagtttgccctttcaatgtatggcttcatacatcgatcaagacatgcaggtcctctggtaccaggacggcagaattgtggaaaccgatgaaagccagggtatctttgtcgagaagaacatgattcacaactgttcgcttatcgccagcgccttgacaatatccaatatacaggcggggagcaccggcaactgggggtgtcatgtgcagacaaagcgtggaaacaacacgcgcacagtagacatagtggtgttagagtctagcgcccagtactgtccccctgagcgtgtggttaataacaagggggactttcggtggcctcgcactctggcaggaattacagcctacctccaatgcaccaggaacacccacggctccggaatctacccgggaaatccccaggacgaaaggaaagcctggcgcaggtgcgacagaggtgggttctgggccgacgatgattactcccgctgtcagtacgcaaatgacgtgacgagggttctgtatatgttcaaccagatgccacttaatcttaccaatgccgtggccacagctcgccaactgctcgcatatactgtggaggcagccaatttcagcgataaaatggatgtaatatttgtcgcggaaatgatcgagaaattcgggaggttcacgaaggaggagaaaagcaaggagcttggcgatgttatggtcgacatagcttctaatattatgctggccgatgaacgcgtgctgtggctggcacagcgggaggccaaggcgtgttcccgaatcgtgcaatgcctccaacgcatcgctacatataggctcgcaggtggagctcacgtttattcaacctatagtcctaatattgcattagaggcttatgtgattaaaagcaccggttttactgggatgacctgtactgtctttcagaaggtggctgccagtgatcgcacagggctatccgattacggacggcgagatccagaaggcaacttagacaagcagttatcttttaagtgcaacgtatccaacacgttctcttctcttgccctgaagggcaagtttaggtag

SEQ ID NO: 188573 - DNA, 2724 bp, synthetic construct
  misc_feature 1..2724: note = Description of Artificial Sequence: Synthetic coding sequence
  source 1..2724: mol_type = other DNA
atgcccaccgccgccgcccccatcatcagcagcgtgcagaagctggtgttgtatgagactagagccaggtactttctggtggggtccaataatgcagagacaaagtacagggtcttgaaaattgaccgaaccgagcctaaggatttagttattatcgatgacagacatgtgtatactcagcaggaagtacgcgaactactcgggcgccttgatttagggaaccgaacaaagatggggcagaaggggtcatcaggcctgtttagagccgtcagcgctttcggcgtggtgggtttcgtccggttcctggagggctactacatcgtactcatcactaaacgccggaagatggccgacattggcggacatgcgatctataaagttgaagacactaatatgatttacattccaaatgatagcgtaagagtcacccatccagacgaagcacgatacctgcgcatcttccagaacgtggacttgtcttcgaatttctatttcagctacagttatgacctctctcatagcttgcagtacaaccttacggttctgaggatgccgctcgagatgctgaagtctgagatgacacaaaatcgccaagagagctttgatatcttcgaggatgaaggcctgatcactcaggggggctctggtgtcttcggaatttgctccgaaccgtacatgaagtacgtatggaatggagagctcctggacataattaaaagcacagtacatagagactggctattgtacatcatccacggcttctgtggtcagagcaagctgcttatctacggccggcccgtgtacgtcacgttgattgcacggaggtcctccaagtttgctggcacaagattcctgaagagaggtgccaactgcgagggcgacgttgcaaatgaggtggaaacggaacaaattctctgcgatgcaagcgttatgtcttttacagccggcagttattcgtcatacgtccaggtgcggggttctgtccccctgtactggtctcaggatatctctaccatgatgcccaaaccaccaatcacgttggatcaggccgacccctttgcccatgttgctgcgctgcattttgaccagatgtttcagagatttgggagcccgattatcattcttaacctggtgaaagaaagggaaaagagaaagcatgagcggatcctatctgaagagctggtcgctgcagtcacttatctaaaccagttcctgccacctgaacacacaatcgtctacatcccctgggatatggcaaagtatacaaagtccaaactttgcaatgtcctggatagactcaatgtcatcgctgaatcagtagtgaagaaaacgggcttctttgtgaacaggcccgactcttactgttccatcctgaggcctgacgagaagtggaatgaattgggaggctgcgtcattcccactggcagactccagacagggatcctgcgtaccaactgtgttgattgccttgacagaacaaataccgcgcagtttatggttggcaagtgtgcactcgcgtatcagctgtactcacttggactgatcgataaacctaacctgcagtttgatacagatgctgtaagactgtttgaggagctttatgaggaccacggggacacactgagcctgcaatacggaggcagccagcttgtgcatagggtcaagacatacagaaaaatagccccctggacccagcattccaaggatataatgcagactctgtctcggtactatagcaacgcattcagtgacgcagatagacaagattcaattaatttattcctaggggttttccatccaacggaaggcaagccccacctgtgggagctgcccaccgatttttacctccaccataaaaatacaatgcgcctgctccccactcgaaggtcctacacctactggtggacccctgaggtgattaaacatttaccactaccctacgatgaggtgatatgtgccgtcaatcttaagaaattaattgtgaagaagtttcacaagtatgaggaagaaatagacatccacaatgaattttttaggccttacgaactgagttcgtttgacgacactttttgcttagccatgacctcctcagcacgcgattttatgcctaagactgtggggattgatccctccccgtttaccgtgcgaaagccagacgagactgggaagtcggtgttgggcaacaaatccaaccgcgaggaggccgtgctccagagaaagaccgctgctagcgcccccccccctcccagcgaggaggcggtgagctcttcctctgaggatgatagtggaacagaccgtgaggaggaagggtccgtgagtcagcggtcaacccccgtcaaaatgactgacgctggggactcggcaaaagttactgaaaatgtggtccaacccatgaaagagctttatggcataaatctctctgacggactgtccgaggaagacttctccatctactcacgttttgtccaattagggcagtcacagcacaagcaagataaaaactcccaacagccctgcagccggtgctcagacggcgtcatcaagctgaccccaatttccgctttctctcaggacaacatatacgaggtccagccacctcgtgttgatcggaaaagtaccgagatttttcaggcgcatattcaggcatcccaggggataatgcagcccctgggtaaagaagactccagcatgtatcgggagtacattcgaaaccgttatctgtag

SEQ ID NO: 188574 - DNA, 3582 bp, synthetic construct
  misc_feature 1..3582: note = Description of Artificial Sequence: Synthetic coding sequence
  source 1..3582: mol_type = other DNA
atgatgttccggagcgaccggatgtggagctgccactggaagtggaagccatctccactgttgttcctgttcgcactatacatcatgtgtgtcccccacagtgtgtgggggtgcgccaattgcagggtggtgctgagcaacccgtccggaacgtttacttctccatgctatcccaacgactatcccaacagccaggcctgtatgtggaccctgagagccccgacagggtacattatacagattacattcaatgattttgacatcgaggaagcacccaattgcatctacgatagcttatctctcgataacggtgagagccagacaaaattctgtggggccacagctaagggattgtcattcaacagcagcgcaaatgagatgcacgtgtcgttttcttctgatttcagtatccagaaaaaaggctttaacgccagctacattcgagttgcggtgtcgctaaggaatcagaaagtcattctgccacagacttccgacgcataccaggtctcggtggccaaaagcatttctatccctgagcttagcgccttcacactttgctttgaggcgaccaaggtcggtcatgaggattccgactggacagccttctcctactcaaatgccagcttcactcagcttcttagttttgggaaggccaaaagcggatattttctcagcatcagtgattccaagtgcttgttaaacaatgccctgccagtgaaggagaaggaggacatattcgcagaaagcttcgaacagttgtgtctggtctggaataattctctggggtcaataggcgtgaacttcaaacggaactacgaaactgtgccctgcgactcaacaatcagcaaggtgatccctggcaatggtaagcttcttctcggtagcaaccagaatgaaatagtctctctgaaaggcgatatatacaactttcgcctgtggaatttcaccatgaacgccaaaatcctgagcaacctgagctgcaatgtcaaaggcaatgtagtggattggcagaacgacttctggaatattcctaacttggcccttaaggcggagtcaaatctctcctgtggaagctacctgatccctctccccgccgccgagctagcctcgtgcgcagacctaggcaccctgtgccaggatggcatcatctatcgtattagtgtagtcatacagaacatcctccgtcacccagaggtcaaggtccaaagcaaagttgccgaatggctgaattccacattccagaattggaactatacagtctatgtcgttaatatatcatttcacttgtccgctggtgaggacaaaatcaaggtcaagagaagtctcgaggacgaaccccggttggttttatgggcacttctcgtatacaatgctaccaataacacaaacctggaaggcaaaattatccagcaaaagcttctcaagaataacgaatcactggacgaggggctgcggctccacacggtcaacgttcggcagctcggacattgtctggctatggaagaacctaagggatactactggccaagcatccagccgtccgagtatgtgctcccctgccccgataagcctggatttagtgcaagtagaatttgtttctacaacgcaaccaatcccctcgttacgtactggggacctgtagacatatccaactgtctcaaagaggctaacgaggtggcaaaccagatcctgaacctgaccgcggacgggcagaacctgacatctgctaacataacaaacatcgtggaacaggtcaaacgtatcgtgaataaggaagaaaatatcgacattaccctcggtagcacactgatgaatatttttagcaacatcctatctagtagcgatagcgatctcctggaaagctcctccgaggcactcaaaaccatcgatgagctcgcgttcaagatcgatctgaattctaccagtcatgtgaatattactacaaggaacctcgccctctccgtgagctcccttctgccaggtactaatgccattagcaatttctctataggactcccatctaacaacgaaagctactttcaaatggacttcgagagcgggcaggtggaccccctcgcctctgtgatcctacctcccaatctcctcgagaatctgagtcctgaagattcggtgctagtgcggagagcccagtttacatttttcaataagaccggtctgttccaggacgtggggccccagagaaagacactcgtgagctatgttatggcatgttctattggaaacattacaattcagaacttaaaggaccctgtacagatcaaaattaagcatacgaggactcaagaagtgcaccatcctatctgcgcattctgggatttgaataagaataagtcttttggtggctggaatacctcgggctgcgtcgcccatcgagattccgacgcctcagagacagtctgcctgtgcaatcactttacacactttggggtcctcatggacctgccacggtctgccagccagttggacgcccggaatacaaaggtgctcactttcatttcttatatcgggtgcggcatcagcgccatcttcagtgctgcaaccctgctcacttacgtggccttcgagaagcttagaagggattatcctagcaagatcttgatgaacctgtccactgccctgctcttcctgaatctgctgtttctgctagacggctggatcacatctttcaatgtggacggcctgtgtatcgctgttgccgtgctgctccactttttcctcctggctaccttcacatggatggggttggaagcaattcatatgtacattgccttagtgaaggtattcaacacttatatccggcggtacattctgaagttttgtattatcggttggggactgcccgccctggtggtgtccgtggttctggcctcacggaacaataatgaggtctatggcaaggaatcttatggaaaggagaagggtgatgagttttgctggatccaagaccccgtcattttttacgtaacatgcgccgggtattttggcgtgatgttcttcctcaatattgccatgtttattgtggtgatggtacagatctgtgggcgtaacgggaagaggtctaaccgaaccctacgtgaggaggtgttaagaaacctgcgctcggtagtttcgttaaccttcttactgggtatgacctggggttttgcattttttgcctggggacctctcaacattccatttatgtatctgttctcaatattcaacagcctgcaggggttgtttatttttatcttccactgcgcaatgaaggagaacgtgcagaaacagtggcgccaacatctctgctgtggtcgatttaggttagctgacaactccgattggtcgaagacagctacaaacatcatcaaaaagagttcagacaatttaggcaagagtctgagtagcagcagcatcggcagcaattcaacgtatctcacgagtaagagcaaaagctcaagtactacatatttcaagcgaaactcgcacaccgacaatgtctcttatgagcactcattcaacaaaagcggatctctgcgccagtgtttccatggccaggtgctggttaagactggaccgtgttag

SEQ ID NO: 188575 - DNA, 3669 bp, synthetic construct
  misc_feature 1..3669: note = Description of Artificial Sequence: Synthetic coding sequence
  source 1..3669: mol_type = other DNA
atgatgttccggagcgaccggatgtggagctgccactggaagtggaaaccctctcccttgctgttcctgtttgcgttatatatcatgtgcgtgccgcactctgtgtggggctgtgccaactgtagggtggtgctcagcaatcccagcggcacattcacaagcccgtgctacccaaatgattaccctaatagccaggcctgtatgtggactctaagggcaccaactgggtatattattcagatcacgttcaacgattttgacatcgaagaagcccccaactgcatatatgatagtctttcgctcgacaacggcgagtctcagactaaattctgtggagctacggccaaaggactaagtttcaactcctcagccaatgagatgcacgtgtccttctcttctgacttcagcatacagaagaagggattcaatgcctcatacattcgcgtggcagtgtccttaagaaatcaaaaggtgatacttccgcagaccagcgacgcctaccaggtgagcgttgccaaaagtatctccatccccgagctgtctgcgtttaccctctgttttgaagcaactaaagtaggccatgaggactcagactggaccgcgttttcctacagtaacgcttccttcacccagttactgtcattcgggaaggcaaagagcggttatttcttgtcgatttcagattcgaagtgtctgcttaacaacgcgttgcccgtgaaggagaaggaggacatctttgctgagtcattcgaacagctgtgcctcgtctggaataatagcctgggttcaatcggcgtgaactttaaacggaactacgaaaccgtgccttgtgactcgactatctcgaaggtaatccccggcaatggtaagctcctgcttgggagcaatcagaatgaaatcgtctcattaaagggggacatttataattttaggctgtggaacttcactatgaacgcgaagatcttatctaacctcagttgtaacgtcaaggggaatgttgtggattggcagaacgacttctggaacattcccaacctcgcccttaaggctgagtcaaacctctcatgcgggagctatctgattccactccctgcagccgagttggcgtcttgcgctgatcttggaactctctgccaagacggcattatctatcggatctctgtcgttatccagaacattttgcgacaccccgaagtaaaagttcagtccaaggtggctgagtggctaaacagtacattccagaactggaactacaccgtttacgttgtcaacataagttttcacctgtctgcaggcgaggacaaaatcaaggttaaacgcagcctcgaggatgagccaagattggtgctgtgggcgctgctggtgtataatgccaccaataatactaatttagagggaaaaatcattcagcagaagttgctgaagaacaacgaaagcctggatgaaggacttaggctccataccgtgaacgttaggcaactaggccattgcctggccatggaagaacctaagggatactactggccaagcattcaaccctctgagtacgtgcttccgtgtcccgacaaacccggcttctccgcctccagaatctgtttctacaatgcaacaaaccccttggttacgtattggggtcctgtggacatatccaattgcctgaaggaggctaatgaggtggcaaatcagatactgaatctgaccgccgacgggcagaacctaacttctgccaatattaccaacatcgtggagcaggtcaagcgaatcgtcaataaagaggagaacattgacatcacactgggaagcactctaatgaatatcttcagtaacattttgtcctccagtgacagcgatttgctggaatcctcttccgaggcactgaaaaccatagatgaactggctttcaaaatagatctcaacagtacatcccatgtcaacataaccacacgcaacctcgccctttcagtttcaagtttattgcctggaacaaacgccatctctaacttttctattggtctgccatctaacaatgagtcttacttccagatggattttgagagcggacaggtggaccccttggcctcagtgatcctgcctcccaatctcctggagaacctctcccctgaggactccgtactggtcagaagagcccagtttacgttctttaacaagacaggattgtttcaggacgttggcccccagcgaaaaacccttgtttcttacgttatggcctgctcaatcggaaatattacgatccagaatttgaaagacccagtccaaattaaaattaagcatacgagaacacaggaggttcaccaccccatctgtgctttttgggacctgaacaagaataaatcttttggcggatggaacacctcagggtgcgttgctcatcgcgattccgatgcatctgaaacagtgtgtctgtgtaatcatttcactcatttcggggtgttgatggacctgcctcgaagcgcctcccagttggacgcccgtaatacgaaggttctgaccttcatctcctacattggctgcggaattagcgcaatattctctgcagcgacattgctcacctacgttgcttttgagaagctccgaagggattatccgtccaagatcttgatgaatctcagtacagcgttgctgttcttgaatctgctgttcttactggatggctggattaccagttttaatgtcgatggtctgtgcattgctgtggccgttctgttacactttttcctgctggctactttcacttggatgggcctcgaagcaattcacatgtacattgccctggtcaaggtgtttaatacatatatccgccgctacatcctcaaattttgtataataggatggggccttcccgcactggtagtgagtgtggttctggcatctcggaacaataatgaagtgtacggcaaggaaagttacggtaaggaaaaaggcgatgagttctgttggatccaagatcccgtcatcttctacgtaacttgtgcaggttattttggagtcatgtttttccttaacattgctatgttcatcgtggtaatggttcagatctgcgggcgaaatggcaagcggtctaacaggaccctacgggaagaggtgctccgaaacctgcggtctgtcgtaagtctcacctttctgctgggcatgacctggggcttcgctttcttcgcatggggtccactaaacattccctttatgtacctcttctcaatcttcaattctctccagggtcttttcatatttatatttcactgcgcgatgaaagagaacgttcagaaacaatggcgtcagcatctgtgttgtgggagatttagactagccgacaatagtgactggagtaaaaccgcaacaaacatcatcaaaaagtcaagtgacaatttagggaagagtctgtcaagctcgtctattggatccaactcgacgtacttgacttctaagagtaagtctagctccacaacctattttaagcgcaactctcacacagatagcgcaagcatggataagagtctgagtaaactcgctcacgctgacggggaccagacgtccattattccagtgcatcaagtcattgataaggtcaagggatattgtaatgcacacagtgacaatttttataaaaatattataatgtcggacactttttcccattcaaccaagttttag

SEQ ID NO: 188576 - DNA, 3753 bp, synthetic construct
  misc_feature 1..3753: note = Description of Artificial Sequence: Synthetic coding sequence
  source 1..3753: mol_type = other DNA
atgatgttccggagcgaccggatgtggagctgccactggaagtggaaaccctcccccctgttattcttgttcgcactctatatcatgtgtgtgcctcacagtgtctggggctgtgctaattgccgggtggtgttgtctaacccctctgggaccttcacatccccctgctacccgaacgattatcccaattcccaggcttgcatgtggaccctaagagctcctactggctacattatccaaataactttcaacgattttgatatcgaggaggcaccaaattgcatatatgattctcttagcttagataacggagaatcccaaaccaagttttgtggggcaaccgccaaagggctgagttttaattctagcgctaacgaaatgcacgtctctttctctagcgatttctccattcaaaaaaaaggcttcaatgcctcctacatccgtgtggccgtgtctcttagaaatcaaaaggtgatccttcctcagaccagcgacgcctatcaggtgtcagtggcaaagtccatttccatcccggaactttcagcctttacgttgtgcttcgaggcaactaaagtcggtcacgaagattccgactggaccgcgttctcctatagcaacgcttccttcacccagctgctgtcatttggcaaggccaaatcaggctatttcctcagtatttcggattccaagtgcctattaaacaatgcactgccagtcaaggagaaagaagacattttcgctgaatctttcgagcagctctgccttgtgtggaacaactcacttggcagcatcggggtgaattttaaacgtaattacgaaacagtgccatgtgactctacgatctccaaggtgatccccggcaatgggaaactgttgctcgggtccaaccagaacgaaattgtgtccctcaagggagatatctacaacttccgtctctggaacttcactatgaacgctaagatcctgagtaacctctcttgtaacgttaaaggaaacgtcgtggactggcagaacgacttttggaatatcccgaatctggccttgaaagcagagtccaatctgtcatgtggcagttacctgatccctctccctgctgcagaactggcctcttgcgcagacttgggcactctgtgccaggcgacggttaactctccatctacaacccccccgactgtaacgaccaacatgcctgttacaaaccgaatcgacaagcaaagaaacgacggcatcatctacagaatttccgtcgttattcagaatatcctcaggcatccggaagtaaaggtccagagcaaagtggctgaatggctcaactcaaccttccagaattggaattacacggtatacgtggtaaatatcagcttccatctgtccgcaggtgaggacaaaatcaaagtaaaacgtagtctagaggacgagcctcgtctcgtgctatgggccttactcgtgtacaatgccacaaataataccaatctggaaggaaagatcatccagcaaaagttattgaagaataacgagtccctggatgaaggtttgcgcctccacactgtgaacgtccggcaactgggccactgcctcgccatggaggagcctaaagggtattactggccctcaattcagcccagcgaatatgtacttccgtgccccgacaaacccgggttctcagcctccagaatctgtttctacaacgctactaatcccctcgtgacgtactggggccctgttgacattagcaactgcctcaaagaggcaaatgaagtggctaaccaaatcctcaaccttacagcggacggacagaatctaacctctgccaatataaccaacattgtggaacaggtcaaaagaatcgtaaacaaagaagaaaacatcgacattaccctcggctccacactgatgaacatattctctaatatcctgtcctcaagcgatagcgatttattggagagttctagcgaggcactcaagaccatcgacgagctggcctttaaaattgatttgaattctactagccatgtcaacatcactacaagaaacctggcgctctccgtgtcctccctgctgcctggcaccaacgccatcagcaactttagtatcggactgccttcaaataatgaatcctatttccagatggactttgaaagcggacaagtcgacccactggctagcgtcattcttccccccaaccttctggagaacttgagccctgaggactccgtactcgtacgtagagcgcagtttacgttcttcaacaaaacagggctgtttcaagacgtagggccacaacggaaaaccctggttagctacgtcatggcctgtagtatcggcaacatcacgatccaaaatttgaaggatcctgttcagattaaaattaaacacacgcggactcaggaggtgcatcaccccatctgtgcgttttgggacctgaataagaataagtccttcggtggctggaatacatcaggttgtgtcgcacatcgggacagcgacgcatccgagacggtctgcctatgtaaccattttacccatttcggagtcctcatggacctgccccgcagtgcgagccagctcgacgctcgaaatacaaaggttttaactttcatctcatatatcgggtgcggcatttcagctatcttctctgcagcaaccctgctcacatatgtggcgttcgaaaaactgcggcgtgattaccccagcaaaatactcatgaatctttcaactgccttactcttcctaaatctgctattcctcctggatggctggattacaagctttaacgtggatggactgtgcatcgctgtggcagtgctcctccacttctttttactggctaccttcacatggatgggactggaagccatacacatgtacatcgcgcttgtgaaggtctttaatacctatatccgaaggtacattctcaaattctgtattataggctggggtctgcctgcactggtggtctccgtggtgctggccagtcgtaataacaacgaggtgtacggcaaagaaagctacgggaaggaaaagggagacgagttctgttggatccaggatccagtgattttttacgtcacttgcgctggttattttggcgtgatgttctttctgaacattgccatgtttatcgtggtgatggttcaaatttgtggccggaacggaaagagatccaatagaacattacgtgaagaggtcctgaggaatctaagatcagtagtgagtctgacatttctcttgggaatgacatgggggttcgcatttttcgcttggggtcctttaaacatccccttcatgtacctattcagcatctttaattcactgcaggggctatttatctttattttccactgcgcgatgaaagagaatgtgcaaaagcagtggcgacaacacctgtgttgcgggcggttcaggctggcagataacagcgactggtccaagacggccacaaacattattaagaaaagctctgacaacctgggcaagagcttgtcttcaagctccataggctccaacagtacatacctcacctcaaaatcgaagagctcctccaccacctactttaaacgcaatagtcataccgattctgccagtatggacaaatctctgtcaaagctagctcacgcagacggcgaccaaacgagcattattcctgtacaccaggtcatcgacaaagttaagggttattgcaacgctcactccgacaacttctataagaatataatcatgagcgacacattctcccattctactaagttctag

SEQ ID NO: 188577 - DNA, 2394 bp, synthetic construct
  misc_feature 1..2394: note = Description of Artificial Sequence: Synthetic coding sequence
  source 1..2394: mol_type = other DNA
atggccagctgccgggcctggaacctgcgggtgctggtggccgtggtgtgtggccttttgacgggaatcatacttggattgggaatttggaggattgtgattaggatccagcgaggcaagtctacaagctcctcatctaccccaaccgagttttgtcgtaacggggggacctgggagaacgggcggtgcatctgcactgaggagtggaaggggcttcgctgtacaatcgcaaatttctgcgagaatagcacctatatgggctttaccttcgcacgcatccctgttggacgatatggcccctctttacaaacatgtgggaaagataccccaaatgccgggaatccaatggcagtacggctgtgctccctcagtctgtacggcgaaatcgagctccagaaggtgacgatcggaaactgcaacgaaaaccttgaaactctggagaagcaggtgaaagacgtgaccgcacccctgaacaacatttcctctgaagtccaaatcctgactagcgacgctaacaaactgactgcggaaaacattactagtgcgacccgcgtcgttggtcagatttttaacacgagcagaaacgcatctccggaggctaagaaagttgccatcgttacagtgagccagttactcgatgcttccgaggatgcctttcagagagtggcggctaccgcgaacgatgacgcccttaccacgctaatcgagcagatggagacctatagcctgtccctagggaatcagtcagtggtcgagccgaacattgccattcagtctgctaatttctccagcgagaatgccgtcggcccatctaacgtgaggttttctgtccaaaagggcgcaagctcctcactggtgtcctccagtacttttatccatactaacgtggatggactcaatcctgacgctcaaacggaacttcaggtcctcctgaacatgaccaagaactataccaagacctgtggctttgtggtgtaccaaaacgataagctgttccagtcaaagacatttacagcaaagtccgatttttctcagaagatcatctcttctaagaccgatgaaaacgaacaggatcagtcagcttctgtggatatggtgttttccccgaagtacaaccagaaagagtttcaactgtactcttatgcctgcgtgtattggaacctgtccgcaaaagattgggatacatacggctgtcagaaggataagggaactgatgggttcctgcgctgccggtgcaaccacaccaccaacttcgccgtattaatgacttttaaaaaagactaccaataccctaagtcactggacatcctttcaaacgtgggatgtgcattgtcagtgacaggactggccctgactgtgatcttccagatagtgacacggaaggtgagaaaaacttctgtgacatgggttctcgtgaatctgtgtatttccatgctgatatttaatttactctttgttttcggaattgaaaattctaacaagaatttacagacaagcgacggagacatcaacaatattgattttgacaataacgatatccctcgtactgacactataaacatccctaacccgatgtgcactgcgatcgctgctctgttacactactttcttctggtgacatttacttggaacgccctttcggccgcccagctttattatctgctgatcagaaccatgaaaccactgccaaggcattttatcttgtttattagcctgatcggatggggagtgcccgccatagtcgtggcgattactgttggcgttatatacagccagaatggaaacaacccccaatgggagctggactatcgacaggaaaagatctgctggctggccattcctgagcctaatggcgtcataaagtcccctttgctgtggtccttcatcgtgccagtgacaatcattctgattagcaatgttgtaatgtttatcactatcagtatcaaagtcctctggaagaacaatcagaacctgacctccacaaaaaaggtgtcatctatgaagaaaatagtcagtaccctatcagtggcggtggttttcggtatcacctggatcctcgcttacctgatgttagtgaatgatgactctattcggatcgtcttctcttacatcttttgcctctttaatacaacgcagggcctgcagatctttatcctgtacaccgttcgcacaaaggtttttcagagcgaggcctccaaggtgctgatgctgctctcctcaatcgggcggagaaaatctctgccctcagttaccaggcctaggttgagagtgaagatgtataacttcttgagaagcctccctaccctccacgaacgttttcggctgctcgaaacctcaccaagcactgaagaaataacccttagcgagtctgacaacgccaaagagagcatctag

SEQ ID NO: 188578 - DNA, 1509 bp, synthetic construct
  misc_feature 1..1509: note = Description of Artificial Sequence: Synthetic coding sequence
  source 1..1509: mol_type = other DNA
atgcccgtgaagatgctgttcaaggagctgctgctgctgctgatgatgatgccattacagcattataccaaaacttgcggatttgtagtgtatcagaacgacaagctcttccagtctaagacatttacagcgaaaagcgacttctcccagaagatcatctctagtaaaacagatgagaacgagcaggatcagtcagcaagcgtggacatggtgttcagccctaagtataatcaaaaagaattccagctatactcatatgcctgtgtctattggaacctcagcgcaaaagattgggacacctacggctgtcagaaggacaaaggtaccgatggcttccttcgatgtcgttgtaatcacactacaaatttcgcagtgttaatgacgtttaagaaggattatcagtacccgaaaagtctggatattttgagcaatgttggatgtgctttgtcagtgactggtcttgcactcacagttattttccagattgtaacacgcaaggtccgaaaaactagcgtgacatgggtactggtgaatctgtgcattagcatgctaattttcaatcttctcttcgtgttcggtatcgaaaattctaataaaaacctgcaaacttccgacggggacattaacaatattgacttcgacaacaacgacatccctcgaacagatacaattaacatcccaaatcctatgtgcactgctatcgccgccctcctccactacttcctcctggtaacattcacttggaacgcactctcagcagcgcagctttactacctcctcataaggaccatgaaaccgcttccccgccacttcattctgtttatcagcctcataggatggggcgtgcccgccatcgtcgttgccattacagtgggcgtgatttacagccagaacggcaacaatccacaatgggagttggattataggcaggagaagatttgctggctcgccatacctgagccaaacggcgtgatcaagtctcccctgctgtggagttttatcgtacctgtgaccataatactgattagcaatgtggtcatgttcatcactatctccattaaggtgctgtggaagaataatcagaatctgacatcaaccaagaaagtctcttccatgaaaaagatagtgagcaccctgtccgtggccgtcgtcttcggcataacctggatcctcgcatatctgatgctcgtcaacgatgactccatacgcatcgtcttttcttacattttttgtctgtttaacaccacgcagggtctgcagatttttatattatacacagttaggacaaaggtgttccaatctgaagcgagtaaggttctgatgttgctttcaagcattggcaggagaaagagcctgccttccgtgacacgccctcgcctgcgtgtcaagatgtataattttctgcgcagcctccccacacttcacgaaagattccggttactagagacatctccttcaaccgaggagatcacgctctccgaaagcgataacgctaaggaaagcatctag

SEQ ID NO: 188579 - DNA, 1143 bp, synthetic construct
  misc_feature 1..1143: note = Description of Artificial Sequence: Synthetic coding sequence
  source 1..1143: mol_type = other DNA
atgtgccccatgctgctgaagaacggctacaacggcaacgccaccccagtcactacaacagcaccatgggccagcctgggactgtccgccaaaacctgcaacaatgtctcctttgaggaaagccggattgtcctagtggtcgtgtatagcgctgtgtgtacgctcggagtgccagccaactgtctaaccgcttggttggccctgttgcaggtcctgcagggcaacgtgttagcagtgtatttgctatgcctggctctctgtgagctcttgtataccgggacattaccactgtgggtaatttacataaggaaccagcataggtggacacttggcttgcttgcctgcaaagtgaccgcctacatttttttttgcaatatctatgtgtcgatactattcctctgctgtatttcttgtgaccggttcgtcgccgttgtgtatgccctcgagtcccgcgggcgtaggagacgtcggacagctatcctcatcagtgcctgtatttttatcttggtgggcatcgtgcattatccagttttccagacagaagacaaagaaacttgttttgatatgctgcagatggactcacggatcgccggatactattacgcccgcttcacagtgggctttgcgattccgcttagcatcatcgcatttacaaaccatcgcatctttagatcgatcaagcagagcatgggtctatcagctgcccaaaaagctaaggttaaacacagcgccatagcagtagtagtaatctttctggtatgttttgccccataccatctggtgctgttggtgaaggccgcagcattctcctactacagaggcgatcggaatgctatgtgcgggttagaagagcgtctgtataccgcttccgtggtatttctgtgcctgtcaaccgtcaatggggtggccgatcccattatatatgtcctggctactgaccattcccgacaggaagtgtcccgcattcataaagggtggaaggaatggtccatgaagaccgatgtgacgaggctgacacacagccgggatactgaagagcttcagtcacccgtcgccctggccgaccactacacctttagtcgtccagtgcatccacccgggagcccttgccccgctaaaagacttatcgaggagtcttgttag

SEQ ID NO: 188580 - DNA, 1116 bp, synthetic construct
  misc_feature 1..1116: note = Description of Artificial Sequence: Synthetic coding sequence
  source 1..1116: mol_type = other DNA
atgcccggcaacgccacccccgtgaccaccaccgccccctgggcctctctcggcctgagcgctaaaacatgcaataacgtgtcatttgaagaaagccgtatagtgcttgttgtagtgtactcagccgtgtgtacccttggcgttcctgcaaattgccttactgcctggctggccctgttgcaggtcttgcaggggaatgtacttgcggtctacttattgtgcctggctctttgtgaactgctgtacacaggcactctgcctctctgggtgatttacatcagaaaccagcatcggtggacactaggtctacttgcttgcaaggtgacagcttatatctttttctgtaacatatatgtgtccattctgttcctatgctgtatatcatgcgatcggtttgtcgccgttgtttacgccttagaatctcgaggacgaagaagacggcgaacggctatcttaatttccgcctgtatctttatccttgtcggcatagttcactatcccgtgtttcaaactgaggataaagaaacctgcttcgacatgttacagatggattcacggatagctggctactactatgcacggttcaccgtgggattcgcgattcccctttcaatcatcgccttcaccaatcaccgcatctttcggtccatcaagcagtccatgggcctgtctgctgcccagaaggctaaggtgaagcactcagcgatcgccgtggtggtcatctttctggtctgtttcgcgccttaccacctcgtactcttggttaaggctgccgcattttcatattatcgtggagaccggaacgctatgtgcggcctcgaggagcggctttataccgctagcgtggtgtttctgtgcctgagtacagtcaatggagtggcagatcctatcatctatgtactggccacagatcatagccggcaggaagtgtcgcgcattcacaaaggctggaaggagtggagtatgaaaacggatgtcacacgccttacgcacagcagagacacagaggaacttcaatccccggttgccctggccgatcactacactttttcgcgcccggttcatccaccaggatctccatgccctgctaaaaggctgatcgaagagagctgctag

SEQ ID NO: 188581 - DNA, 1143 bp, synthetic construct
  misc_feature 1..1143: note = Description of Artificial Sequence: Synthetic coding sequence
  source 1..1143: mol_type = other DNA
atgtgccccatgctgctgaagaacggctacaacggcaacgccacccctgtgaccacaaccgctccatgggcctctctggggttatccgccaaaacctgcaacaatgtttcctttgaagagtcgcgaatagtgttggtggtcgtctacagtgctgtgtgcactcttggtgttcccgcaaattgtctcacagcatggctggccctccttcaggtgcttcagggaaacgttttggccgtctacctcctgtgtttggcgctgtgtgagctcctgtataccggcaccttaccgctctgggtcatctatattaggaatcagcacagatggacactgggactgctggcctgcaaagtaacggcctacatcttcttttgcaacatatacgtgtccatcttgttcctgtgttgcatctcatgtgacaggttcgtcgcggttgtgtatgctttagagagtcgcggccgcagacggagaaggacggccattcttatctctgcttgcatctttattctggtggggatcgtccattacccggtgttccagacagaagataaagagacctgctttgatatgcttcagatggactcccgaatagccggatactactacgcaaggtttactgtcgggtttgcgatccccctgagcatcattgcctttactaatcacaggatttttcgcagcatcaagcagtctatgggtctctcagccgcccagaaagctaaggtcaaacattccgcaatcgccgttgttgtgatattcctggtttgcttcgccccatatcatctggtcctcctggtgaaggccgccgccttcagctattatcgcggggacagaaacgccatgtgcggactcgaagagaggttgtacactgcatccgtggtctttctctgcctatccacggtgaacggcgtggctgatcccataatctacgtgctcgcaaccgaccacagccgtcaagaggtgtcccgaatccacaagggttggaaggagtggtcaatgaaaacagacgtgacaagactgacgcacagtagagacaccgaggagttgcagtctcccgtggccctggccgaccactacaccttctctcgacccgttcatcctccaggttccccatgccctgccaaaagactcatcgaggagagttgttag

SEQ ID NO: 188582 - DNA, 33 bp, synthetic construct; identical to SEQ ID NO: 82388
  misc_feature 1..33: note = Description of Artificial Sequence: Synthetic coding sequence
  source 1..33: mol_type = other DNA

SEQ ID NO: 188583 - DNA, 2625 bp, synthetic construct
  misc_feature 1..2625: note = Description of Artificial Sequence: Synthetic coding sequence
  source 1..2625: mol_type = other DNA
atggagaagctgctgcggctgtgctgctggtacagctggctgctgctgttctattataattttcaagtgagaggtgtatatagtcggagccaggaccatcccggcttccaggtgctggcctccgcctcacactactggcccttagagaatgttgacggcatccacgagctccaggatactaccggcgacatcgtcgaaggcaaggtgaataagggaatttacttaaaggaggagaagggagttacgttgctatattatggcaggtacaatagtagctgcatctcgaaacccgagcagtgcggacctgagggtgtgacatttagttttttttggaagacccagggggaacaaagccggcccatcccatctgcctatggcgggcaggtgattagtaatggctttaaggtatgctccagcgggggcagaggctctgttgaactatatacacgtgataatagtatgacttgggaagcttcgttcagcccccctgggccatactggacccatgtcctgtttacttggaaatcgaaggagggcctaaaagtgtacgtgaacggaaccctttctacaagtgaccctagtggcaaagtgtcacgcgactatggagagagtaatgtgaacctggtgataggtagtgaacaggatcaggcaaagtgctacgaaaacggcgcctttgatgaattcatcatttgggaacgggcactaaccccagacgaaatcgctatgtacttcacagccgccattggtaaacacgcccttttatcaagcactcttccaagcctgtttatgactagcacggcaagcccggtaatgcctaccgacgcctatcaccccattatcacgaatctgactgaggagcgaaaaaccttccagagtcccggggtgatcctctcctatctgcaaaatgtatccttgtcccttcccagtaagtcgctttctgaacagactgcactcaatttaacgaagacgtttctcaaagccgtcggcgagatcctgttgcttccggggtggatcgctctgtccgaggattctgccgtggtgttgtctctgatcgacaccattgataccgtaatggggcacgtgtcttcgaacctgcacggcagcacgccacaggttacggtcgagggatcctccgcaatggccgagttctccgtggccaagatcctgccaaaaactgtcaacagctcacattacaggttcccagcccacggtcagtcgtttatccaaattccacacgaggcttttcacagacatgcttggtctaccgtcgttggtttgctctaccactcgatgcattactatctcaacaacatctggcctgcccatactaagattgcggaggccatgcaccatcaggactgtctcctgtttgccacgtcacacctgatttctctcgaagtcagccccccccccaccctctcccagaacctgagtggatcaccactgattacagtccacctaaaacatagactgacacgcaaacaacactcagaggccaccaactcgtcgaacagagttttcgtgtactgcgccttccttgatttcagcagcggagagggtgtgtggtctaaccacgggtgtgcgctgaccagaggcaatctgacctactctgtgtgtaggtgtacccatttgacaaattttgcaattttgatgcaggtggttcctcttgagctggcgcgaggacaccaagttgccctgtctagcatctcctatgtaggctgctctttgtccgtgctgtgcctggtggctaccctagtgacctttgcagtgctgtctagcgtgtccacaatccgaaatcagaggtatcacatccatgccaacttaagcttcgctgtgcttgtggcgcaagtgcttctgctgataagtttccgcctcgagcccggcaccaccccctgccaagtgatggccgtgttgctgcattattttttcctgagcgcttttgcctggatgttagttgagggactgcacttgtacagcatggtcattaaagtgtttggtagcgaggacagcaaacatcgatattattacgggatgggttggggattcccccttctgatctgtattatctccctgtccttcgctatggactcatacggtacatccaataactgctggttgtcacttgccagcggcgctatatgggccttcgttgctccggcactgtttgtcattgtggtgaacatcggcatactcattgccgttactagggtgatcagtcaaatttccgctgacaattacaagattcacggcgaccccagcgcatttaagctcacagccaaagctgttgccgtgctgttgcctatcttgggcaccagttgggtttttggcgtgctggcagtcaatggttgcgctgtagtgttccagtacatgtttgcgactctcaacagtctgcagggcctgttcattttcctgtttcattgtctgctgaatagcgaagtcagggcagcctttaaacacaagaccaaggtatggtcactgaccagctcaagcgcgcgaactagcaatgccaagccctttcactccgatttgatgaacggcacaaggcccgggatggcttctactaagctcagtccttgggataagtctagtcattccgcccatagagtggatctttccgcagtctag

SEQ ID NO: 188584 - DNA, 687 bp, synthetic construct
  misc_feature 1..687: note = Description of Artificial Sequence: Synthetic coding sequence
  source 1..687: mol_type = other DNA
tgacacggcgtgagcgcccgggacgtgctggagagccggacccggaagcagcattctgaggcaacgaattcttctaaccgagtgtttgtctattgcgcttttcttgacttctcatcaggggaaggcgtgtggtccaaccacggctgcgcgctgacacggggtaacctcacctactccgtgtgtcggtgcacgcatctgaccaactttgccatcctcatgcaggtcgtgccactcgaggtaaatattggaatcctcatcgcagtgactagagtaatttcacagatctccgcagacaactataaaatacatggggacccctctgcttttaaactgaccgcaaaagctgtcgccgttctgttgcccatccttggtaccagctgggtgtttggcgtgctcgccgtcaatggttgtgctgttgtgttccagtacatgttcgcaactctaaacagcctacaagggttgttcatatttctgtttcattgtctcctcaactccgaggtcagagctgcctttaagcacaagaccaaggtctggtccctcacgtcctcatccgcgcggacatcaaatgccaaaccattccactccgacctaatgaatggcacgcgtcctggcatggcatctaccaaattgagcccttgggataagagttctcattctgcccatcgggtggacctcagtgcagtgtag

SEQ ID NO: 188585 - DNA, 2721 bp, synthetic construct
  misc_feature 1..2721: note = Description of Artificial Sequence: Synthetic coding sequence
  source 1..2721: mol_type = other DNA
atggagaagctgctgcggctgtgctgctggtacagctggctgctgctgttctactataattttcaggtgcgaggggtgtactcaaggagccaggatcatcctggatttcaggttctcgcatcagcgtctcactattggcccctggagaatgttgacgggattcacgagctgcaggacacgaccggggcttctcgaacacacaagctaacggtcctcccttcgcgtaatgccacgttcgtgtactcaaatgactctgcctacagtaacctcagtgccaccgtggacattgtcgagggaaaggttaataaaggcatatatctgaaggaagagaaaggagttactctcctgtattatgggaggtataacagctcctgcatttctaaaccggagcaatgcgggccggagggtgtcacctttagcttcttctggaaaactcagggcgagcagtcccgcccaatccccagcgcctatggcggccaggtaatctcaaacggtttcaaagtgtgttcttcaggcggtaggggtagtgttgagctttatacacgtgacaactcaatgacatgggaggctagtttttccccgcctggaccttattggacccacgtgctctttacatggaaaagtaaagagggactcaaggtttacgttaacggtacactatcaacttctgaccccagcggaaaagttagccgcgactacggagagagcaacgttaacctggtgatcggatctgagcaggatcaagcaaaatgttacgaaaacggcgccttcgacgagtttatcatctgggagcgcgccctgactccagacgaaatagcaatgtactttaccgcagccattggaaagcatgccctgttaagttctacactccccagcctgtttatgacctccacagcgtcaccggtgatgccaaccgatgcataccaccctattattactaacctgactgaagagaggaaaaccttccaatctcctggcgtgattctcagttacctgcagaacgtatccctgtctctgccctccaagtctctgagtgagcagactgctctgaacttgacgaaaactttccttaaagccgtgggggagatactgctgctcccaggctggattgccttatctgaggattctgctgtagtgctaagcctgattgatacaattgacactgtgatgggccatgtttccagtaatctgcacgggagcacaccccaggtcacagttgagggaagctccgcaatggccgaattcagcgttgccaaaatcctgccgaaaaccgtgaattcatctcactacagattcccagctcacggccagtctttcattcagatcccgcatgaggctttccacagacacgcctggtctaccgtagtaggcctcctctaccattctatgcactattacctgaataacatatggccagctcataccaaaatcgccgaggccatgcaccaccaggattgcctgctatttgctacaagccatctgatctctctcgaagtctccccccctccaaccctaagccagaatctgtccgggtcccctttaatcaccgtgcatttgaaacaccgactgacacgcaagcagcactctgaggcgaccaatagctccaatagagtgttcgtgtactgcgcctttctggacttctcgagcggagaaggcgtgtggtccaatcacgggtgtgcactaacacggggcaatttgacatatagtgtctgtagatgcacccatctgactaattttgccatcctcatgcaggttgtacctctggaactcgcaagaggtcaccaggtggccttgtcctctatttcttacgtaggatgcagtctgagcgtgctttgcctcgtcgctactctcgtcaccttcgcggtgctctcctccgtttctacgattcgcaatcagcgatatcacatacatgctaatctttcattcgcagtgttggtcgcccaggtcctgttgttgatttcattccgactggagccagggacaacaccatgccaggtaatggcggtattgctccattatttttttttgtccgcattcgcctggatgctggtggagggtcttcatctgtactccatggtaataaaggtttttgggagcgaggattcaaaacaccgctattattacggtatgggatggggatttcctctgctgatctgcatcataagcctgtcattcgccatggatagctatgggacatccaataactgttggctttccctggcctctggcgcaatctgggcattcgtagccccggcactattcgtaattgtggtgaacatcggcattctgattgccgtgactcgggtcatctcccaaatatccgccgacaattataagattcatggtgacccctctgctttcaagctgaccgctaaagctgtggcggtgctactcccaatcctggggacaagctgggtattcggcgtcctggcggtcaatggctgcgctgtagtgttccagtacatgtttgccaccctgaattccctccagggcctgtttatcttcttgttccattgtctcctgaattccgaagtcagagccgcatttaaacacaagacaaaagtgtggagcttaaccagctcgtccgctagaacgagtaacgccaaacctttccattcagatctgatgaatggcacgagacccggaatggcatctactaagctgtcaccctgggacaagtctagccactcggcacatcgtgtcgatctttccgccgtgtag

SEQ ID NO: 188586 - DNA, 1275 bp, synthetic construct
  misc_feature 1..1275: note = Description of Artificial Sequence: Synthetic coding sequence
  source 1..1275: mol_type = other DNA
atgacccaggccggccggcggggccccggcacccccgagccccggcccaggacccaacccatggcatctcctcgactggggacattttgttgccctaccagagacgctgccacgcaattggttctgtccttccagccccgagcctttcacgccctatgcctcggcagcggtggcctgaggctcgctttggggctgttacagcttctccccggacgtcgaccagcagggcctgggtcgcccgccaccagcccccctgcctcagtgcggatcttgcgcgccgccgccgcttgcgacttgctagggtgtctgggcatggtaatccggtctacagtgtggcttggctttccgaattttgttgactccgtgagtgatatgaaccacactgaaatctggcctgccgccttctgtgtgggtagtgcaatgtggatccagctcttgtacagcgcctgcttctggtggctgttctgttacgcagtggatgcttatcttgtcataaggaggagcgctggcctttcgaccattcttctctaccacatcatggcctggggcctcgccaccctgttatgtgttgagggcgcagcaatgttatactacccatcagtttcacgctgtgaaagaggtctggaccacgccattccccactatgtcacgatgtatttgccactactcttagtgctggtcgcgaaccccatactctttcagaaaacggtgaccgcagtcgctagcctacttaaaggccgccaaggcatatacactgagaatgagagacgaatgggggccgtcatcaagattagattcttcaaaataatgctcgtgctaattatctgttggttatccaatattatcaacgagtcactgctattttacttagagatgcaaactgatatcaatggcggctccctgaagcctgtcaggactgcggcgaaaaccacatggtttattatgggcattctaaaccccgcccaaggttttttgttgagcttagccttctatggctggactggatgtagcctaggttttcagtcaccacggaaggagatccagtgggaaagccttacaaccagcgcagcagagggcgctcaccctagcccactgatgccgcacgagaatcctgcctctggcaaagttagccaggtcggaggtcaaacttccgatgaggcactgagcatgctatctgagggctctgatgcctctaccatcgaaatacacaccgcctcggagtcatgtaacaagaatgagggcgacccagccctccctactcacggcgatctgtag

SEQ ID NO: 188587 - DNA, 516 bp, synthetic construct
  misc_feature 1..516: note = Description of Artificial Sequence: Synthetic coding sequence
  source 1..516: mol_type = other DNA
atggtgatccggagcaccgtgtggctgggcttccccaacttcgtggattcagtgtctgacatgaaccacacggaaatctggccagcagccttttgcgtgggctcagctatgtggattcagttactttatagtgcttgcttctggtggctgttttgttatgccgtcgatgcctacctcgttatccgcaggtccgctggtctcagcaccatacttctctatcacatcatggcttggggtcttgcaaccctgctgtgcgttgaaggggcagcgatgctgtactacccaagtgtgtctcgatgcgagagggggttggatcacgccattccacactacgttactatgtacctccccctactcctagtgctcgtagccaaccccattctttttcaaaagacagttaccgctgtcgccagtttgctgaagggaagacaagggatctacactgagaatgaaagacgaatgggtgccgtgatcaagatccgatttttcaaaatcatgctggtgctcattatctag

SEQ ID NO: 188588 - DNA, 864 bp, synthetic construct
  misc_feature 1..864: note = Description of Artificial Sequence: Synthetic coding sequence
  source 1..864: mol_type = other DNA
tgaaccgccggccccgtgaccggcagcgccagccggggccccgcccgcggcccgaaaggcatggtcattaggagtacagtctggctcgggtttcctaacttcgttgacagcgtgtcagatatgaatcacactgaaatttggcctgccgcattctgtgtgggctctgccatgtggatacagctgttgtattctgcctgtttctggtggctcttttgttacgcggtggacgcctacttggtgatccgccgcagcgccggactctctaccattttgctgtaccatatcatggcctgggggcttgccacactcctgtgcgtggagggggccgccatgctgtattacccttccgtgagtaggtgcgagcgtgggttggatcatgccataccacactacgtgactatgtatttgccgctgcttttggttctcgtggccaatccaattctgttccaaaaaacagtaacagccgttgcatccttgctcaaaggaagacagggaatctacaccgaaaatgagaggcggatgggggcggtcatcaaaatccggttcttcaaaataatgctggtgttaattatctgctggcttagcaatatcatcaacgagagtttgcttttttacttggaaatgcagactgacatcaacggcggctccctcaaacctgtgagaaccgctgccaaaacaacttggttcatcatggggatcctgaatccagcccagggatttctgttaagcttggccttctacggctggacaggctgtagtctgggttttcagagcccccggaaagagatacagtgggagagcctaactacaagcgcagcagaaggcgcacacccatcccccctgatgccacatgaaaacccctag

SEQ ID NO: 188589 - DNA, 1215 bp, synthetic construct
  misc_feature 1..1215: note = Description of Artificial Sequence: Synthetic coding sequence
  source 1..1215: mol_type = other DNA
atggccagcccccggctgggcaccttctgctgccccacccgggacgcagccacccagctggtgctctctttccagcctcgcgcctttcacgcgttgtgtttgggttcggggggcttaaggctcgccctgggtctcttacagctgttaccaggtcgccgtcctgccggcccaggatcaccggcgacaagtcctcctgcctcagtacgcatcctgcgcgcggccgccgcttgtgacctgctcggttgcctgggaatggtaataaggtccacggtctggctgggttttccaaactttgtggacagtgtgtcagatatgaaccacactgaaatttggcctgccgccttctgtgtaggcagcgcgatgtggatacagttgctctacagcgcttgtttctggtggctgttctgttacgccgtcgatgcgtatcttgtgatccgtaggagcgctggtctgagcaccattttgttataccatatcatggcatggggcctggcaaccttactgtgtgtggagggtgccgccatgttatattacccttcagtgtctcgttgcgaaagaggactggaccacgcaattcctcattatgtaacaatgtacctgcccctcctcctggtgctggtggctaaccccatcctgtttcaaaaaaccgtaaccgccgtcgcgagcctgttaaaagggcggcaaggcatctatacagagaacgagaggcgcatgggagccgttattaagatccgattttttaaaattatgttagttctgattatctgctggctatccaatattattaatgaatctctgctgttttacttagaaatgcagactgatattaatggaggaagtttgaagcctgtgcgaacagccgccaaaactacttggtttataatgggcatcctgaacccagcgcaagggttcctgttaagtctggccttctacgggtggacagggtgctcactcggcttccaatctcccaggaaagaaatccaatgggagagtctaaccactagcgcagcggaaggcgcccaccccagccccctgatgccacacgagaaccccgcttcagggaaggtctcccaggttggcggacagaccagcgacgaagccttgagcatgctgagtgaagggagtgacgctagcacaatagagatccacacggcctccgaaagctgcaataaaaatgagggggatccagccctccctacgcacggagatctgtag

SEQ ID NO: 188590 - DNA, 1083 bp, synthetic construct
  misc_feature 1..1083: note = Description of Artificial Sequence: Synthetic coding sequence
  source 1..1083: mol_type = other DNA
atggaccccgaggagaccagcgtgtacctggactactactacgccacttctccgaatagcgacatcagggaaacacattcccacgtgccctacacatccgtctttttacctgtgttttataccgccgtctttctaaccggagttctaggtaatctggtgctgatgggcgccctgcactttaagcctgggagccggagacttatagacatcttcataatcaatctcgctgcttctgattttatcttcctcgtgaccctgcctctttgggtggataaagaggcgtcactcggcctctggcggactggatctttcctctgcaagggttcatcttacatgatttcagtaaatatgcattgctccgtcctgttgctgacatgtatgtcggtggatagataccttgccattgtttggccagttgtcagtagaaaatttcgccgcacagactgtgcatacgtggtttgcgcgtctatttggttcatttcctgcctgctcggtttaccgacgctcctgagtagagagttaaccctgatcgatgataaaccctattgcgcggagaagaaggctacacctattaagctgatctggagcctagtggctcttatttttactttctttgtgccactactgtctattgtgacctgctactgttgtattgctagaaaattgtgtgcccactaccagcagagtggtaagcataacaaaaaactgaaaaagtcaatcaagatcatatttattgtggtggcagcttttctcgttagctggctcccctttaatacatttaaattcctggctatcgtatctggactgcgccaggaacattatctcccctccgccatcctccagcttgggatggaggtttccggccctttggcatttgccaattcttgtgtgaacccatttatctattacattttcgactcctacatcaggcgggcaatagtgcattgcctgtgcccttgtctgaaaaattatgactttggcagcagcaccgagacgtctgactctcacctgaccaaagccctgtcaacatttattcatgcagaagacttcgcacgccggaggaagcgttccgtttctctgtag

SEQ ID NO: 188591 - DNA, 1830 bp, synthetic construct
  misc_feature 1..1830: note = Description of Artificial Sequence: Synthetic coding sequence
  source 1..1830: mol_type = other DNA
atgagcgacgagcggcggctgcccggcagcgccgtgggctggctggtttgtggagggttgtcactgttagctaacgcatgggggattctgagcgtgggcgcaaaacagaaaaaatggaaacctctagagtttctgctctgcaccctggctgctacccacatgttaaacgtagccgtgcctatagctacatatagtgtggtgcagttgaggcgccagaggccagacttcgaatggaacgagggtctgtgcaaagtctttgttagcaccttctataccttgacactggctacgtgttttagcgtaacgagcttgtcttaccatcgcatgtggatggtgtgttggcctgttaattacaggttgtcaaatgccaagaaacaggccgtgcacacggttatgggtatatggatggtgtcttttatcctatccgctctacctgctgtgggctggcacgacacatcagagaggttttacactcacggctgccgctttatcgtagccgaaatcggactgggcttcggcgtgtgctttctgctcttagttgggggcagcgtggctatgggagtcatatgtacagccattgccctgtttcagaccctcgccgtccaggtcggaagacaagccgacaggagggcattcaccgtgcctaccattgtcgtggaggacgctcaaggcaaaagaaggtctagcatcgatggctcagaacccgcaaagacaagcttgcaaactacaggacttgtgaccacaatcgttttcatttatgactgccttatgggctttcctgtgttggtggtgagcttcagttccctgcgggctgatgcctcggccccctggatggccctgtgtgttctttggtgcagcgtggcccaggccctgcttctgcctgtctttctctgggcctgtgataggtacagggccgacctcaaagctgtgcgggaaaagtgcatggcattgatggccaatgacgaggaaagcgacgacgagacctccctagagggcgggattagtcccgacctggtccttgagcgtagcttagattacgggtatgggggggattttgtagcactggaccgcatggccaagtatgaaatttctgccctggaggggggacttcctcagctgtaccccctgaggcctttacaggaggataaaatgcagtatttgcaagtgcccccaactaggagatttagtcacgatgatgccgacgtctgggctgctgtaccgctccctgcgtttctcccaaggtggggctccggggaagatctggcggcccttgctcacttagtcctgccagcgggccctgagcggaggcgcgccagtttactggcgttcgccgaggatgcacctcccagtagggcacgtcgcaggtctgcggaatcgctgttaagtctgaggccgtctgcgctggactccggtcccaggggtgcccgggatagcccacctggcagccctcgccgccggcccgggccaggcccccgctcggcttcagcaagcctcctccctgacgcctttgccctaacagcatttgaatgcgagcctcaggccctgaggcggcctcccggtccgttccctgctgcacctgcagcacctgacggagcggaccctggcgaggctcctactcccccatcctctgcccagcgcagtccgggaccgcggccttcagctcactcccatgctggctctcttaggcccggcctgtcagcctcttggggagagcccgggggcctgagggccgcaggcggaggcggctcaacatcaagcttcttatctagtccttccgaatcctcaggctacgccacactccactccgacagtctaggaagtgctagttag

SEQ ID NO: 188592 - DNA, 2445 bp, synthetic construct
  misc_feature 1..2445: note = Description of Artificial Sequence: Synthetic coding sequence
  source 1..2445: mol_type = other DNA
atggagcccgagatcaactgcagcgagctgtgcgacagcttccccggccaggaattggaccgtcgtcctcttcacgacctgtgtaagacaactattactagtagtcaccacagtagcaaaacaatcagcagcctgagtcccgtcctgctggggatagtgtggacattcctttcttgtggactgctgctgatactgttctttttggcgttcactatccattgtcgaaaaaacagaatcgttaagatgtcatcccctaacctgaatattgtgaccttgcttgggtcttgcttgacatattcttccgcctacttgttcggaatccaagatgttctggtaggatcttccatggaaactttgatccagacacgactgtccatgctttgcattggaacaagcctagtctttggtcctatcctggggaagagttggcggctgtataaagtcttcactcagcgggtccctgataaacgcgttattattaaggacctgcagctgttaggcctggtggccgcactgttgatggctgatgtgatccttttaatgacatgggttctcactgatcccatccagtgcctgcaaattcttagcgtgtctatgaccgtgaccggcaaggacgtctcttgtacctcaactagcacccacttttgtgcttccaggtatagtgacgtgtggatagcactgatctggggatgcaaaggattgctcctgctgtatggggcctatctggcaggcctgactggccacgtgtcaagtcctcccgtcaatcagtcattaacgataatggtcggggtgaacctactggtgctggcggcaggcctgttgttcgttgtgacaagatatctgcacagttggccgaacttggtgtttggcttgacttccgggggcatcttcgtttgtactaccacaattaactgcttcatttttatcccacaattgaagcagtggaaggcctttgaggaagagaaccagacaatcagacggatggccaagtatttttccacccccaataagtcattccacacccaatacggcgaagaagaaaactgtcacccgcgcggcgaaaaaagctcaatggagagattgctgactgaaaagaatgctgtgattgaatcactgcaggagcaggtcaacaacgctaaagagaaaatcgtccggctcatgtccgccgagtgtacgtacgacctgcccgagggagcagcgccccctgccagttccccgaataaagacgttcaagcggtagcctccgtgcatacgctcgctgcagcccagggacccagcggccacctgagcgattttcaaaatgatccaggaatggctgctcgcgacagccagtgtacgtccgggccaagctcatacgcccagtccctggaagggcctggcaaggactcctcattctcaccaggcaaggaggagaagatttctgactccaaggatttttctgatcacttggattcaggctgcagccaaaaaccttggaccgagcagagtctggggccagagcgaggcgaccaggtgccaatgaatccctcgcaatcactgctgccagaacgcgggggcagtgatcctcaacgccagcggcacctggaaaactccgaagaaccgcctgagcggaggagccgcgtaagttccgtcatcagggaaaagctccaggaggttcttcaggatcttggtctcggacccgaagcctcattgtcgacggctcctagttgccatcaacagacctggaaaaactccgcagccttcagtccacaaaagatgccgctatctaaggaattggggttctcaccctacatggtgcgcagaaggcgcgcggctcagcgcgcacggagccactttcctggaagcgccccaagtagtgtgggtcacagagctaatcgcaccgtacctggagcacattctagattacacgtccagaatggcgattcgccctccttagccccacaaaccactgactcccgagtgaggcgaccctcttcacgtaaaccgagtctcccaagcgacccacaagaccgccctggaacactcgagggctcaaagcagagccagaccgagccagaaggtgcacggggtagcaaagccgctttcctcagacagccgtccggctcaggccgggctccctctcctgccgccccctgcctttccaaagccagcccggatctccctgagcagtggcagctctggcctcctgtgcccagtggttgtgctagcttaagtagccagcactcttactttgacactgaatcttcttcttctgacgagttcttctgccgttgtcacagaccctattgcgagatctgcttccagtcctcctctgactcgtcagatagcggtacttccgatactgatccggagcccacagggggcctcgcatcttgggagaagttgtgggctcgcagcaaacctatagtaaatttcaaagatgacctgaagcccactctcgtttag

SEQ ID NO: 188593 - DNA, 2445 bp, synthetic construct
  misc_feature 1..2445: note = Description of Artificial Sequence: Synthetic coding sequence
  source 1..2445: mol_type = other DNA
atggagcccgagatcaactgcagcgagctgtgcgacagcttccccggccaagaattagaccgccgccccctgcatgatctatgcaaaactactataacctcttcccaccacagctccaaaaccatttcatctttatctcccgtgctccttgggattgtatggacatttctaagctgtggcctgctgctgatcctttttttcctcgcttttactattcactgtagaaagaatcggatcgtgaagatgagttcacctaatctgaacatcgtgaccctgctgggatcctgtcttacttactcttctgcttatctgtttggtatccaggatgtcttggtaggctcgtcaatggagaccctcatccagaccaggctgagcatgctttgtatcggcacaagcttagtgtttggacccattctgggcaaaagctggagactttataaagtattcacacaacgagtgcccgacaaaagggtgatcataaaggaccttcagctgctcgggctagtggccgccctcttaatggccgacgtgattctgctgatgacatgggtgctgactgaccccattcagtgcctgcagatcctctccgtgagcatgacagtaaccggcaaggacgtctcctgcacaagcacatccacccatttttgcgcaagccgttacagtgacgtttggatcgcactgatctggggatgtaaaggtctgcttcttctatatggcgcatacctagcaggactgactggacacgtttcttcgccacctgtgaatcagagtctcacaatcatggtgggcgttaacctgctggtgcttgcagctggcctcctgtttgtggtgactcgatatttacattcctggcccaacctggtttttggactcaccagtggcggcatctttgtgtgcaccacgacaatcaactgttttatcttcatccctcagctcaaacagtggaaggcatttgaagaggaaaatcagacaatacggagaatggccaaatacttctctacaccaaacaaatccttccacacccagtacggagaagaagaaaactgccatccccgtggcgaaaaatcttctatggagaggttgctgacggaaaaaaacgccgtcatcgaatccctgcaggaacaggtcaacaacgccaaggaaaaaatcgtgcgcttaatgagcgcagaatgcacctatgatttgccagaaggcgccgcccctccggccagttcccccaacaaggacgtccaggcggtagcatcggtgcatactcttgctgctgctcagggcccctcaggccacttgtcagatttccaaaatgatcctggaatggccgctcgcgattcccaatgtacgagcggcccaagctcttacgctcagtcgctcgaaggtccagggaaagacagcagttttagccctggaaaagaagaaaagatcagcgactcaaaggatttctccgaccatttggactcaggatgtagtcaaaaaccatggacggagcagtccctcggacccgagaggggggaccaagtgccaatgaacccaagccagtccctgcttccagaacgcgggggatccgatcctcagaggcagcgtcacctagagaacagcgaggagccccccgaacgaagaagccgcgtgtcgtcggtgatcagggagaagcttcaggaagtgctccaagacctgggcctaggccccgaggcttcactgtccactgcaccttcctgtcaccagcagacctggaagaatagtgccgccttcagtccacagaagatgcccttgtccaaggagcttggcttctccccctatatggtccgcagacggagagctgcacagcgtgcccggtcccacttccctgggtccgctcccagttcggtgggccaccgagctaacagaaccgtacctggagcacacagtcgcctccacgtccagaatggcgactctcctagcctggcaccgcagactactgactccagggtcagacgaccaagtagtcggaagccttccctccccagcgatcctcaggacagaccaggcacccttgaaggctcgaagcagtcacagaccgaacccgaaggggctagggggtccaaggccgccttcctgagacagccgagcggcagcggtagggcaccaagtcctgccgccccgtgcctctccaaagctagccctgacttgcccgagcagtggcagctttggcctccagtgccaagtggatgcgcatctctttcctcgcagcacagttattttgatactgagtcgtccagcagtgatgaattcttctgcagatgccaccgtccttattgcgagatctgttttcagagctcttcagatagctcagactctgggaccagcgacacagacccggagcctacggggggcctcgccagttgggagaagttatgggctaggtccaagccaatcgtcaactttaaggacgatctgaaacccactctcgtgtag

SEQ ID NO: 188594 - DNA, 2433 bp, synthetic construct
  misc_feature 1..2433: note = Description of Artificial Sequence: Synthetic coding sequence
  source 1..2433: mol_type = other DNA
atggagcccgagatcaactgcagcgagctgtgcgacagcttccccggccaggagctggatcgtcgaccgctgcatgacctttgcaaaacgaccatcacctcttcccatcattcctctaagactatctctagcctctcgcccgtactcctggggatcgtttggacctttctaagctgcggtctccttctgattcttttcttccttgcttttactatacattgcaggaagaacagaattgtgaagatgtccagtcccaacctgaacatcgtgaccttactcggatcttgtctaacttattcgtccgcttacctgtttggaattcaagatgtgttagtgggctccagcatggaaactttaatacagacccgattgagcatgctctgcatcggaacatctttagttttcggtccaatccttggcaagtcatggagactctataaggtcttcacccaaagggttcctgataagagggtgatcatcaaagacctgcaactgctcggattagtggctgctctgctcatggcagatgtgatcctactgatgacctgggttcttactgatcccattcaatgccttcagattctttcagtcaccggaaaagatgtctcttgcactagtacctccactcacttttgtgccagtcgatatagcgacgtgtggattgccctgatttggggttgcaaaggattgttgttgctgtacggggcgtatctggcggggctaacaggtcatgtatcctcccctccagtgaaccagtccctgacgatcatggtgggtgtgaacttgctggttcttgccgctggtctcttattcgtggttacccggtacctccacagctggcctaaccttgtgttcgggctaacatcaggtggaatcttcgtctgcacgaccacaataaattgtttcatatttataccacagttgaagcagtggaaggccttcgaagaagagaatcaaaccattcgcagaatggccaagtacttctccacccccaataagagttttcatacacagtatggtgaggaggagaactgtcacccaagaggagagaagtcgtcaatggagcgattgcttacggagaaaaacgccgtcatagagtctctccaggaacaggttaacaatgctaaagagaaaatagttagactgatgtcggccgaatgcacatacgatctccctgaaggcgccgcgccacctgcctcctcacccaataaagatgtgcaggcagtcgcctccgtgcacaccctggcagccgcccagggaccttctggccacctatcagactttcagaacgaccctgggatggcggccagggacagccagtgcactagcggtcccagttcatatgcacaatcccttgaaggacctggtaaagattcttcattctctccaggcaaagaagagaagatttcggactccaaggactttagcgaccatcttgactcaggatgcagccaaaaaccttggaccgagcagtctcttggccccgagcgcggtgaccaagtacccatgaatccctcccagtcgttgctccccgagcgcggcggcagcgaccctcagcgacagcgccacctggagaactccgaagagccccctgagcgtcgcagtcgagtgtcctctgttattcgagagaaactgcaggaggtgcttcaggacttggggctgggacccgaggctagcctctcgacagcgccatcgtgccaccaacaaacatggaaaaattccgccgcctttagcccccaaaagatgcctttgagcaaggagctggggttcagtccctatatggtgagaagaaggagggcggcacagagagccagaagtcattttcccgggtccgccccttccagtgttgggcaccgtgcgaaccgcaccgtccccggggcccattcgcgactacacgtccagaatggggacagccctagcctagccccccagaccaccgactcacgggtcagaaggcctagcagccggaagccatccttacccagtgatccgcaggatcgacccgggacattggagggcagcaaacaatcgcagacagagcccgagggcgcgcgaggctcaaaagcggcgtttctcagacagccgtctggcagcggccgcgccccttcgcccgcggctccttgcctgtcaaaggcctcccccgacctcccagagcaatggcagctatggccacctgtaccctccggatgtgcctccttaagtagccagcattcctacttcgacaccgagagttccagtagtgacgaatttttttgccgttgccatcgcccttattgcgagatttgcttccagtcatccagtgacagctcagattctgggacctcagatacagacccagagccaacaggaggtctggcctcatgggagaagctctgggccagaagcaaaccaatcgtaaattttaaggatgaccttaagcccacactcgtgtag

SEQ ID NO: 188595 - DNA, 1590 bp, synthetic construct
  misc_feature 1..1590: note = Description of Artificial Sequence: Synthetic coding sequence
  source 1..1590: mol_type = other DNA
atgagcctgaacagcagcctgagctgccggaaggagctgagcaaccttaccgaggaggagggaggcgaagggggggtcatcatcacacaattcattgcaatcattgtgatcactatcttcgtgtgtttggggaacctggtaatcgtggtgaccctctacaaaaagtcttatttattaacattgtccaataagttcgtgttctcccttaccctgagcaacttccttctgtcggtccttgtcctgccatttgttgtcacttcgtcaatccgtagagaatggatttttggcgtcgtttggtgtaattttagtgctctcctgtatctcttaatcagttctgccagtatgttaaccttgggcgtcatcgccatcgatagatattatgcagtgctataccccatggtgtacccaatgaagattaccggcaaccgcgcagttatggctctggtctatatatggctccactcactcatcggttgcctcccccctctgtttgggtggagcagcgtagagttcgacgagttcaaatggatgtgtgtggccgcttggcaccgggagccggggtacactgctttttggcagatatggtgcgcgttgttcccatttctagtgatgctcgtgtgctatggcttcatatttagggtggcaagagtgaaagctcgtaaagtccactgcggcacagttgttattgtggaagaagatgcccagagaacgggacggaagaatagtagcacatccacgagcagctcaggaagccgacgtaacgccttccagggagtggtatactctgcgaaccagtgtaaggcactgatcaccattctcgtcgttctcggagccttcatggtgacttgggggccttatatggtggtgattgcctctgaagctctgtggggcaaaagttcggtctcaccgtcactagagacttgggccacatggctgtcttttgcaagcgctgtgtgtcatccattaatctacggcctgtggaataaaactgtacgaaaagaactgctgggaatgtgcttcggcgacagatactatagggagcccttcgtccagcgccagcgtacatcccggctttttagcataagtaacagaatcaccgacctaggcttaagcccccatctgacagcactgatggctggaggccaaccgctcgggcactcctccagtacgggcgacacaggtttctcgtgctcccaagatagtggaaccgatatgatgctgctggaggattacacaagtgacgacaaccctccgtctcattgcacctgtccgcctaagaggcggtcgtcggtgacattcgaagacgaagtcgagcagattaaagaggctgccaagaactcgatcctgcatgtcaaagcggaagtgcacaagtccctggacagttacgcagcttcccttgctaaagccattgaagccgaggccaaaatcaatttatttggggaggaggctctgccaggcgtcctggttaccgctagaacagtgcccggaggtggtttcgggggccgcagagggtcaaggaccctggtgagccaaagactgcagcttcagtctatcgaggaaggcgacgtcttggctgctgagcagaggtag

SEQ ID NO: 188596 - DNA, 1590 bp, synthetic construct
  misc_feature 1..1590: note = Description of Artificial Sequence: Synthetic coding sequence
  source 1..1590: mol_type = other DNA
atgagcctgaacagcagcctgagctgccggaaggagctgagcaacttgacggaagaggagggcggtgagggaggcgtgattatcacacagtttattgcgattatagtgatcacgatcttcgtgtgtctaggtaacctggtcatcgtggtgacattgtataagaagtcttaccttctcactctgagtaataaatttgtgttcagcctcaccctatctaactttctgctcagcgtgctggtactgccgttcgtggtgactagcagtatccgcagggagtggatattcggggtagtctggtgtaacttctctgctctactgtacttacttatatcctcggcctccatgctcactctcggcgtgattgctatagaccgctattatgccgtactctatccaatggtgtatcctatgaagatcactgggaacagagccgtcatggcgctcgtctacatatggctgcattcacttattggttgcctgccaccgctgtttggctggtctagtgtagaatttgatgaatttaaatggatgtgcgtggctgcatggcaccgcgagcccggctacaccgcattctggcaaatctggtgcgctctttttcccttcctggtgatgctcgtttgctacgggttcatcttccgtgtggcgagagtcaaagctaggaaggtgcactgtggaactgtagtgatagtcgaggaggatgctcaacggaccggaaggaagaattctagcactagcaccagttcttccggctctcgtcggaacgccttccagggagtcgtctattccgctaaccagtgtaaggctctgattactatccttgtggtgctgggagctttcatggtgacatggggcccctatatggtggtgatagccagcgaggcactatggggtaaatcgtccgtgagtccatccctagaaacttgggctacttggctgtcattcgcctccgctgtgtgtcatccacttatttacggcctctggaataaaacagtccgaaaggagctgctgggtatgtgttttggggaccgatattacagggagccgttcgtgcaacggcagcggaccagtcgcctcttcagtatcagcaacagaattacagacctgggcttatcgcctcatcttaccgctctaatggctggcgggcagccgctcggccactctagttcgaccggggatacaggattctcatgtagccaggactccggcaccgacatgatgctgttggaagattacacgtctgacgacaatcctccgagccactgtacctgcccaccaaagcgccggagttcggttactttcgaagacgaggtcgagcagatcaaagaggccgcgaaaaacagtatcctgcacgtcaaagctgaggtgcataagtccctagacagctacgcagcatccctggctaaggctatcgaggccgaggccaagatcaatttgtttggggaggaagccctgccgggggttctagtgacggcccggactgttccagggggaggctttggcgggcgcagaggaagcagaacacttgttagtcaaaggctgcaattgcagtcaatcgaggaaggggacgtcctggcggccgagcaacgctag

SEQ ID NO: 188597 - DNA, 1590 bp, synthetic construct
  misc_feature 1..1590: note = Description of Artificial Sequence: Synthetic coding sequence
  source 1..1590: mol_type = other DNA
atgagcctgaacagcagcctgagctgccggaaggagctgagcaacttgacagaagaggaaggaggcgagggcggggttattataacgcagtttatcgctatcatcgtcataacaatattcgtgtgtcttggcaatctcgtgattgtagtgaccctgtataagaaatcctatctgctcaccctttcgaataagtttgtctttagcttaactctgtccaacttcctgctgagcgtcttagtgctaccatttgtggtgacttcttctatccgcagagagtggatcttcggcgtggtatggtgcaacttcagcgctctgttgtacctgctgatctcttccgcatctatgctcaccctcggtgtgatagccatcgatcgctactacgcagtgctttatcccatggtgtaccctatgaaaatcaccgggaaccgggctgtgatggctttggtgtatatctggttgcactccctcatcggctgcttacccccattatttggatggtctagtgttgaattcgatgagtttaagtggatgtgcgttgcagcatggcaccgagagccaggatatactgctttttggcagatttggtgcgccctatttcccttcctagtgatgcttgtgtgttatggtttcatctttcgagtggctcgcgtgaaagcacgcaaagtgcactgcggcactgtcgtaatagtcgaggaagacgcacagcgcacaggaaggaagaactcctctacatcaacttcaagtagtggtagcagaaggaatgccttccagggcgttgtttactccgcaaatcagtgcaaagctctgatcactatcctggtggtgctgggggcctttatggtgacgtggggcccctatatggtggtgatagcttcagaagccctctgggggaagtcatccgtatcacctagtcttgagacatgggctacttggttgagtttcgccagcgccgtttgccaccccttaatctacggactctggaataaaacagtccggaaggagctgctcggtatgtgttttggggatcgctactacagggaaccgttcgtgcagagacagagaacctctcgactgttttctataagcaataggatcacggacctgggccttagcccccacctgaccgcacttatggctgggggtcaaccattgggtcattcaagttctactggcgatacggggttctcttgttctcaggattcagggactgatatgatgctgctggaagattacacctccgatgacaatccaccctctcactgcacttgcccccctaagaggcgcagctcagtgacattcgaggatgaagtggaacagatcaaggaagctgctaagaactccatccttcacgtgaaggctgaggtacataagtcccttgactcctacgctgcgtctctagccaaagcgatagaagccgaggccaaaattaacctgtttggtgaagaggccctgccgggtgtgctggtgacagcacgtactgtgccggggggggggttcggagggagacgcgggagccgcaccctggtgagccagcggctccagctccagtccatcgaggagggagacgtgctcgcagcagaacaaagatag

SEQ ID NO: 188598 - DNA, 1590 bp, synthetic construct
  misc_feature 1..1590: note = Description of Artificial Sequence: Synthetic coding sequence
  source 1..1590: mol_type = other DNA
atgagcctgaacagcagcctgagctgccggaaggagctgagcaacttaacagaagaagaagggggggaaggcggagtgattattacgcagttcatagcgattattgtgataacaatctttgtctgcctgggaaatcttgtcattgtggtgacattgtataaaaaaagctatctcctgaccctgtccaacaagtttgtattctccctgacattgagcaacttcttgctgtctgtgctggtgttgccatttgtggtaacatcgagtatcagaagagagtggattttcggcgtcgtttggtgtaacttcagtgcactgctatatctgctgatcagcagtgcttccatgctgacgctgggggtgattgccatagaccgatactacgcagtcctatatcccatggtttaccccatgaagataaccggcaacagggccgtgatggctctggtctacatttggctgcacagcctcatcgggtgtctcccccctctcttcggatggtcctcagtcgagttcgatgaattcaagtggatgtgtgtggccgcgtggcacagggaacccggttataccgcattttggcaaatttggtgcgcacttttcccgtttctggtaatgctcgtgtgctacggtttcatatttagagtggctcgagtgaaggcgcgcaaggttcactgcgggaccgtggttatcgtagaggaggacgcccaaagaaccgggcgtaagaatagtagtaccagcacatcgtctagtgggtctcggagaaacgcctttcagggggttgtgtacagcgctaaccagtgcaaggccttaattacgatcctggtggtgctgggggctttcatggtgacttggggtccatatatggtggtgatagcatctgaagcactttggggcaaatcttcagtgtcgccatccctggagacatgggccacttggctgagctttgcttcggcagtgtgtcaccctctgatatatggactgtggaacaagaccgtccgcaaggagctgttaggcatgtgctttggcgaccggtactaccgggagccctttgttcagaggcagcgcacgtcgagactgttttcaatttctaaccggatcacggatctgggattatctcctcaccttacggcccttatggcaggtggacagcccctgggtcactcttcaagcaccggggacactggttttagctgttcacaggacagtggaactgatatgatgcttttggaggactacacgtccgatgataacccccccagtcactgcacctgcccgcctaagcggcgcagctccgttacttttgaggacgaagtcgagcagattaaggaagcagccaaaaatagtatcctccacgtgaaagcagaggttcataagtccttagactcatacgccgcatccctggcaaaagccatcgaggctgaggctaagattaacttgttcggtgaagaagccctacccggcgtgctggtcactgcccggacggtgccgggcgggggattcggcggccgacggggctctcgaaccctggtgtcccagcgactccagcttcagtctattgaggagggcgatgtgctggcagcggaacagaggtag

SEQ ID NO: 188599 - DNA, 1650 bp, synthetic construct
  misc_feature 1..1650: note = Description of Artificial Sequence: Synthetic coding sequence
  source 1..1650: mol_type = other DNA
atgagcgcccggggcgtggtgcagcacgccctgcccaccccccggcgaggggcattgacgatgtcactgaatagcagcctgtcttgccgtaaggagctgagcaaccttactgaggaggaaggtggtgaaggaggagttatcattactcagttcatagcaattattgtgatcacaatttttgtgtgcctgggcaatttggtgatagtggtgaccctgtataaaaagtcctatctcttaactctctctaataagttcgtgttctccctgacgctatccaatttcctcttgtccgtgctggtccttccctttgttgtgaccagttctatcaggagggagtggatttttggcgttgtgtggtgcaacttttccgccctgctgtatctgcttatcagtagcgcctcaatgctgacattaggcgtgattgccattgatcgctactacgccgtgctgtatccgatggtttatcctatgaagattactggtaaccgagcagtaatggctctggtttacatctggctgcattctctgatcggatgccttccaccactcttcggttggagttctgttgaattcgacgaatttaaatggatgtgtgtggctgcctggcaccgggaacctggctatacggctttctggcagatctggtgcgccctgttcccgttcttggttatgctcgtatgctatggttttattttccgcgttgcgcgggttaaggcccgaaaggtccattgcgggactgtggtaatcgttgaggaggatgctcagcggacgggcaggaaaaactccagtaccagcactagctcatccgggtctaggagaaatgctttccagggagttgtgtacagtgctaatcagtgtaaagctctaatcacgatactggtggtgctgggcgcatttatggtaacatggggtccttacatggtggtcatcgcgtctgaagccctttggggaaagtcctctgtttcgccgagcctagaaacatgggctacatggctatcctttgcgtcagcagtgtgccaccctttgatctatggtctgtggaataagaccgtgcggaaagaactactgggaatgtgtttcggagataggtactaccgtgaaccattcgtgcagcggcagagaaccagtcgactgttttctatcagcaataggataactgacttaggcttgtccccacatttgacagctctcatggccggtggacagcccctgggccatagttcttcaacgggagatactggattctcttgtagtcaagactcaggtacagacatgatgttgctggaggattacacctctgatgacaatcctccgagtcactgcacatgcccgcccaaaagacggtcctcagtgaccttcgaggacgaagtcgagcagatcaaagaagctgcgaagaattccatcctgcacgtcaaggcggaagtgcacaaaagtctggattcttacgctgcctccctggccaaggctatcgaggccgaggcaaaaatcaacctcttcggggaggaggcactcccaggggtcctggttactgccaggaccgtgccaggaggtggcttcggggggcggcgtggatcccggactctagtttcacaacgcctccaactgcagtccattgaagagggtgacgtgcttgccgccgaacaacgctag

SEQ ID NO: 188600 - DNA, 1356 bp, synthetic construct
  misc_feature 1..1356: note = Description of Artificial Sequence: Synthetic coding sequence
  source 1..1356: mol_type = other DNA
atgggcggccggcggtgcgtgcccggcaccctgcccatgcgggccgcccctccgggagccaaacgcctccacgtgccgctgcgcgccaaaggggtgggaaggagtggccacgctcctagattggaatcggtgcggacatcctattatgcagtcctttaccctatggtgtacccaatgaaaatcaccgggaacagagctgtgatggccttggtgtatatctggttgcactctctgattggatgcctcccccccctatttggctggagctcggtagagtttgacgagttcaagtggatgtgcgttgctgcctggcacagggaaccaggctacaccgctttttggcagatctggtgcgcgctgtttccattcctcgtcatgctggtgtgctacggtttcatctttcgcgttgctagagttaaggccaggaaggtgcactgcggtactgttgtcattgtagaggaagatgcccagcggacggggagaaaaaattcctccacttcaacaagctctagcgggtcacggagaaacgctttccagggagtggtttactcggccaaccagtgtaaggcattaatcacgattctggtggttctgggagcgttcatggtcacatgggggccctacatggttgtcattgctagcgaagccttatgggggaagagtagcgtaagcccctccttagagacatgggcgacgtggctctctttcgcctctgctgtgtgccatccactaatctatggcctatggaacaagacagtcagaaaagaactgctgggtatgtgttttggggatcggtactacagggagccgtttgtgcaaagacaacgcacatccaggctgtttagtatctccaaccggatcaccgatctcggcctctccccccacctaaccgccctgatggccgggggacaacccctcggtcactcctcttcaacaggtgatacagggttttcctgtagtcaagattccggaactgatatgatgctgctcgaagattatacttccgacgataaccctccttcacactgcacgtgccctcctaaaaggcggagcagtgtcacgtttgaagacgaagttgagcagatcaaagaggctgccaagaactccatcttacatgtgaaggctgaggtacacaagtcactggacagttacgctgcgtctctagccaaggccattgaagcggaggctaaaatcaatttgttcggagaggaggctttgccaggagtgctcgtgacagctcggacagtccctggtggcggcttcggggggcgtcgcggctccagaacactggttagtcagagacttcagctccagtctattgaggagggcgacgttctggctgccgagcaacgctag

SEQ ID NO: 188601 - DNA, 1248 bp, synthetic construct
  misc_feature 1..1248: note = Description of Artificial Sequence: Synthetic coding sequence
  source 1..1248: mol_type = other DNA
atgctggtgcccgtgggctggatgaacgagagctactacgccgtgctgtacccaatggtttatccgatgaagattaccgggaacagggccgtcatggctctggtgtatatctggcttcattccctgatcgggtgcttaccaccactgttcggatggtcatcagttgaattcgatgagttcaagtggatgtgtgtggctgcctggcaccgggagccaggatatacggccttttggcagatctggtgtgctctgtttcctttcctggtgatgctagtgtgctacggtttcatttttagagtggccagggtcaaagctcgcaaagtccattgcgggaccgtggtcattgtggaggaagacgcccagcgtacaggtcggaaaaactcatcaacatcaacaagttccagtggtagcaggagaaatgccttccagggcgtagtgtatagtgcaaaccaatgtaaagccctcattactatattagtggtgctgggtgcctttatggtgacgtggggtccttacatggtggttatagccagcgaggccctctggggaaagtcctccgtcagtccttcccttgagacctgggctacttggctttcctttgcctccgccgtctgccaccccctgatctatggcctgtggaacaagacggtccgcaaagagctgctggggatgtgttttggagaccggtactacagggagccatttgtgcagaggcagcgcacatcgcgtctgttttctatttctaataggatcactgacctgggactatcaccgcacctaaccgcgctgatggcgggtggacaaccactaggccacagctctagcacaggggatactggcttctcatgttcacaggactctggcacagacatgatgctgcttgaggattatacctctgacgacaatcctccatcccattgcacctgccccccaaaaagaaggtcgagtgtcacgttcgaagatgaggttgaacagatcaaggaagccgccaagaatagtatcctgcacgttaaggccgaagtgcataagagcctggattcctacgctgccagtctggctaaggccatcgaagcagaagccaaaattaacctgttcggggaagaggctttgccgggggtgctcgttactgcccggacagtgcctgggggcggtttcggcgggcggagaggcagccggacactggtgagccagcggctccaacttcagtccatcgaagagggagatgttcttgcagcagaacaaaggtag

SEQ ID NO: 188602 - DNA, 1104 bp, synthetic construct
  misc_feature 1..1104: note = Description of Artificial Sequence: Synthetic coding sequence
  source 1..1104: mol_type = other DNA
atgagcaagcggagctggtgggccggcagccggaagcccccccgggagatgctgaagcttagtggatctgacagttcccagagcatgaacggcctcgaggtggcgccgcctggacttatcacaaatttctccctggccacagccgaacagtgtggacaggagactccacttgagaacatgctattcgcctccttttacttgttggacttcattctggcgctggtcgggaacaccttggctttgtggcttttcattcgggaccacaagtccggaacccccgccaatgtatttctgatgcacctcgctgtcgctgatctttcgtgcgtcctggtacttccgacccgcctcgtataccacttttcgggaaaccactggccattcggcgagattgcgtgccggctcaccggcttcctgttctacctcaatatgtatgcctccatctatttcctaacctgcatcagtgccgatcggttcctggccatcgtgcacccggtgaagtctctgaagctgcgcagacctctgtacgcgcatctggcttgtgctttcctgtgggtcgttgtggctgtcgctatggctcctctgcttgtgagtccccaaaccgtacaaactaaccacacagtggtgtgcctgcaactgtaccgagaaaaggcatcccaccacgctctcgtcagtctggccgtggcctttactttcccttttattacaaccgttacttgttaccttttgatcattcgaagtcttagacaaggcctgagggtggagaaacggcttaaaacaaaagccgtgcggatgattgcaatcgtcctggctatcttcctcgtatgcttcgtgccgtaccacgtgaacaggtccgtctacgtcctccattatcgatcccacggcgccagctgtgctactcaacgtatcctcgcactggcaaaccggattacgagctgccttactagtctgaacggagccctggatccaatcatgtatttttttgtcgccgaaaaatttaggcacgcactatgcaacctgctgtgtggcaagcgattaaaggggccaccaccgagttttgaggggaaaaccaacgagtcctccctgtccgccaagagcgagctctag

SEQ ID NO: 188603 - DNA, 312 bp, synthetic construct
  misc_feature 1..312: note = Description of Artificial Sequence: Synthetic coding sequence
  source 1..312: mol_type = other DNA
atgaacggcctggaggtggccccccccggcctgatcaccaacttctcccttgctaccgccgagcagtgtgggcaggagacacccctagaaaatatgcttttcgcatctttctatctgccacttcccagacaaccgaggatgtgcacagtcacagggctcactgccgggtctaccgcccgatccaaacagcacctcgaagttgtcttcgccgtgttacccgctttcaaactccaacggggtagaagagaacgcacaagcaagccacccatcattcccatgtcttctccaggaccttgttgggttagaacctag

SEQ ID NO: 188604 - DNA, 1104 bp, synthetic construct
  misc_feature 1..1104: note = Description of Artificial Sequence: Synthetic coding sequence
  source 1..1104: mol_type = other DNA
atgagcaagcggagctggtgggccggcagccggaagcccccccgggaaatgttgaaactgtctgggtcagattctagtcagtcaatgaacggactagaagtggctccaccggggctgattaccaactttagtctcgcaaccgcagaacaatgcggccaggagacccccctggaaaatatgttgttcgcgtccttctacctgctggacttcatcttggcgctagtggggaacactctagccctgtggctcttcatacgggatcacaaaagcggaactcccgcgaacgtgtttcttatgcacttggctgtcgccgatctgagctgcgtactggttcttccgacgcggctagtgtaccatttcagtgggaatcattggcctttcggggagatcgcctgtaggctgaccgggttccttttctacctgaatatgtacgcgtctatttattttctcacatgcatcagcgcggacaggtttctggccatcgtgcaccctgtgaaaagcctcaagcttagaaggcctctttacgcgcatctcgcttgcgccttcctgtgggtggttgtcgcggtcgcaatggcgcccttgttggttagcccccaaacagtccagaccaatcacaccgtagtgtgtctgcagttgtaccgggagaaagcgagccaccatgctttagtgtctctcgctgtcgcctttactttcccctttatcacgaccgtaacctgttacttgctgataattcgtagtttacgccaaggactgagagtggagaagcgactgaagacgaaagctgtcagaatgattgctatcgtgcttgcaatcttcctggtctgtttcgtgccgtaccacgtgaaccgatctgtatacgttttgcattacagatcgcatggtgccagctgcgcaacccaaagaatcctggctctcgccaatcgaataacaagctgtctgactagcctcaacggagcactcgaccctattatgtatttttttgtcgccgagaaatttagacatgcgctgtgtaatctgctgtgtgggaagcgtctcaagggccctcctccaagctttgaagggaaaacgaatgagagctcgctcagcgctaagtccgagttgtag

SEQ ID NO: 188605 - DNA, 411 bp, synthetic construct
  misc_feature 1..411: note = Description of Artificial Sequence: Synthetic coding sequence
  source 1..411: mol_type = other DNA
atgagcaagcggagctggtgggccggcagccggaagcccccccgggagatgctcaagctgagtggttcggatagttcccagtcaatgaacggccttgaggtggccccgcccggtttgataacgaacttctccctggcaacagccgaacagtgcggccaagaaactccactggaaaacatgcttttcgcttcattctatctgctagacttcatcctggccttggtgggcaatactcttgctctgtggctgttcattagggaccacaaaagtgggacgcctgcaaacgtatttctgatgcacctggccgtcgcagacttgagttgtgtactggtgctccccaccaggctggtgtaccatttctcaggcaaccactggcctttcggtgagatcgcttgccgtcttacaggttag

SEQ ID NO: 188606 - DNA, 1104 bp, synthetic construct
  misc_feature 1..1104: note = Description of Artificial Sequence: Synthetic coding sequence
  source 1..1104: mol_type = other DNA
atgagcaagcggagctggtgggccggcagccggaagcccccccgggagatgctcaaactgtcagggtccgatagcagccagagtatgaacggcttagaagtcgcacctccaggcctgataaccaatttttcgttagccacagctgaacagtgcgggcaagagacgccacttgaaaatatgttgtttgcgtccttctatctcctggacttcatcctggcgcttgtggggaacaccttggctctctggttattcattcgggaccataaatcaggtacccctgccaacgtgttccttatgcacctcgcagttgctgacttatcatgtgtgctggttttgccaactagactcgtgtaccactttagcgggaatcattggcccttcggggaaatcgcttgccggctcacaggcttcttgttctacctaaatatgtacgcatccatctactttctgacctgcatctccgcggacaggttcttggcgatcgttcaccccgtaaagagtctgaagctccgtcgtcctctatacgcccacctggcctgtgcattcctatgggtcgtcgtggctgtggccatggccccactgctcgtcagtccacagactgtccagaccaatcacacagtggtttgtttacagctataccgggagaaagcctcccaccacgccctcgtaagccttgccgtggcgtttacctttccatttattaccacagttacatgttacttactaatcatcagaagtctgcggcagggcctgcgtgtggagaagcgcttaaagacaaaagccgttcgaatgattgctatcgtgttggccatctttcttgtctgctttgtcccttatcatgtgaaccggagtgtctatgtattgcactaccgctcgcatggcgcatcatgtgcaacacaacgaatactcgcactggcaaacagaattaccagctgccttaccagtttgaatggggcactggatcctatcatgtacttctttgtggccgagaagttccgccatgcactctgcaacctcctatgtggcaagcgcctcaagggtcctcctccgtccttcgaaggaaaaacaaacgagtcgtcacttagcgctaagtcagagttgtag

SEQ ID NO: 188607 - DNA, 1338 bp, synthetic construct
  misc_feature 1..1338: note = Description of Artificial Sequence: Synthetic coding sequence
  source 1..1338: mol_type = other DNA
atggccgcccccacccccgcccggcccgtgctgacccacctgctggtagcactgtttgggatggggagctgggcagcagtaaatgggatatgggtggagctgcccgtggtcgtgaaggaactgccagaggggtggtctctcccttcctacgtcagcgtcctcgtggcacttggaaatttaggcctccttgttgtcacactgtggcggcgcctggcacccggtaaggacgagcaggtgccaataagagtagtccaggtgctcggcatggtgggaaccgcactcctcgcatccttgtggcaccatgttgctcctgtggccgggcagctccattcggtcgctttcttggctctggcattcgtgcttgcgctcgcctgttgtgcctctaacgtgacctttctccccttcttgagccatctacctcccaggttcctgaggtccttctttctcggccaaggcctctctgcgttactgccttgtgtccttgccctggtccagggcgtggggaggctggagtgtcccccagcgcccataaatggtacccccggcccaccgctggactttctggaaaggtttcctgcgtcaactttcttctgggccctgactgcgctcctcgtagcgagcgccgccgcatttcagggtctgctactactgttacctccacctccttctgtgcctaccggggaacttggctcaggactgcaggtaggggccccaggtgccgaggaagaagtcgaggagtcttcacctctgcaggaaccaccatcacaagcagctggtacgacccctggtccagatcctaaagcttatcagctgctgagcgcgcgctccgcttgtctgttgggtctgcttgctgcgactaacgcgctgactaatggcgttcttccagccgtgcagtctttttcttgtcttccatacgggcgcttggcgtatcacctggccgtggtgttgggatccgcagcgaacccacttgcttgctttttagctatgggtgtactttgcagaagccttgccgggctgggcggcctgtccttactcggagtcttctgcggagggtacctgatggcgctcgccgtgctgtctccctgtcccccattggtgggcaccagtgctggtgtagtgcttgtggtcctatcttgggtcctgtgtctgggcgtgttcagctacgtcaaggtggctgctagttccttactccacggcgggggcagacctgctctgctggccgcaggcgtggccatccaggtcggatctctccttggcgccgtcgccatgtttccccccacttctatctaccatgtctttcactcaagaaaggactgtgcggatccctgtgattcctag

SEQ ID NO: 188608 - DNA, 1338 bp, synthetic construct
  misc_feature 1..1338: note = Description of Artificial Sequence: Synthetic coding sequence
  source 1..1338: mol_type = other DNA
atggccgcccccacccccgcccggcccgtgctgacccacctgctggttgcactgtttggtatgggcagttgggccgccgtgaacggtatctgggtcgagctgccggtcgtcgttaaggagctgcccgaaggctggagcctcccgtcctatgtgtcagtgctggtggccctagggaacctggggctgctggtggtgaccctgtggcggaggctggcacctggaaaggatgaacaagtgcctataagggttgtccaggttcttggcatggtgggtacggctttgctggcctccctgtggcatcacgtcgctccagtggccgggcaattgcactccgtcgcttttttggcactggcttttgttttggccctggcttgctgtgcgtctaacgtgactttcctcccatttctttctcacctcccgccgcgcttccttcgctctttcttcctcggacagggcctgtctgccctgctaccctgcgtgttggcactcgtgcagggcgtgggtcgtcttgagtgcccccctgcaccaatcaacggtacaccaggccctcctctagacttcctggagcggtttccggcgtccacatttttctgggctttgactgcactactcgtggcaagcgctgctgctttccagggcctgttgcttctgctgcctcctccgccatccgttcccactggtgagttgggatccggcttgcaggtgggggcacctggggcggaggaggaggttgaggagagctcacctctgcaagagcctccaagccaagctgctggaacaactcccggcccagaccctaaggcctaccagctattgtccgctcgctcagcctgcctgctaggcctgctggcagctacaaatgccctgacaaacggcgtgctgcctgcagtgcagtctttcagctgtctgccatacggtcgtctggcatatcacttggctgtggttctgggctctgccgctaacccccttgcctgctttctcgccatgggcgttctttgtcggagtctggctgggttaggcggtctgtccctgctgggcgtcttttgcgggggctatctgatggccctggccgtcctctccccgtgcccccccttggtcggaaccagtgctggggtggtcctcgtcgtgctgtcttgggtactctgtctgggcgttttctcttatgtgaaggtcgctgctagcagtttgctgcacgggggtggccgcccagccttgcttgctgctggggtggccatccaggtagggtctctcttgggagccgttgcaatgttccccccaacaagcatctatcatgtgttccacagtcgcaaggactgcgccgatccatgtgatagctag

SEQ ID NO: 188609 - DNA, 1338 bp, synthetic construct
  misc_feature 1..1338: note = Description of Artificial Sequence: Synthetic coding sequence
  source 1..1338: mol_type = other DNA
atggccgcccccacccccgcccggcccgtgctgacccacctgctggtggcgctgtttggcatgggaagctgggcagctgtgaacgggatatgggtggagctccctgtggtggtaaaggagctgcccgaggggtggagcctgccatcctacgtctcagtgttagtcgccctgggcaatttaggcttactggtcgtcactctctggcgcaggctggctccggggaaagacgaacaagtgcccattcgcgtggtccaggtacttgggatggtcggcacagccctgctggctagtctctggcaccacgtggcaccggtcgccgggcagctacactccgtcgcctttctcgctctggcgttcgtcctggcactagcctgctgcgcttctaacgtgaccttcctgccattcttgtcccacctgccccctcggtttttaaggagttttttcctgggacaggggctgtcggccctgctgccatgcgtactcgccctggtacagggtgtcggcaggctcgagtgcccccccgctcctataaacggcacacccgggcccccgttagactttttagaaagatttcccgctagcaccttcttctgggctctgacagccctgctcgtagccagtgctgcagcattccagggtctactactgttattgcccccacccccatctgtgcccaccggggaactgggaagcggcctccaggtgggcgccccaggcgcggaggaagaggttgaagaatctagcccactccaggagccaccgagtcaggccgccggaaccactccaggccccgaccctaaggcataccagctattatccgcccgctcagcttgtcttcttggactcttggccgccacaaacgcactgaccaacggggtgctgcctgctgtgcagagtttttcgtgcctgccatatgggaggcttgcgtaccacttagccgtggtgctggggtcagctgccaacccactcgcctgttttctcgccatgggggtgctgtgtcgatcgttggccggcctgggtggactgagtttactgggcgtcttttgcggcggctacttgatggcgctcgctgtacttagcccatgtcccccccttgtcggaacctcggcgggcgtcgtcctggtagtgctatcctgggtcctgtgcctgggggtcttctcctacgtcaaagtggctgctagctccctcctccacggaggaggaaggccggctctgctcgctgccggagtggccattcaggtcggctctcttctgggagcggtggccatgttcccccctacatcaatttaccacgtgttccactcgagaaaggactgcgcggatccatgcgattcttag

SEQ ID NO: 188610 - DNA, 1338 bp, synthetic construct
  misc_feature 1..1338: note = Description of Artificial Sequence: Synthetic coding sequence
  source 1..1338: mol_type = other DNA
atggccgcccccacccccgcccggcccgtgctgacccacctgctggtggccctgtttgggatgggttcatgggccgctgtgaatggtatttgggtggaactgccggtggtagtgaaggagctacctgaggggtggtcccttccttcctacgtgtccgtactcgtagcgcttgggaacctgggcctgctcgtggttacactctggagacggctcgcaccaggaaaggacgagcaggtgcccatacgagttgtgcaggtgttggggatggtcggtactgcccttctggccagcctctggcaccatgtggcccctgtcgctggtcagttacattccgtggcttttctagcgctggcctttgtgctggctctggcgtgctgcgcttctaacgtgacattcctgccctttctgagccatttaccacccagattcttgcgctcattttttctcggacaaggcctgagcgcactactgccttgtgtgctggcactggttcagggcgtggggcggctggagtgccctcccgctcccatcaatggtactcccggcccacctttggacttcctcgaacggttccccgcctccacatttttttgggcccttactgcactcctggtggcctccgcagctgccttccaaggtctgctgctgctccttcccccgcccccttctgtgcccactggggaacttggaagtgggctgcaagtgggcgccccaggcgccgaggaagaggtagaggaaagctcacctcttcaagaacctccctctcaggccgccgggacgacaccggggccagaccctaaggcataccagttgctctcagccagaagtgcctgtctgctggggctgcttgccgccactaatgctctgaccaacggcgtactgcccgccgtccagtcatttagttgtcttccctatggcaggctagcctaccacctcgccgtcgtcctcggctctgcggcaaatcccctggcctgcttcctggcaatgggggttttatgtagatccttagctgggctggggggccttagtttactgggcgtcttctgtgggggttatcttatggctctcgcagtacttagtccatgtccacctctcgtcgggacctctgcaggtgttgtgttagtcgtcctaagttgggttctctgtctcggcgtgttttcatatgtcaaagtggccgcttctagcctgttgcatgggggaggtaggccagccctgctcgccgccggagtggccatccaagtcggaagcctgctcggggctgttgcgatgttcccgcctacttctatctaccatgtctttcactctcgaaaagattgtgccgacccctgcgacagttag

SEQ ID NO: 188611 - DNA, 1338 bp, synthetic construct
  misc_feature 1..1338: note = Description of Artificial Sequence: Synthetic coding sequence
  source 1..1338: mol_type = other DNA
atggccgcccccacccccgcccggcccgtgctgacccacctgctggttgccctttttgggatgggctcctgggccgccgtcaacggtatctgggtggaattgcctgtggtggtgaaggagctgccagaaggatggagcctacctagttacgtaagtgttctggttgcactggggaacctcggccttctggttgtgaccctgtggcgccgtctggctcctggcaaagacgagcaggtgccaatccgagttgtccaggtgcttggcatggttggaactgccttattggccagcctgtggcaccatgtggcccctgtggctgggcaactccacagcgtggcctttctggcattagctttcgtcctggctttggcgtgctgtgcatcaaatgttacattcttgccatttttatcacacctcccccctcgctttctgcggtcattttttctggggcagggactaagcgcacttctaccttgtgtgctcgcccttgtccagggggttgggcgactggaatgtccacccgcacctatcaatggaacccccgggccccccctggactttctcgagcggttcccagcatcaaccttcttctgggcattaaccgccctgctggttgccagtgcagcagccttccagggcctgcttctgctgctaccaccccccccaagcgtgcccacaggagaactggggtccggactccaagtcggtgcaccaggtgccgaagaagaagtggaggaatccagccccttgcaggagcccccgagccaagccgctggcactactcccggccccgatcctaaggcataccagctactaagtgcgagatcggcctgtctgctggggttgttggccgctactaacgccctgaccaatggcgttctccctgccgtacaatcgttctcctgtctcccttacgggaggcttgcgtatcatctggccgtggttctgggttcagctgctaacccacttgcctgcttcctcgccatgggcgtgctttgtaggagcctagccggattaggcggcctctccctcctaggcgtgttttgcggcggttaccttatggctttggcagtgttgtcgccatgcccccccctcgtggggacctctgcaggagtagttctcgttgtgttgtcctgggtactttgtttgggcgtgttctcctacgtaaaggtggctgcctcgagtctcctacacgggggaggacggcctgctctgctggctgcaggcgtagcaatccaggtgggttctctgctgggtgcagtcgctatgttcccccctactagcatctaccacgtgtttcattcgaggaaagattgcgccgacccctgcgattcttag

SEQ ID NO: 188612 - DNA, 1074 bp, synthetic construct
  misc_feature 1..1074: note = Description of Artificial Sequence: Synthetic coding sequence
  source 1..1074: mol_type = other DNA
atggtgggcaccgccctgctggccagcctgtggcaccacgtggcccccgtcgccggtcagctgcactcggtcgcctttctggcactggccttcgtcctcgcccttgcttgttgcgccagtaacgtcacattcttgccctttttgagccacctgccaccaagattcttgagaagctttttcttaggccaggggctgtctgctctcttgccttgcgtgttggccctggtgcaaggcgtgggccgtcttgagtgcccacccgctccgatcaatggtaccccgggcccacccctcgatttcctcgagaggtttcccgcatctacatttttttgggctctgactgcacttctggtggctagcgctgccgcctttcaggggctgctcttactccttccgcctcctccgtcggtgccgaccggcgagctcggatccggactccaggttggcgctccgggcgctgaggaggaagtggaagagagcagcccacttcaagagccacccagtcaggctgctggcactacccctggtccagatccaaaagcttaccagctcctgagcgcaagatcagcctgtctcttaggattattggccgctaccaatgccttgaccaacggcgtcctgcctgcggtgcaatctttctcttgcctcccttacggacgcctggcataccaccttgctgtggttcttggttcagccgccaatcccctggcgtgctttttggccatgggtgtattgtgtcgctcattagctggactgggggggctaagccttctgggcgtgttttgtggggggtacctgatggccctcgcggtgctttcgccctgcccccccctggtcggaacgtcggctggtgtggtgctggtcgttctttcctgggtcctttgtctgggcgtgttttcatatgtaaaggttgccgcaagtagccttcttcacggcggaggacggcccgccctgctggccgctggggtcgccatccaggtgggtagcctgttaggcgctgtcgccatgtttccacctacatccatctaccacgtgtttcatagccgcaaagattgcgcagacccttgtgattcttag

SEQ ID NO: 188613 - DNA, 1347 bp, synthetic construct
  misc_feature 1..1347: note = Description of Artificial Sequence: Synthetic coding sequence
  source 1..1347: mol_type = other DNA
atggccgcccccaccctgggccggctggtgctgacccacctgctggttgctctcttcgggatgggatcctgggccgccgtgaatggaatttgggtggagctgcccgtcgtcgttaaggatctcccggaggggtggagcctaccctcctacttatctgtagtcgtcgccttaggtaatctgggcctgctcgttgtgactctatggcggcagctggccccaggcaaaggtgaacaagtcccaatacaagttgtgcaggtactgtctgtagttggtaccgccctgctggcacctctatggcatcacgtggccccggtcgcagggcaattacatagcgttgcctttctgacactggctctggtgctcgccatggcctgttgcacctccaacgtcacattcctgccattcctatcccacctgccccctccatttcttcggtcctttttcctcggtcagggactgagcgcactgctgccgtgcgtgctcgcactggtgcaaggcgttggaagactggaatgtccacccgcccccacaaatggaacaagtggccccccactcgacttccccgaacgatttcccgcttcgacttttttctgggcactgacagcactccttgtgacttcagctgccgcgtttcgagggctcttgttgctccttcctagtttgccctctgtgaccaccggaggcagtggacctgagttgcagcttgggagtccaggagccgaagaggaggagaaagaagaagaagaagccctgcctttacaagaacctccctcacaggcggcgggtactataccgggaccagatcccgaagcccaccaactgttcagcgcgcacggagcgtttctgctaggactgatggcctttacctcagcagtcactaacggggttttgccctccgttcagtccttcagttgcctgccatacgggcgtctggcctaccacctcgcggttgttctgggctctgcagcaaatccactggcttgctttcttgcaatgggcgtcctgtgccgctcactggcaggactggtgggactttcattgctagggatgctctttggggcatacctgatggcattggccattctgagtccatgccctccactggtagggacgacagctggtgttgtgctcgtagtgctctcatgggttctgtgcctttgcgttttctcttacgtgaaggtggctgcttcatcactcctccatggcggggggaggcctgccctgctggcagccggggtggccatccaggtgggcagtctgctgggggccggagccatgtttcctcctacttcgatataccatgtcttccagtccaggaaagattgtgtggatccttgtgggccttag

SEQ ID NO: 188614 - DNA, 1347 bp, synthetic construct
  misc_feature 1..1347: note = Description of Artificial Sequence: Synthetic coding sequence
  source 1..1347: mol_type = other DNA
atggccgcccccaccctgggccggctggtgctgacccacctgctggtggccctcttcggcatgggctcctgggccgcagtcaatgggatctgggtagaacttccagttgtggtgaaggatttgcctgagggctggagtctcccctcgtatctgtccgtggtcgtggcattgggaaatctggggctattggtggtgaccttgtggaggcagcttgcacccgggaaaggggagcaggtcccgatccaagtggtacaggtactatctgtggtcggcacagcactcctggctcctctgtggcaccacgtggccccagttgcagggcaactccatagtgtcgctttcctgactctagctctggtccttgcgatggcctgctgtaccagtaacgtgacttttttaccctttctttctcacttgccccctccctttctgcggtccttttttttgggacagggtctcagcgctcttctcccctgcgtgctcgcactagtgcagggcgtgggtcgacttgagtgcccccctgcaccgaccaacggcactagcgggccccctcttgatttcccagagaggtttcctgcgagtacatttttctgggccctgaccgcgctgctcgtcacatcagcggcagcttttaggggactcctcctgctcctcccctccctcccgagtgtgactactggcgggtcagggcctgagctccagttaggcagtcccggggccgaggaagaagagaaagaagaggaggaagccctgccactccaggaaccacccagccaggctgccggaaccataccagggcctgatccagaagcacatcagctcttctctgcccatggagcctttctgcttggactaatggctttcacctcggcagtgacaaacggagtactaccctcagtacaatctttctcttgtctgccttacggtcggctggcgtaccacctggcagtggtccttggttctgcagcaaaccctctcgcctgcttcttggctatgggcgttctgtgtcgatctttggctggtctggtggggctgtcactgctcggaatgctgttcggcgcgtatctgatggctctcgctatcctgagcccgtgtccccctctggtgggcacaacagcaggcgtggtgctcgtggtgctctcctgggtgctgtgcttgtgcgtcttcagttatgtgaaagtagcggcctcttcacttctccatggaggggggcggccagctctgctcgctgcaggagtggctatccaggtgggctccctgctgggcgctggcgccatgtttcctccgactagtatctaccacgtgttccaatcacgcaaagactgcgtggacccttgcggcccctag

SEQ ID NO: 188615 - DNA, 1053 bp, synthetic construct
  misc_feature 1..1053: note = Description of Artificial Sequence: Synthetic coding sequence
  source 1..1053: mol_type = other DNA
atggccgcccccaccctgggccggctggtgctgacccacctgctggtagccctgttcgggatggggagctgggctgcagtgaatggcatctgggtggaactgccagtagttgttaaagacctgcctgaaggatggtcattgcccagctatttatcagtggtagtcgcccttggaaatctggggctcctggttgtgactctgtggcgccagttggctccaggtaagggcgagcaggtgcctattcaggtagtgcaagtgctgagcgtggttggaacagccctgctcgctcctctgtggcaccatgtcgcacccgtggccggacagctgcattcagtcgcgtttttgacactggccctggtacttgcaatggcctgctgcacaagtaacgttacttttctcccctttctgagtcacctaccacctccattcctgagatccttttttttgggccaaggtctttccgctctcctgccctgtgtgttagccctggtgcaaggggtggggcggctggagtgcccgccggctccaactaatgggacgtcagggccgcctttggattttcccgaacgcttcccagcaagcaccttcttctgggccctcactgcgctgttagtgaccagcgcagcggcttttcgcgggctcctccttttactgccaagtttaccctcagtaacaaccgggggttccggtccggaacttcagctagggtctccaggagccgaagaggaagaaaaagaggaagaggaagcgctgcctttgcaggaacctccaagtcaggccgctggtacaatacccggccccgatccggaggcccaccaactcttcagcgcccacggtgccttcttactgggtctgatggctttcacgagtgcggtgactaatggtgtgctgccgtccgtgcaatcattcagttgcctgccatatggtcgactggcttaccacttggcagtggtccttggcagtgctgccaatcccctagcttgtttcctagctatgggagtgctgtgtcggtgctgcaggggctgctgcgtttgtgtttgctctcacatgtag

SEQ ID NO: 188616 - DNA, 1413 bp, synthetic construct
  misc_feature 1..1413: note = Description of Artificial Sequence: Synthetic coding sequence
  source 1..1413: mol_type = other DNA
atgcccgcccccctgctgctgatcagccggaccctgggcaacttcatggtgctgtggagtacatgccgcacaactgttttcaaatcggttactaatcgcttcattaagaatctggcctgcagcggcatttgcgccagcctggtgtgtgtgcctttcgatattatcctgtccactagccctcactgctgttggtggatctacaccatgttattctgcaaggtcgtgaaattcctgcacaaagttttctgtagcgtaacaattctgtccttccccgctatcgccctcgaccgctattacagcgtgctctatcccctggagcggaaaatctctgatgccaagtcccgggagctggttatgtacatctgggcccacgccgtggtggcaagcgtgccagtttttgcagtcaccaacgtggcggacatttacgccactagcacatgcaccgaggtctggtctaattccctgggacacctcgtgtatgtgttagtctataacatcaccacagtgatcgtgcctgtggtggtggtctttctgtttctgattctgataaggagagcgctgtctgcctcacaaaaaaaaaaggtaattatagccgcactgcggaccccccagaacacaatttcaatcccgtatgcaagtcagcgggaggccgagctgcatgcaacacttctttccatggtaatggtatttatcctgtgtagcgtcccctacgccaccctggtggtgtaccaaaccgtcctgaatgtccccgatacctctgttttcttgttgcttactgcggtttggctgcctaaggtcagtctgctggctaatcctgttctgtttttgaccgttaacaaatcagttcgcaagtgcttgataggtacactggttcagctacaccacagatattctaggcggaatgtggtgagcaccgggagcggcatggcagaagcaagcctggagccttccataaggtccggttctcagctgcttgaaatgttccatatcggtcagcagcaaatcttcaagcccactgaggacgaggaagaaagcgaggccaaatatatcgggagcgcagatttccaggccaaagagattttttcgacttgtttggagggtgagcaaggacctcagttcgccccttcagcaccacccctgtctacggtggattctgtgagtcaggtcgcaccggctgcgccagtggaacctgaaacttttcccgacaagtatagcctccagttcggattcgggccctttgagctgccgccccagtggcttagtgagacccgtaacagtaaaaagcggctcctacccccattaggcaatacccccgaggagctgatccagaccaaggtccctaaggttgggagggtcgagcgtaaaatgtctaggaacaacaaagtgtcaatcttccccaaggtcgacagctag

SEQ ID NO: 188617 - DNA, 1548 bp, synthetic construct
  misc_feature 1..1548: note = Description of Artificial Sequence: Synthetic coding sequence
  source 1..1548: mol_type = other DNA
atgggccacaacggcagctggatcagccccaacgccagcgagccccacaatgcaagtggcgctgaagctgccggggtgaacaggtccgcacttggtgaattcggggaggctcaactttacaggcagtttacaaccacagtgcaggtggtaatatttatcgggtctctcctggggaacttcatggtgctttggtctacctgccggacgaccgtgttcaaatcagtgacaaaccggtttatcaaaaacctggcgtgctcagggatctgcgcaagtctggtttgtgttccgtttgatatcatcctatccacatctccccattgctgttggtggatctacactatgctgttctgcaaagtggtgaaatttctacataaggtattctgctcagtgaccattctgagttttcccgccattgcactcgataggtattactcagtgctgtatccccttgagcggaagatctctgacgccaaaagtagggagctggtgatgtatatttgggcccacgcagtcgttgcatcggtaccagtgttcgcagtgacaaacgtggccgatatctatgctacatccacttgtaccgaggtctggtcaaatagtttaggtcacctggtatatgttcttgtctataatattaccacagtcattgtgcccgtcgtggttgtattccttttcctgatcctcatcaggcgcgctctgagcgcttcacaaaaaaaaaaggtaatcatcgccgctttgcggacaccacagaataccatctctattccctacgctagccagcgggaagctgagcttcacgctactctcctttccatggtgatggtgtttattctgtgttccgtgccttacgcgacgctggttgtgtatcagactgtactcaacgtaccagatacatcggtgtttctgctgctgacagccgtgtggcttcctaaggtgtccctcctggccaatccagtcctcttccttactgttaacaaatccgtgagaaaatgtctgataggcaccctggttcagctgcaccataggtactcacggagaaacgttgtaagtaccggcagtggtatggctgaggcctctcttgaaccatccatccgttcgggaagtcagctgttagagatgtttcacataggccagcagcagatctttaaaccgaccgaggatgaggaagaatctgaagcaaaatatatcggtagcgcggactttcaggccaaggagatttttagcacatgtctggaaggcgagcaggggccccagttcgctccttcagcccctccattatccacagtggacagcgtgtcacaggtagcgcccgcagctcccgtggaacctgaaaccttccccgataaatactctcttcagtttggattcggaccgttcgagctcccccctcagtggctatcggagacccgcaacagcaagaaacggctgctccctcctcttggaaatacaccggaagagctgattcagactaaagtcccaaaggtcggacgggtcgaaaggaaaatgtcgcggaacaataaagtgtccattttcccaaaggtggacagctag

SEQ ID NO: 188618 - DNA, 1548 bp, synthetic construct
  misc_feature 1..1548: note = Description of Artificial Sequence: Synthetic coding sequence
  source 1..1548: mol_type = other DNA
atgggccacaacggcagctggatcagccccaacgccagcgagccccataatgcctcgggtgctgaggctgctggggtcaaccgatcggccctgggtgaattcggcgaagcccaattgtatagacagttcactaccaccgtgcaggtggtgatcttcatcggctccttgcttggaaatttcatggtcttatggagtacctgtaggactacagtctttaaatctgtaactaatcgcttcattaagaatctcgcatgctccggcatttgcgcatcgctcgtttgtgtgccttttgacatcattttaagcacgtctccccactgctgttggtggatatatactatgcttttttgcaaggtagtaaagttcttgcataaagttttctgctcggttaccattttgtcatttcccgcaatcgcacttgaccgatactactctgttttatatcccctggaaagaaagatttccgatgctaaatctcgggaacttgtcatgtatatctgggcacacgctgtggttgccagcgtcccggtatttgccgttaccaacgtagccgacatttacgccactagcacatgcacagaggtctggtccaattcacttgggcatttggtgtatgtcttggtttacaacattaccaccgttatagtgcccgttgtagtggtgtttctttttctgattctgattaggagggcactttccgcttctcagaaaaaaaaggtgataatcgcggcgctcaggacccctcagaataccattagcatcccctatgccagtcaacgggaggccgagttgcacgcaactctcctgagtatggtcatggtattcatcctttgttccgtgccttacgccaccctcgttgtttatcagaccgtgttgaacgttcccgacacctcggtgtttttactccttaccgcagtctggcttcccaaggtgtccctgctcgccaatccagtgctgtttttaaccgttaacaaatcagtgagaaagtgtcttattggaaccttggtgcagcttcaccaccgatactcaaggagaaacgtggtatccaccggatcaggtatggccgaggcctccctggagccttctatccggtccggtagtcaactgctcgagatgttccacattgggcagcagcaaattttcaagcctactgaggacgaggaggagtccgaggccaagtatattggaagcgctgatttccaggcaaaggagatcttctccacatgtctggaaggggaacaaggaccacaattcgctccttcggctccgcctctaagcaccgttgatagcgtcagtcaagtagcacccgctgcccctgtggaaccggaaacattcccggataaatatagcttgcagtttggctttggaccttttgagctcccaccccaatggttgagtgaaactcggaactccaagaagcgcctacttccccctctgggcaacacaccagaagagcttatacaaactaaagtacccaaagtgggcagagtggagagaaaaatgagtagaaacaataaagtttctatctttcccaaagtggatagttag

SEQ ID NO: 188619 - DNA, 996 bp, synthetic construct
  misc_feature 1..996: note = Description of Artificial Sequence: Synthetic coding sequence
  source 1..996: mol_type = other DNA
atgatcaccctgaacaaccaggaccagcccgtgcccttcaacagctcacatcctgatgaatacaaaatcgccgccctcgttttctatagctgcatctttatcataggactcttcgtgaacattactgccttatgggttttttcctgcacaaccaagaaaagaaccaccgtcactatctacatgatgaatgtggccctcgtcgacttaatctttattatgactttaccatttagaatgttctattacgcgaaagacgaatggccattcggggagtatttttgtcagattctaggagctctgacagtattctacccatcgatcgcattgtggttattagcgttcatctccgctgaccgctacatggccatcgttcagcctaagtacgctaaagaactcaagaatacgtgtaaggcagtgctggcatgtgtaggcgtgtggattatgacattaacgacaacaacacccctcctgctgctgtataaagatcctgacaaagacagcaccccagcaacatgcctgaaaatctccgacattatttatctgaaggccgtgaacgtgctgaatctgactagactaacctttttttttctaatccccctatttattatgattggctgctacctggtgattatacataatctgctccacggtcgaacctcgaaattgaagcctaaagttaaagagaaaagtatcaggatcatcataacactgctggtccaagttctggtgtgtttcatgcctttccacatctgttttgcattcctgatgctggggaccggagagaactcttataacccctggggggctttcaccaccttcctgatgaacctgagcacatgtttggacgtgatcttgtattacattgtgtctaagcagttccaagcacgcgtgatttcagtgatgctctataggaattatctgaggtcaatgaggcggaagtcttttcgctctggatctctccgtagcttgtccaacattaatagcgaaatgttatag

SEQ ID NO: 188620 - DNA, 996 bp, synthetic construct
  misc_feature 1..996: note = Description of Artificial Sequence: Synthetic coding sequence
  source 1..996: mol_type = other DNA
atgatcaccctgaacaaccaggaccagcccgtgcccttcaacagcagtcaccctgatgagtacaaaattgccgctcttgtgttttactcttgcatcttcattattggcctttttgtaaatataaccgccctgtgggtgttctcttgcactactaagaagcgcaccaccgtaactatctacatgatgaacgttgccctcgtagacctgatcttcattatgactctgcccttccgaatgttctactatgccaaggacgagtggccctttggagagtacttttgtcaaattctgggcgctctcaccgtcttctacccaagtattgccctgtggctcctggccttcataagcgctgaccgctacatggccattgtgcagcctaagtacgccaaggaactgaagaacacttgcaaggcagtgttggcgtgtgtcggcgtgtggatcatgacgctgaccactactacaccactcttactgttatacaaggatccggacaaggactccaccccagctacttgccttaagatcagcgacattatctatctgaaggctgttaatgtactgaatcttaccaggctgaccttttttttcctcatccctctctttattatgatcggctgttacctcgtcatcatccacaatctgctgcacgggcgaacctctaagctgaaacctaaagtgaaggaaaagtcaatccgtatcattattacgctgctggttcaagttcttgtgtgcttcatgccattccatatctgcttcgcattcctgatgctgggcacaggtgagaattcctataacccttggggggcatttacaacgtttttgatgaatttaagtacctgtctggacgtcattctctattacatcgttagcaaacagttccaggctcgagtgatttcagtcatgctatataggaattatctgaggtccatgagacgcaagagctttcgtagtggcagccttcgcagcctgtcgaacatcaattcggaaatgctgtag

SEQ ID NO: 188621 - DNA, 996 bp, synthetic construct
  misc_feature 1..996: note = Description of Artificial Sequence: Synthetic coding sequence
  source 1..996: mol_type = other DNA
atgatcaccctgaacaaccaggaccagcccgtgcccttcaacagctcccaccccgacgaatacaagattgcagctcttgtcttctactcttgcatattcatcatcggactctttgtgaacatcaccgcattgtgggtttttagttgtaccaccaagaagcgaactaccgtgacaatctacatgatgaacgtggcgctcgtggatctgatcttcatcatgactctacccttccgcatgttttactacgctaaggacgagtggcctttcggagaatatttctgtcagatcctgggagctttgacagtgttttaccccagcatcgccctctggctgctggcgtttattagtgcggaccgttacatggctatcgtccagccaaagtatgcaaaggagctgaaaaacacttgtaaagcagtgctcgcgtgtgtcggcgtttggattatgaccttgaccaccaccacacctttactcctgctctataaagaccccgacaaggatagtacccccgctacgtgcctgaaaatctccgatattatctatttgaaggccgttaacgtgctgaacctgaccaggctcactttcttctttctgatccccctatttattatgatcggatgttaccttgttattattcataatctcctgcatggccgtacttctaaacttaagcccaaagttaaggaaaaatctattaggatcatcataaccctgctagtgcaggtcctggtgtgttttatgcccttccacatttgttttgcttttcttatgctgggaacaggcgagaatagctacaacccctggggtgcgttcacaactttcctgatgaacttatccacatgcttggacgtgatcctgtactacatcgtgtccaaacagttccaggcccgtgtgatatctgtgatgctgtacagaaattacctgagaagcatgagacggaaaagttttcggtccgggtccttgaggtcgttaagcaacatcaattccgaaatgctctag

SEQ ID NO: 188622 - DNA, 297 bp, synthetic construct
  misc_feature 1..297: note = Description of Artificial Sequence: Synthetic coding sequence
  source 1..297: mol_type = other DNA
atgatcaccctgaacaaccaggaccagcccgtgcccttcaacagcagccatccagacgaatacaaaatcgccgcactggttttttactcctgtattttcattattgggctgttcgtgaacattactgcattatgggtgttttcttgcaccaccaaaaagaggactacagtaaccatctacatgatgaatgtggccctcgtggacctgatctttatcatgaccctcccatttcgcatgttctactacgctaaggatgagtggccatttggggagtacttctgtcagattctgggatag

SEQ ID NO: 188623 - DNA, 1086 bp, synthetic construct
  misc_feature 1..1086: note = Description of Artificial Sequence: Synthetic coding sequence
  source 1..1086: mol_type = other DNA
atggacatccagatggccaacaacttcaccccccccagcgccacccctcagggaaacgattgcgatctttacgcacaccatagcaccgcaaggatcgttatgccactgcactatagcctggtctttataattgggctagtcggcaatctgttagcactggttgtcatagtacaaaacaggaagaaaatcaacagcacaacactgtatagtaccaatctcgttatttctgatattttgttcactaccgcactgccaactcgcatcgcctattatgctatgggattcgactggcgcataggtgacgccctgtgcagaatcactgccttagtgttttacataaacacctacgcaggcgttaactttatgacatgcttgtccattgaccgctttatcgctgtcgtccacccattacggtacaacaaaatcaaacgcatcgaacacgccaaaggcgtttgcatatttgtgtggattttggtgttcgcacaaactctccctctgctcattaatcctatgtcaaaacaggaggcagagcgcatcacctgcatggagtaccctaattttgaggagaccaaatccctcccatggatccttctgggagcttgtttcatcggttatgtcctccctctgatcattattctgatatgttatagccaaatttgctgtaaactcttccgaactgccaagcagaaccctctgactgaaaagtctggggtgaataaaaaggccctcaacacaatcatccttatcatcgtagtgtttgtgctgtgtttcacaccttatcacgtggcaatcattcaacacatgatcaagaaactgcggtttagtaacttcctggaatgcagtcagagacacagctttcagatctctctccacttcaccgtgtgtttgatgaacttcaactgttgtatggatcctttcatctacttttttgcttgcaagggctacaaaaggaaggtcatgcgaatgttaaagcggcaggtctcagtctctatctcatctgccgtcaaatctgctcctgaggagaactccagagagatgacagaaactcagatgatgatccactcaaagagctcaaatggcaagtag

SEQ ID NO: 188624 - DNA, 1248 bp, synthetic construct
  misc_feature 1..1248: note = Description of Artificial Sequence: Synthetic coding sequence
  source 1..1248: mol_type = other DNA
atggtgttcgcccaccggatggacaacagcaagccccacctgatcatccctaccctgctggtgcctctccagaataggtcctgtaccgagaccgcaactcccctcccttcacagtatcttatggaactgagtgaagagcacagttggatgagcaatcagacagatcttcactatgtcctcaagcccggcgaagtggcaacagccagcatctttttcgggatattgtggctgttctctatttttggcaatagcctggtgtgcctggtgatccataggtcccgccgaactcagtcgacaaccaattactttgtcgtctctatggcgtgcgccgatctgctcatttccgtcgcctctaccccattcgtgctgctgcaattcacaactgggcgttggaccctcggctctgccacatgtaaagttgtgcgttatttccagtacctgacaccaggcgtgcagatttatgtcctgctgtccatttgcatcgatagattctacactattgtatatccactgtctttcaaggtctctcgggagaaagctaagaagatgatagccgcaagctgggtctttgatgccggattcgtaaccccagttctttttttttacggaagcaattgggactcccattgcaactactttttgcccagctcatgggaaggaacagcatatacggtgatccatttcctagtgggtttcgtgattcctagcgttttaatcattttgttctatcagaaggtgattaagtacatctggcgcatcggaactgacgggcgcacggtccggcgcaccatgaacatcgtaccaagaaccaaggtcaaaaccataaaaatgttcctgattctcaacctcctattcttactgtcttggttgccgttccacgtcgcacaactatggcaccctcatgagcaagactataaaaagtcatccctggttttcaccgctattacctggatatcatttagcagcagcgcctccaaacccactctgtacagtatctataatgcaaacttcagacgcggtatgaaagaaaccttctgtatgtcaagcatgaagtgctacaggtctaacgcctacaccatcaccactagcagcaggatggcaaaaaaaaactacgtgggcatttcggagataccaagtatggcaaagaccataaccaaagattcgatatacgacagcttcgatcgagaggctaaggaaaagaaactggcatggccaataaacagtaatcccccaaatacattcgtgtag

SEQ ID NO: 188625 - DNA, 1248 bp, synthetic construct
  misc_feature 1..1248: note = Description of Artificial Sequence: Synthetic coding sequence
  source 1..1248: mol_type = other DNA
atggtgttcgcccaccggatggacaacagcaagccccacctgatcatccccactctactggtgcctctccagaatcggtcctgtacggagacagccacccctcttccgagccaatacctgatggaactgtcagaggagcatagttggatgtccaatcagactgacctccattacgtgctgaagcctggggaggtggccaccgcgtccattttcttcggcattttgtggctcttttccatctttggtaattccctagtgtgtcttgttatccaccgaagtaggcgaacccaaagtacaacaaactacttcgtagtctccatggcctgtgctgacctcctgattagcgtcgcttccacaccctttgtcttgcttcagtttactacaggaaggtggaccttggggtcggccacctgtaaggtggtccgttatttccagtatttaactcccggagttcagatctacgttttattaagcatttgcatcgaccggttctatacaatcgtgtatccactgtcttttaaggtgagcagggagaaggctaagaagatgattgccgcgagctgggtttttgacgccgggttcgtcacccccgtactattcttttatgggagtaactgggattctcactgcaattacttcctgccctccagctgggagggtaccgcatacacggtcattcatttcctcgttggatttgtgatccccagcgtgctgattatcctgttctatcagaaagtgatcaagtatatctggcggattgggacagacggacgcactgtcaggaggacgatgaacatcgtccccagaaccaaggtgaagactattaagatgtttttaatcctgaatcttctgttcctcctgtcctggctgcccttccacgttgctcaactgtggcatcctcatgagcaggactataaaaagtcttctttagtctttactgccatcacctggatatcctttagttcttccgcttcaaaacccacattatattcgatctacaatgcgaattttcgcagaggcatgaaagagacgttctgtatgagttctatgaaatgctaccggtcaaacgcttatactatcactacctcgagccgtatggccaagaaaaactatgtgggtatctccgaaatcccatccatggccaagaccataactaaggattccatttatgatagtttcgacagagaagcgaaagagaagaagctcgcttggcccatcaactcaaatccacccaacacctttgtctag

SEQ ID NO: 188626 - DNA, 180 bp, synthetic construct
  misc_feature 1..180: note = Description of Artificial Sequence: Synthetic coding sequence
  source 1..180: mol_type = other DNA
atggtgttcgcccaccggatggacaacagcaagccccacctgatcatacccactctgctcgtgcctcttcaaaatagaagctgcactgagaccgcaacccctctgccttctcagtatctgatggagctctcagaggagcatagttggatgtctaaccaaaccgacctgcattacgtctag

SEQ ID NO: 188627 - DNA, 1077 bp, synthetic construct
  misc_feature 1..1077: note = Description of Artificial Sequence: Synthetic coding sequence
  source 1..1077: mol_type = other DNA
atgcccagcgtgagccccgccggccccagcgccggcgccgtgcccaacgccaccgccgtcactactgtgcggacaaacgcatctggcttggaagtacctttgttccatttgttcgcgcggctggacgaggaacttcatggcacttttcctgggctgtggctggcgctgatggctgttcacggcgccatcttccttgcaggactggtgctgaacggactcgccctgtatgtgttttgttgccgtacaagggcgaagactccatccgtcatctacacaatcaacctggtggtgacagatctgctggttggcctgtctctccctactaggtttgctgtatattacggtgccaggggctgtttgcgatgtgccttcccgcatgttctgggctacttcctcaacatgcattgttccattctctttctaacctgcatctgcgtggacaggtacctggcaatcgtgcggcctgagggtagccgaagatgccgacagcctgcttgcgccagagcagtgtgcgcttttgtgtggctcgcagctggcgccgttaccctgtccgtgctgggagtcaccggcagcagaccctgttgccgcgttttcgccctgactgtgctcgagtttctgcttccactacttgttataagcgtgttcacgggcaggattatgtgcgccctgagtagacccggtttactccaccaggggcgtcaacgacgagttagagccatgcagctgctgctgactgttctcattattttcctggtgtgttttaccccttttcacgctagacaagtggccgtggccctgtggcccgacatgccacaccatacttctctcgtggtgtatcacgtagctgttactctgtcttcactaaactcctgcatggatcctatcgtatactgcttcgtgaccagcggatttcaggccaccgtcagagggctgttcgggcagcatggggagcgcgaaccgagttctggggacgtggtcagcatgcaccggagttcaaagggctcaggtcgacaccacatcctctccgcaggcccccacgcactgacacaggctctagccaatggccccgaagcatag

SEQ ID NO: 188628 - DNA, 1050 bp, synthetic construct
  misc_feature 1..1050: note = Description of Artificial Sequence: Synthetic coding sequence
  source 1..1050: mol_type = other DNA
atgaacagcaccctggacggcaaccagagcagccaccccttctgccttctcgcgtttggctacttagaaacggtgaatttttgtctgttggaggtgctaatcatcgtgttcttgaccgttcttattatttcagggaatattattgttatctttgtcttccactgcgcacctctactgaaccaccacactaccagttatttcatccaaactatggcctatgccgacctgttcgttggagtgagctgcgtggtgccttccctgagcctgttgcaccacccacttccggtggaagaaagtcttacgtgtcagatctttggatttgttgtctctgttctcaagagcgtgtcaatggcctctttagcctgtatctccattgatcggtacatcgccatcaccaagccactgacctacaacacactggtaactccctggcgtttaagattgtgtatctttctcatctggttgtacagtaccctggtatttcttccctcatttttccactggggcaaacccggataccatggagatgtcttccagtggtgcgccgagagctggcatacagacagttatttcactcttttcattgtaatgatgctgtacgccccagcagcactcattgtgtgcttcacctatttcaatatcttccgaatctgccaacagcacactaaagatatcagtgagaggcaggcacggttttcctcccagagtggggagacaggagaagtccaggcctgtcctgataagcgttacgccatggtgctctttcggattacatccgtgttctatatcctgtggttgccttacattatctatttcttactggagagctctacagggcattcgaatcgctttgctagcttcctgaccacgtggctggcgattagcaacagtttttgcaattgtgtgatttatagcctctccaactctgtgttccagagggggctgaagcgcctttccggggctatgtgtacttcatgcgcatcacaaacaaccgctaacgatccttacacagtgagaagcaaggggccccttaatggctgccatatttag

SEQ ID NO: 188629 - DNA, 753 bp, synthetic construct
  misc_feature 1..753: note = Description of Artificial Sequence: Synthetic coding sequence
  source 1..753: mol_type = other DNA
atgaacagcaccctggacggcaaccagagcagccaccccttctgcctgctcgcatttgggtatctggagaccgtgaatttctgtttactggaggtgctgatcattgtcttcttaaccgttctcattatcagcggaaacattatcgtcatcttcgtgttccattgcgccccactgttgaaccaccacacgacatcttatttcatccagacaatggcatacgctgatttatttgtgggtgtctcttgtgtggtcccctcactgtcactgctgcaccatcccctccctgtcgaggaatctctcacttgtcagatctttggctttgtagtctccgtcttgaaaagcgtttcgatggcaagcctcgcctgcatatccattgatcgctacatcgcaatcacaaagcccctcacgtataacaccctggttactccttggagactgcggttgtgcatttttcttatctggttatattcaacattagtgttccttcctagtttcttccattggggtaagcccggctatcatggcgatgtgtttcaatggtgcgctgaaagttggcacaccgattcctatttcacactgttcattgtgatgatgctgtacgcccctgctgccttaattgtgtgttttacttatttcaatatttttagaatctgtcaacagcacacaaaggacatctcagaaagacaggctaggttttcttcccagagtggagagactggcgaggtgcaagcctgccccgtcagtaaccattag

SEQ ID NO: 188630 - DNA, 1302 bp, synthetic construct
  misc_feature 1..1302: note = Description of Artificial Sequence: Synthetic coding sequence
  source 1..1302: mol_type = other DNA
atgtgcttcagccccatcctggagatcaacatgcagagcgagagcaatattacagtgcgggacgatattgacgacatcaatacgaatatgtaccagcctttgagctacccgctgtctttccaggtgtctctgactggttttttgatgctcgagatcgttcttggcctagggagtaacctgacagtgctagtattatattgcatgaagtccaacctcatcaacagcgtgagcaatatcattaccatgaatctgcatgtcctcgatgtcatcatttgtgtcggatgcattcctctcacaattgttatcttactactctctctagagtccaatacagcccttatctgttgtttccacgaagcgtgcgtatccttcgcttctgtgtcgactgccattaatgtcttcgcaatcaccctcgatagatacgacatctccgtaaagcccgccaatcgcattctgaccatgggcagagcagtgatgttgatgatcagtatctggattttttccttttttagctttttaatcccattcatcgaggtgaactttttttccctccaatccggcaatacatgggagaacaaaacactcttgtgtgtgtccacaaacgagtactatacagaattgggcatgtactaccacctgcttgtgcagattcctatcttcttttttacagttgtagtaatgctcataacatacacgaagatcctgcaggcacttaatatacgaattggcactcggtttagtaccgggcagaagaaaaaagctagaaagaagaaaaccatttccctgactacacaacacgaggccacagatatgagtcagtcatctggcggcaggaatgttgtcttcggagtgcggacctctgtcagcgttatcatcgctctccgacgggccgtgaaacgccaccgcgaacggcgtgagcgacagaagagagttttcagaatgtctctactgatcatctctactttcctcctttgctggaccccgattagcgtgctgaatacgactatcctgtgtcttggcccttctgatctgctggtcaaactcaggctgtgttttttagttatggcatatggtaccactattttccatcccctactctacgcttttactagacagaagttccagaaagtgctgaaatcaaaaatgaagaagcgcgtggtcagtattgtggaggctgacccactccctaataatgccgtcatccacaactcttggattgatcctaaacggaataaaaagataacttttgaggattccgagatccgcgagaaatgcctggtgccccaggtagtcactgactag

SEQ ID NO: 188631 - DNA, 1086 bp, synthetic construct
  misc_feature 1..1086: note = Description of Artificial Sequence: Synthetic coding sequence
  source 1..1086: mol_type = other DNA
atggcccccaccgagccctggagccccagccccggcagcgccccctgggattatagcggcctcgatgggctcgaagaattagagctgtgcccagccggagacctcccatatgggtacgtgtatatcccagctctttatctcgcggcctttgccgtggggcttctgggtaatgcctttgtggtctggcttctggccggcagacgaggaccaaggcgattggtcgatacctttgtgctgcaccttgctgccgcggatttgggcttcgtgttaactctacccttgtgggccgctgcggcagccctcggaggcagatggccattcggggacggattatgtaagctctccagttttgcactggcaggaactagatgtgccggtgccctcctgctggcgggcatgagcgtggatcggtatttagccgttgtgaaacttctcgaggcccggcctctgcgcaccccccggtgtgcactggcgtcgtgctgcggagtatgggccgtcgccttgctggcggggcttccaagtctggtttacaggggactgcagcccctgccaggggggcaagattctcagtgtggggaagagcccagtcatgccttccaggggctttctctcctcctgctgctcctgacctttgttctccccctcgtagttaccctgttctgttactgccgcattagtcgacgacttaggcggccacctcatgtcgggagagcaagacgtaactctctgcggattatctttgcaatcgagagcacctttgtcgggtcttggctcccattttccgccctgcgcgccgtcttccacctcgctcgcttgggggccctgcctctcccttgtccgcttctccttgctttgaggtggggactgaccattgccacatgtctggcctttgtgaattcttgcgcaaatccactgatttatctgttgttagaccgttcctttagagcccgagcacttgacggtgcttgcggcagaactggacggcttgcgcgacgcatctctagtgcaagctctctgagcagggacgacagctctgtgtttcgatgcagggcccaggctgccaatacggcatcagcgagttggtag

SEQ ID NO: 188632 - DNA, 1014 bp, synthetic construct
  misc_feature 1..1014: note = Description of Artificial Sequence: Synthetic coding sequence
  source 1..1014: mol_type = other DNA
atgaacagctgggacgccggcctggccggcctgctggtgggcaccatgggtgtcagcctcctctcgaatgcactcgtgctgctctgcctactccactccgccgacatccggcgccaggctccagcgctcttcacccttaatcttacatgcggcaacctcctttgtacggtcgtcaacatgcccctaacactcgcaggggtggtggcacagcgtcaaccggccggcgatcgcctctgtaggttggctgcgtttctggatacgttcctggccgccaacagtatgctcagtatggcagcgctctcaatagatcgttgggtcgccgtagtgtttcccctgtcatatagagccaaaatgcgactgcgggacgccgcccttatggtggcgtacacctggttacatgccctcaccttccccgccgcggccctggccctgagctggctgggcttccatcagctttatgcctcctgcacgctgtgttccaggcgcccagacgagcgcctgagattcgcggtgtttactggcgcatttcatgcactcagttttttactatctttcgtagtgctatgctgtacgtatctgaaagtgctgaaagtggccagatttcattgtaagaggatcgacgtaatcaccatgcaaacactcgtgcttctcgtggaccttcatccttctgtccgtgaaaggtgtttagaggagcagaaaagacgccgccagagggctactaaaaaaatctcgacatttatcggaactttcctagtgtgttttgccccgtatgttatcactcgactcgtggaactgttcagtacagtaccaatcgggagccattggggcgtactaagcaagtgcctagcctactcaaaggcggcaagcgaccctttcgtttactccctattacgacaccagtaccgcaagtcctgcaaggagattctgaatcgcctgctgcacaggagatccatccactcctccggattgactggagactctcacagccagaacatactgcctgtaagtgagtag

SEQ ID NO: 188633 - DNA, 1128 bp, synthetic construct
  misc_feature 1..1128: note = Description of Artificial Sequence: Synthetic coding sequence
  source 1..1128: mol_type = other DNA
atggccaacgccagcgagcccggcggcagcggcggcggcgaggccgcagccctgggtcttaagctagcaacgctgagcttgcttttgtgcgtgtcccttgcagggaacgtgctttttgcactgttgatcgtacgcgagcgctctctccacagggctccctactatcttctactggacctgtgcttagccgacggactgcgtgctttggcctgtttgcccgccgtaatgctggcagctcggcgggcggcagccgctgctggcgcacccccgggtgctctggggtgcaagctcttagcgtttctagccgctctcttttgctttcatgcagcctttttactgttgggtgtgggggtcactcgctacctcgccattgcccatcaccgcttttacgcagagcggcttgctggctggccatgcgctgcaatgctagtgtgcgccgcttgggccctggccctggcagctgcattcccaccggttctagatgggggaggcgacgatgaagacgcgccctgcgctttagagcagaggcctgacggtgcgccaggcgcccttggattcctgcttctcctggcagtcgtagtgggagccactcatttggtttacctgcgtctgcttttctttattcatgataggagaaaaatgcggccagccagactggtacccgccgtctcccacgattggacctttcatggcccaggggcaactgggcaggcggccgccaactggaccgctggattcggtcgcggtcccactcctccagcgctggtaggcattcggcccgcaggaccgggacgcggggcccggcgactgttggtcctcgaggaatttaagacagagaagcggctgtgtaaaatgttctacgccgttactcttctgttccttctcctatggggtccttacgtggtcgccagttacctgcgtgtgctcgtgaggccgggtgccgtgccacaggcatacctgaccgcttccgtgtggttaaccttcgcacaggcaggcataaaccccgtggtgtgctttctgtttaatagggagctacgggattgctttcgcgcacagtttccctgctgtcagtctccacggacaacacaggccactcacccatgcgacctgaagggtattggactgtag

SEQ ID NO: 188634 - DNA, 993 bp, synthetic construct
  misc_feature 1..993: note = Description of Artificial Sequence: Synthetic coding sequence
  source 1..993: mol_type = other DNA
atgatgtggggcgccggcagccccctggcctggctgagcgccggctctggcaacgtaaatgtcagttcagtaggaccagccgagggccctaccggtccggccgcccctttgccttctcccaaggcgtgggatgtcgtgctctgcatcagtggcacacttgtctcttgcgaaaatgctctcgtggtggcaatcatcgtgggaactccagcctttagggctcctatgtttctgctcgtaggtagtctcgctgttgcggatctgctcgctggactcggactcgtcctacactttgcagccgtcttctgcatcgggtccgcagagatgagtctcgtcctggtgggagttcttgctatggcctttacagcctcaatcgggagccttctagccattactgtggatcgctacctgagtctatataacgctttgacatattattctgagacgacagtgacgaggacctacgtcatgttagctctcgtgtgggggggggctctgggactaggcctgctgcccgtcctggcatggaactgtctggatggactgacaacctgtggcgtagtttatccactgagcaagaaccacttggtggtgctagctattgctttctttatggtcttcggcattatgcttcaactctacgctcagatatgtcgaattgtgtgtcggcatgctcagcaaattgcactgcagcgccatttattgcccgcctcacactacgtggcgacccgaaaaggaatcgccaccctggcagtagttttaggtgcattcgccgcgtgctggttaccctttactgtttattgtctcctgggggatgctcattcgcctccactgtatacttaccttaccctgttaccagcgacctataattcgatgattaatcccatcatatatgccttcagaaatcaggacgttcagaaagtgttatgggctgtctgttgctgctgtagcagtagcaaaattccatttaggtctaggtcgccttcagacgtatag

SEQ ID NO: 188635 - DNA, 960 bp, synthetic construct
  misc_feature 1..960: note = Description of Artificial Sequence: Synthetic coding sequence
  source 1..960: mol_type = other DNA
atgcccttccccaactgcagcgcccccagcaccgtggtggccaccgctgtgggagtgctcctgggtcttgagtgcgggctgggactgttgggcaatgcagttgcgttgtggacctttttatttcgtgttcgggtgtggaagccatatgccgtttatctactgaacctcgccctggccgacctgctgctcgccgcttgcctgcccttcttggcagccttctacctaagcctgcaggcttggcatttaggccgggtggggtgctgggccttgcattttctcttggacctgtctagaagcgtggggatggccttcctggcggccgtcgccttggatagataccttcgtgtggttcatccaaggttaaaagtgaatctgctgtctcctcaggccgcactcggagtatctggccttgtttggctactcatggtagcgctgacttgccctggcctcttgattagtgaggccgcccagaactcaaccagatgtcattcattctactctagagcagatggctcgttttccatcatctggcaggaagcactgtcgtgtctgcagtttgtgcttccctttggattgattgttttctgcaacgctgggattatccgcgctcttcagaagcggcttcgagagcctgagaaacaacccaagctccagagggcacaggcgctggtgaccctggtggtggtgttgttcgctctgtgttttcttccttgtttcttagcgcgcgttctgatgcacatctttcagaacctcggatcatgtcgggctctctgtgctgtggcacacacatccgatgttaccggcagtctcacttatctgcatagtgtcctgaatcccgtcgtgtattgtttctctagtcccacctttaggtcttcctatcgaagagtctttcacaccctgaggggcaaaggccaggctgccgaaccacccgacttcaatccccgggatagttattcttag

SEQ ID NO: 188636 - DNA, 1071 bp, synthetic construct
  misc_feature 1..1071: note = Description of Artificial Sequence: Synthetic coding sequence
  source 1..1071: mol_type = other DNA
atgaacggcgtgagcgagggcacccggggctgcagcgaccggcagcctggcgtgcttacacgcgatcgctcttgcagtagaaaaatgaactcctcagggtgcctgagtgaagaagttggatcactcaggcccctcaccgttgtaatattgtccgcttctattgtggtcggcgtattaggtaatggccttgtcctgtggatgactgtgtttagaatggccaggactgtatctactgtgtgctttttccatctggctctggcggatttcatgctgtcgctgtccctacccatcgcaatgtattatatcgtgagccgccagtggctgctgggggaatgggcctgcaagttgtacataacgttcgtgtttctttcctattttgcatctaactgtctgttggtcttcatttcagtggatcgttgtatcagcgtcttgtaccctgtgtgggccctgaaccacaggaccgtccaacgggccagctggcttgctttcggagtttggcttctcgcagccgccctgtgttccgcccatttgaagtttaggaccacgagaaaatggaatggttgtacccactgttacctcgccttcaactctgacaacgagacagctcagatctggatcgagggcgtcgtggaaggacatattattggaaccatcggacacttcctgcttggctttctcgggcccctggctatcatcggtacctgcgcccacctcatccgtgccaaactactccgggaggggtgggtgcacgccaacagacccaagaggctgttattagtcttggtgagcgcattctttatcttttggtctcctttcaacgtcgtactcttagtccatctgtggaggcgggtgatgttaaaggaaatttaccacccacgcatgctgcttattctgcaagcctcctttgccctggggtgcgtgaactcttcgttgaacccttttctctacgtatttgtgggcagggatttccaggagaagttctttcagagcctgacctctgccttagcgagagccttcggagaagaagagttcctgagcagttgtccccgcgggaatgccccccgtgaatag

SEQ ID NO: 188637 - DNA, 1146 bp, synthetic construct
  misc_feature 1..1146: note = Description of Artificial Sequence: Synthetic coding sequence
  source 1..1146: mol_type = other DNA
atgcggagccacaccatcaccatgaccaccaccagcgtgagcagctggccatacagtagccatcgcatgagattcataaccaaccattctgatcagccacctcaaaatttcagcgcaacacctaatgtgaccacctgtcccatggacgaaaaacttctctctacagtgctgaccacctcttatagcgtcatatttatcgttgggctcgtgggtaatatcattgctctctacgtgtttcttgggatacaccgcaagaggaattctattcagatttacctgcttaacgtcgccatagctgaccttctgctgatcttctgtttgcctttccgaatcatgtatcacatcaatcaaaacaaatggacactaggggttatcttgtgtaaggtggttgggacactgttctacatgaacatgtatatttccatcatcttgctggggttcattagcctggaccgctacattaagatcaaccgctcaatccagcagcgtaaggccataacaacgaaacagtccatttatgtctgctgtattgtttggatgctggctctgggcggattccttacaatgattatactaacgctcaagaagggaggacataattccacgatgtgcttccattaccgggataagcataatgccaaaggcgaagccatatttaacttcatactcgttgtgatgttttggctcatctttcttctgattatcctgtcttatataaagattggaaaaaacctgctgagaatctcgaagcgaaggtcgaaatttcccaactccgggaagtacgccactaccgcacggaactcatttatcgttcttattatctttacgatatgctttgtgccgtaccatgcctttcgcttcatctacatatcatcccagctgaacgtctcttcttgttactggaaggagatcgtgcacaagactaatgaaatcatgctagtgctctcgagcttcaatagttgccttgatcctgtgatgtactttctcatgtcctctaatatacggaaaattatgtgccaactactctttagacgctttcagggcgaaccttcaaggtcagagtctacttctgagtttaaaccaggatattccctgcatgacacgtccgtcgccgtgaagatccagtcttcctcaaagtctacctag

SEQ ID NO: 188638 - DNA, 1146 bp, synthetic construct
  misc_feature 1..1146: note = Description of Artificial Sequence: Synthetic coding sequence
  source 1..1146: mol_type = other DNA
atgcggagccacaccatcaccatgaccaccaccagcgtgagcagctggccctactcctctcatagaatgaggttcattaccaatcatagcgaccagcccccccagaattttagtgccaccccaaatgtaacaacatgcccaatggacgagaaattgctgtcaaccgttctgactacctcctatagcgtcatctttatcgttgggctcgttggcaacattattgcattgtatgtttttctgggcatacatcggaaaaggaattccattcaaatttacctgcttaacgtcgctatcgcagatctgttgctgatattctgccttcctttccggattatgtaccacataaaccagaataaatggacactaggggttatattgtgtaaggtagttgggactctgttctacatgaacatgtacatctccattattctgctgggattcattagcctggacaggtacataaagattaatagatcaatccagcagcggaaagcaatcacaacaaagcagtctatatacgtgtgctgcatcgtttggatgctcgcccttgggggatttttgacaatgataatcttgacgctgaaaaaaggagggcataattcaaccatgtgctttcactatcgggataaacacaatgctaagggagaggcaatctttaattttatccttgtcgtgatgttctggctgatctttctgttgattattctgagctatattaaaatagggaaaaatttgctgaggataagtaagaggagaagcaagttcccaaatagtggaaagtatgctacaaccgcaaggaattccttcatcgtgcttattatctttacaatctgcttcgtgccctatcacgcgtttcgctttatttacatctcatctcagttgaatgtctcttcctgctactggaaagaaattgttcacaagactaacgagatcatgttagtgctgagcagcttcaacagctgcctggatcccgtcatgtactttttgatgtcctcaaacattagaaaaatcatgtgccagctgctgtttaggcgattccaaggtgaacccagccggtcggagagcacgtctgagttcaagccaggatatagcctgcacgacaccagcgtggcggtgaagattcagtcgagtagcaagagcacctag

SEQ ID NO: 188639 - DNA, 1005 bp, synthetic construct
  misc_feature 1..1005: note = Description of Artificial Sequence: Synthetic coding sequence
  source 1..1005: mol_type = other DNA
atggacgagaagctgctgagcaccgtgctgaccaccagctacagcgtcatcttcatagtaggcctggtgggtaacatcatcgcactgtacgtttttttaggcatccaccggaagaggaatagtattcaaatctacctgctgaatgtggccatagccgacttactgcttattttctgcctgcctttcagaatcatgtaccacataaatcagaataaatggacattaggtgtgatcctttgcaaggttgtgggcactctattctacatgaatatgtacatttccatcattctgttaggcttcattagtctcgaccgatacatcaagataaaccggtccattcaacagcgcaaggctattacaacgaaacagtccatctatgtgtgttgcattgtgtggatgctggccctgggaggattcctgacaatgattatactcaccctcaaaaaggggggtcataatagcacaatgtgctttcactatagggataagcataacgccaagggagaggccatatttaactttattttagtggtaatgttctggctgatttttttactaatcatattgtcttacataaagattgggaagaacctcctgagaatctcaaagcgaaggagcaagttcccaaacagcggcaaatatgccaccacagcacgcaatagctttatcgttttaataatatttaccatatgtttcgtgccctatcacgcctttaggttcatttacatctccagtcagttgaatgtcagttcatgctactggaaggaaatcgtacacaaaacaaacgaaatcatgctcgttttaagctcatttaatagctgccttgatcccgtgatgtattttcttatgagtagcaatataaggaagattatgtgccagttactgttcaggaggttccaaggggaaccaagccgatcggagtccacatctgaatttaagccaggttacagtctccatgacacctctgtggcagtgaagattcaatcatcttcgaagtctacctag

SEQ ID NO: 188640 - DNA, 930 bp, synthetic construct
  misc_feature 1..930: note = Description of Artificial Sequence: Synthetic coding sequence
  source 1..930: mol_type = other DNA
atgaacggcacctacaacacctgcggcagcagcgacctgacctggccccccgccatcaaactcggcttttacgcatacctgggcgtgctgctggtgctgggactgttgctgaactctctcgcactctgggtcttctgctgtagaatgcaacagtggaccgagactcgtatttatatgacaaatcttgcagtcgccgatctgtgtttgctgtgcaccctcccctttgttttgcattccttacgtgacacaagcgatacaccactctgccagctgtcccagggaatttaccttaccaaccggtatatgagtataagcctcgtgacagcaatcgcagtggaccggtacgtagcagtgaggcatcctcttcgggcaaggggcttacgctccccccgtcaggccgctgccgtgtgtgcagtgctgtgggtgttagtgataggcagcctcgttgctcgctggctactggggatccaggaggggggcttttgttttaggagcactaggcataattttaattcgatggcgtttcccctacttggcttttatctgcccctggccgttgtagtcttctgttcacttaaggtcgtcacagctctggctcaacgaccgccaacagatgttggccaggcagaagctactaggaaagccgctagaatggtctgggccaacctgcttgtctttgtggtatgcttcctgccactccatgtgggactaaccgtaaggctggctgtgggttggaacgcatgcgctctgctcgaaacgattaggagagctctttacattacatctaaattgagcgatgctaactgctgtctagatgctatctgttactactatatggcaaaggaatttcaggaggcgtctgcgctagccgttgctccttccgctaaagcacataagtcacaggattccctctgcgtaaccctggcctag

SEQ ID NO: 188641 - DNA, 930 bp, synthetic construct
  misc_feature 1..930: note = Description of Artificial Sequence: Synthetic coding sequence
  source 1..930: mol_type = other DNA
atgaacggcacctacaacacctgcggcagcagcgacctgacctggccacctgctatcaagctgggtttctatgcctatctgggcgtgttactggtgctggggctgctgcttaactcactagcgttatgggtattttgctgccgaatgcagcagtggacggagaccaggatttacatgactaaccttgccgtagccgatctgtgtctcctgtgtaccttgcctttcgttctccattccctccgcgatacatctgatactcccctgtgtcaactaagccagggcatatacctgacgaaccgttacatgagcattagtctagtcactgcgatcgctgtggatcgatacgtggcagtccggcatcctcttagggcacgcggattgcgcagtcctagacaggccgccgccgtgtgtgccgtcctgtgggtgctggtgattggtagcctcgtcgctcgatggctgttaggaattcaggaaggcggattttgttttcggtccacaaggcataactttaactccatggcattccccctgctcgggttctatctccctctggctgtggtggttttttgctccctgaaggtggtcaccgctttggctcaaaggcctcctactgatgtgggtcaggccgaggcaaccagaaaagctgcacggatggtctgggctaatttgctggttttcgtggtctgcttccttccgttgcatgttggcctaacagtgcggttggcagtcgggtggaacgcctgcgcgctgctggaaacaatccggagagctctttatatcacctccaagctctcagatgccaattgttgcctggacgcaatctgttattattatatggctaaggaatttcaggaggcaagtgctctagccgtcgcaccgtctgccaaggcgcacaagagccaggatagcttatgcgtcactcttgcttag

SEQ ID NO: 188642 - DNA, 930 bp, synthetic construct
  misc_feature 1..930: note = Description of Artificial Sequence: Synthetic coding sequence
  source 1..930: mol_type = other DNA
atgaacggcacctacaacacctgcggcagcagcgacctgacctggccccccgcaatcaagcttggcttctacgcctatctcggggtcctgctcgtgctgggcctgttgctaaacagccttgcactgtgggtgttttgctgccgcatgcagcagtggaccgagaccaggatctacatgacaaatttggctgttgctgatctgtgcttactatgcacattgcccttcgtattgcacagcctacgggatacatccgacacacccctttgccagctgtcccagggaatttacctgaccaacagatatatgagcatctccctagtgaccgctatcgctgtggaccgatacgtggctgtgcgacatcctttgcgcgccagaggattaaggtcccccagacaggccgctgctgtttgtgctgtgctctgggtgctggtgatcggctccctcgtagcgaggtggttgctcgggattcaggagggcggcttctgttttaggtctacacggcacaacttcaattcaatggcattcccactcctgggtttctatttacccctagcagtagtagtattttgcagcctaaaagtggtgaccgccctcgctcagcgaccacctacggacgtgggccaggccgaagctactcgtaaagctgcccggatggtgtgggccaatttactggtcttcgtcgtgtgctttctgcccctacatgtcggcctcacagtgcgtctcgccgtaggttggaacgcctgcgcgttgctcgaaaccattagaagagccttgtatatcacttccaaactatcggatgcaaactgttgccttgatgccatttgttattactacatggctaaagagtttcaggaggccagtgcattggccgtggccccatctgccaaggcacataaatctcaggactctctgtgtgtgacactggcatag

SEQ ID NO: 188643 - DNA, 930 bp, synthetic construct
  misc_feature 1..930: note = Description of Artificial Sequence: Synthetic coding sequence
  source 1..930: mol_type = other DNA
atgaacggcacctacaacacctgcggcagcagcgacctgacctggccacctgcgataaagctggggttttacgcatatctgggcgtactgctggtcttggggctgctgctgaattccctggctctgtgggtcttttgttgccggatgcaacagtggaccgaaactagaatttacatgacaaacctggctgtagctgacctttgcctgctatgtacgcttccttttgtcctgcattccctacgcgacacctctgatactcccctctgtcagctcagccagggcatctacttaacaaatcgctacatgtccatttctctggtgactgccattgcagtggataggtacgtcgcagtgcgccacccattaagagccaggggtttgcggtctccacgccaggcagctgcggtgtgcgcagtgctctgggtgctagtcattgggtccctagtcgcacgttggcttctgggcatccaagagggcggattctgttttcgctctacaaggcacaattttaattcaatggcctttcctcttctcggattctacctccctctagcggtcgtagtcttttgtagtctgaaggtggtaaccgctctcgcacaacgacctccaaccgacgtggggcaggccgaggcaacaagaaaagcggcccgcatggtgtgggccaaccttctagtgttcgtggtgtgtttcctcccactccacgtcggcctgactgtcaggctggccgtgggctggaatgcatgcgccctgctggagacaatcaggcgcgccctctacattacctctaagttatcagacgctaactgctgcctggacgcaatatgctattactacatggctaaagagtttcaggaggcctccgccttggccgtggcaccaagcgccaaagctcataaatcccaggacagtctatgcgtgacactggcctag

SEQ ID NO: 188644 - DNA, 1023 bp, synthetic construct
  misc_feature 1..1023: note = Description of Artificial Sequence: Synthetic coding sequence
  source 1..1023: mol_type = other DNA
atgctgagcggcagccgggccgtgcccaccccccaccggggcagcgaggagctgttgaaatacatgcttcattccccctgcgtttccctgaccatgaacggaacatacaacacttgcggaagctctgacctgacctggcctccggctatcaagttgggattctatgcctacctcggggtcctgctggtgctgggcctgctcctgaattctctggccctttgggtgttttgttgtcggatgcagcaatggaccgagacacgcatctacatgacaaacctagccgtggctgacctgtgcctcctctgtacgctgcccttcgtgttacattcgctgcgggatacgtccgatactcccctgtgtcaattatctcagggtatatatctgaccaaccgctacatgtctatatcactggtgacggccatcgctgtggaccggtatgtggcagtgcgccaccccctgcgcgcacgcggcctgcgtagtcctaggcaggcggcagctgtgtgtgccgtcctgtgggtgctagtcatcggtagcctggtggcccgctggctactcggcattcaggagggcggattctgtttcagatctacaagacacaattttaactccatggcatttcctctgttgggcttttatcttcctttggccgttgttgtattctgttctcttaaagttgtaactgccctggcacaacgaccacctaccgacgtaggtcaagcagaggcgacgcgtaaagcagcacgcatggtgtgggcaaacctgctcgtcttcgtggtgtgcttcctgccactgcatgttggcctaaccgtccgcctcgccgttggctggaatgcctgtgctctgttagaaacaatccgtagagctctctacataacgtccaagctgtctgacgcgaactgctgcctggacgcgatctgctactattacatggcgaaggagtttcaggaggcctctgcgttggctgtggctcccagcgcaaaggctcataaaagtcaggactccctctgcgttacactggcttag

SEQ ID NO: 188645 - DNA, 1842 bp, synthetic construct
  misc_feature 1..1842: note = Description of Artificial Sequence: Synthetic coding sequence
  source 1..1842: mol_type = other DNA
atgcgggcccccggcgccctgctggcccggatgagccggctgctgctgctgttacttctgaaggtttccgcatcttctgcactaggggtggcacctgcttcccggaacgaaacctgcctaggtgagtcgtgtgcgcccacggtaatccagcggcgcgggcgagacgcatgggggcccgggaacagcgccagggacgtcctgagagcccgcgctccgagagaggaacagggggctgccttcctcgccgggccaagctgggatttgcccgctgcacccggtcgcgacccagcggccggaagaggcgcggaagcatctgccgccggccctcctggccctcccacgagacccccagggccctggcgctggaagggggcacgggggcaggaaccgtcagagaccttggggcgcggaaatccaaccgcccttcagttgttcctgcaaataagcgaggaggaggagaaggggccccgaggcgccggcatttccggcaggagtcaagaacaatcagtgaaaactgttccaggcgccagtgacctgttttattggcccagacgtgcaggcaagcttcaaggatcccatcataaaccattatctaagacagctaatgggctggctggacatgagggttggaccatcgctctccctgggagagccctggcccagaatggtagcctaggcgaaggcattcacgagcctggagggccacgccgcggaaattccactaatagaagagttcggctcaagaatcctttctaccccctcacacaggagtcctatggtgcctatgcagtgatgtgcctgagtgtggtcatttttggtactgggattataggaaatttagccgtgatgtgcattgtatgtcataactattatatgcgctcgatctccaactctttgctcgcaaacctcgccttctgggactttctcatcatttttttttgccttccacttgttatttttcacgagctgacgaaaaaatggctcctggaagactttagttgtaagattgtgccatacattgaggtggcaagtctcggggtgacaacgttcacactgtgcgccctgtgcatcgaccggtttagagccgccaccaacgtgcagatgtattacgaaatgatcgaaaactgttctagcaccacagcgaaactggctgtgatttgggttggcgcgctgctcttagctctcccagaagttgtattaaggcaactcagcaaggaagacctggggttctctggacgcgctcccgctgaacggtgcataatcaaaatcagcccagatctgcccgacacgatctacgttcttgccctgacctatgacagcgcgagactgtggtggtacttcgggtgttacttttgcctgcctaccctgtttacaataacgtgttcgttggtgactgccaggaagattagaaaggccgaaaaagcgtgcacgcgagggaacaaacgccagatccagctcgagtctcagatgaactgcactgtggtggctcttactattttatacgggttctgtatcatccctgaaaacatctgcaatattgtgacagcatatatggcaacgggggtaagccagcagactatggacctactaaacatcatcagtcagttcctgctatttttcaaatcttgtgtgacaccagtgcttctcttttgcctgtgcaaaccattttcaagggcttttatggagtgttgctgctgctgttgtgaggaatgcatccagaaatctagtacagttacctccgacgacaacgataacgaatatactacggagctggaattgtctccgtttagcacaatcagacgagaaatgtccacgttcgcctccgtcggaacccactgttag

SEQ ID NO: 188646 - DNA, 1362 bp, synthetic construct
  misc_feature 1..1362: note = Description of Artificial Sequence: Synthetic coding sequence
  source 1..1362: mol_type = other DNA
atggccagccccagcctgcccggcagcgactgcagccagatcatcgatcactctcacgttccagagttcgaggtggcaacctggattaagatcaccctaattctggtctacctgatcatcttcgtgatggggttactcggtaactcagcgacgattcgggtgacccaggtgctgcagaagaaggggtacttgcaaaaggaggtcacagaccacatggtgtccttggcttgttccgatatactcgtgttcctcatcggtatgcctatggagttttatagtatcatctggaatccactgacaaccagttcctacaccctgagctgtaaacttcatacgtttctgttcgaagcctgctcttatgccactcttttacatgttctcaccttatctttcgagaggtacatcgcaatttgccacccatttagatacaaggcggtgtctggaccttgtcaggtgaaactgttgatcggattcgtctgggtgacttctgcactggtggctctgcctctcctgtttgctatgggtactgagtacccgctggttaatgtgccatcacatcgcggtttaacctgtaaccggagttcaacaagacaccacgagcagcctgagacttctaacatgagcatatgcaccaacctatcatcccggtggactgtgttccaaagctccatcttcggtgctttcgttgtctacctagtcgtgttgctctcagtggccttcatgtgctggaacatgatgcaggtactgatgaagtctcagaaaggttccctggctggcggtacccgccctccacaactgcggaagagcgagtctgaggagtccaggaccgctcgtaggcagaccattattttcctgagattgatcgtggtgacattggccgtgtgctggatgcctaaccagatcagaagaattatggctgctgcaaagccaaagcacgattggactaggagctatttccgcgcgtacatgatcttactcccatttagtgagacgttcttttacctaagctcagtgattaaccctcttctctacaccgttagcagccagcagttcaggcgggtattcgtccaggtgctgtgctgccgactgtctctccaacacgcaaaccacgagaagcgcctgcgcgtgcatgcacattccaccacagacagcgcccggtttgtgcaaagaccattattatttgccagcagacggcagagctctgcgcgacgcacggaaaagatctttctatccaccttccagtccgaagccgagccacagtcaaagtcacagagcctctcactggaatcccttgaacccaattccggcgctaagcctgccaactccgccgccgagaacggctttcaggaacacgaggtatag

SEQ ID NO: 188647 - DNA, 1089 bp, synthetic construct
  misc_feature 1..1089: note = Description of Artificial Sequence: Synthetic coding sequence
  source 1..1089: mol_type = other DNA
atgggcaaccacacctgggagggctgccacgtggacagccgggtggatcatctgttcccaccctctttgtacatcttcgtgattggtgtgggactgccgacgaattgtctggctctctgggctgcttatcggcaggtccagcagagaaatgaattaggtgtgtacctgatgaatctttccattgcagacttgctttatatttgtaccctgcccctgtgggtcgactattttctgcaccatgataattggattcacggtcctggaagctgcaaactctttggctttatcttctatacaaacatatacatcagcatcgctttcttatgttgcatttcagtagaccgctacttagccgtggcccaccctctccgctttgcccgcctgcgccgtgtcaaaacagctgttgccgtgtctagcgtggtatgggctaccgaactgggggccaactctgcccccctgtttcatgatgagctatttcgggacagatataatcataccttttgttttgagaagttcccaatggaagggtgggtggcttggatgaacctctaccgcgtgtttgtgggcttcctgtttccctgggccctgatgctgctctcttacaggggtattctgcgcgccgtgaggggatcagtcagtacggagcggcaggagaaggctaaaataaaacggctagccctgagtctgattgcaattgttctcgtttgcttcgcgccttaccacgtgctcctcctgtcccgctcagctatctaccttggacggccctgggactgtggattcgaggagagggtgtttagtgcttaccacagtagcttggccttcacctccctcaattgcgttgccgatccgatcctgtattgtctggtaaacgaaggcgcacggagcgacgtcgccaaagctctgcataacttgctgcgtttccttgcttccgacaaaccacaggagatggccaatgcatcactcacgctcgaaacccctcttacgagcaagagaaacagtaccgccaaggccatgaccggctcctgggccgctactcccccaagccagggtgaccaagtacaactcaagatgcttccacctgcccaatag

SEQ ID NO: 188648 - DNA, 1041 bp, synthetic construct
  misc_feature 1..1041: note = Description of Artificial Sequence: Synthetic coding sequence
  source 1..1041: mol_type = other DNA
atggacaccggccccgaccagagctacttcagcggcaaccactggttcgtgttctccgtgtacctcctaacattccttgtgggactgccactcaacttgttagccttggtcgtattcgtgggaaagttaagatgcagacctgtcgcggtagacgtacttttgttgaatctcactgcctctgatttgctgctcttgctgtttcttccgttccggatggttgaagctgctaacggcatgcactggcccttacccttcatactttgtcccttatccggtttcattttttttaccacgatctacctgacggccctcttcctggccgccgtcagcatcgagagatttctgtccgtcgcgcaccctctgtggtataaaacccgcccccgcctggggcaggccggtttggtgagtgtggcgtgttggctcttggcttctgctcattgttctgtggtttatgttatagagttcagcggcgatatttcccactcacagggaactaacggaacatgctacctggagttctggaaagatcagctggccatcctcctcccagtccgattggaaatggccgtggtgttgttcgtagtgcccctgataatcacctcgtattgttacagcaggctcgtgtggattctggggcgcggaggctcccataggaggcagcgccgggttgccggcctggtggccgccacactgttaaatttcctcgtttgcttcggtccatacaacgtcagccatgtagttggatacatctgcggcgagtcacctgtttggcgaatttacgttacactcttgtccacgctcaattcctgtgtcgatccttttgtgtattatttttctagctcagggtttcaggcggactttcatgaactcctgaggcggctgtgtgggctctggggacagtggcagcaagaatctagcatggaacttaaagaacagaaggggggggaggaacaaagggctgatagaccggccgaacggaagactagcgaacactcgcaaggctgcggaacagggggccaggtggcatgtgccgagaactag

SEQ ID NO: 188649 - DNA, 1119 bp, synthetic construct
  misc_feature 1..1119: note = Description of Artificial Sequence: Synthetic coding sequence
  source 1..1119: mol_type = other DNA
atggcctgcaacagcaccagcctggaggcctacacctacctgctgttgaacacctccaacgcttctgacagtggatccacccagctccccgccccactccgtattagtctcgccatagttatgctcctcatgactgtagtgggattcttgggcaataccgtggtgtgcataattgtataccaaaggcccgccatgcgttcagcaatcaacctcctgctcgccacactggcattttcggatattatgctcagcttgtgttgcatgccattcacagctgtcaccttgatcactgtgaggtggcatttcggagatcacttctgccgtctctctgcgactctgtattggtttttcgtgctggaaggtgtggccatcctgctgattatttccgtcgaccgctttctgataattgtgcaacggcaggacaaactaaacccaaggagggccaaggttataatcgctgtgtcctgggtgctgagcttttgtatcgccgggccaagcctgacgggatggaccctcgtggaagtgcctgcccgggccccgcagtgtgtgctgggatatacagagctccctgctgatagggcctacgtcgttactctcgtggtggcagtattttttgcaccattcggcgtcatgttatgtgcgtatatgtgtattctgaacactgttcggaagaatgctgttagggtccataaccagagtgactctctggatctgagacagctgacgcgggccgggcttcggagacttcagcggcagcagcaagtttctgtggacttaagttttaagaccaaggcctttacaactatccttatcctgtttgtcgggttcagtctgtgctggttacctcattctgtgtatagcctgttaagcgttttctcccagcggttttactgtggatcttcattctatgcaacctcaacctgtgtgttatggctatcctacctgaagtcagtttttaatcctatagtctattgctggcggatcaagaaattcagagaggcatgtattgagctgctgccacagacatttcagatcctgcccaaagtaccagagcgaattcgacggagaattcagccctccactgtatatgtttgtaatgagaaccaatccgccgtgtag

SEQ ID NO: 188650 - DNA, 837 bp, synthetic construct
  misc_feature 1..837: note = Description of Artificial Sequence: Synthetic coding sequence
  source 1..837: mol_type = other DNA
atgagcgcccccggcagccccgaccaggcctacgacttcctgctgaagtttctgttggtcggggatcgggacgtgggcaagtccgagattctggagtctctccaggatgggacagcagagtccccctactcccatctggggggtatagattacaagacaacaaccatactgttggacggacagagggtgaagctgaagctgtgggacaccagcggacaaggacgtttctgtactatcttccgctcctattcgaggggagcccagggcgtgattttggtgtacgatattgctaacaggtggagcttcgaagggatggaccggtggatcaaaaaaattgaagaacacgcccccggggtgccgaagattttggtaggaaatcgtttacatcttgcatttaaaagacaggttcccagagagcaggcccaggcatatgctgagaggcttggagtgacatttttcgaggtctcgcccctgtgtaatttcaatataattgagagctttactgaattagcccgtatcgtgctgctccgccatcgcctaaactggttgggccgcccgagtaaagtattgagtctccaggatttgtgctgtcgaactattgtttcctgtaccccagtgcacctggtggacaagctgccgctgcccatagcactgaggtcgcatctaaagagtttctccatggcaaaaggcttgaacgcaagaatgatgaggggactgtcttatagccttactacttcttctacgcataagcggagtagcctctgtaaggtaaagattgtatgtcctccacagtccccgccaaaaaactgtaccaggaactcctgcaagatttcatag

SEQ ID NO: 188651 - DNA, 585 bp, synthetic construct
  misc_feature 1..585: note = Description of Artificial Sequence: Synthetic coding sequence
  source 1..585: mol_type = other DNA
atggtgatcctggccgtgaccaagaacaagaagctgcggaacagcggtaacatctttgtggtaagccttagcgtggctgatatgctcgtcgctatttacccctatccactgatgctgcatgcgatgagcatcggaggatgggatttatcgcaactgcagtgtcaaatggttggtttcatcactggcctgagcgtggtagggtcaatttttaatatcgtggctatcgccatcaatcgctattgttatatatgtcatagtcttcagtatgaaaggattttctcagtgaggaacacctgtatatatttagtaattacatggatcatgacggtgctcgcagtgctgcccaatatgtacattggaaccattgaatatgaccccagaacctatacttgtatctttaactacctgaacaacccggtgttcacagtgaccattgtctgtattcatttcgttcttccgctcctaatcgtcggattttgctacgtgaggatctggaccaaagttctggctgcacgcgaccccgcaggacagaatcccgacaatcaactggcagagccgacgagtactgccgcctccactttatag

SEQ ID NO: 188652 - DNA, 1086 bp, synthetic construct
  misc_feature 1..1086: note = Description of Artificial Sequence: Synthetic coding sequence
  source 1..1086: mol_type = other DNA
atgaacgagagccggtggaccgagtggcggatcctgaacatgagctccggcatcgtaaacgtgtctgaacgacatagttgcccgttggggttcggacattacagtgtcgttgatgtttgcatctttgagaccgttgtgattgtgctcctcacctttcttataattgctggaaacttaacggtgatctttgtcttccattgcgctcccctgctgcaccactacacaacatcttacttcattcagacaatggcctacgccgacttattcgtgggtgtgtcttgtctcgtcccaactttgtcgctgctgcattactctactggagtgcacgaatcactgacttgtcaggtatttggctacatcatctctgttttaaagagcgtcagcatggcttgcctggcatgtatttccgtggacaggtaccttgctatcactaaacccctctcttataaccagctggtgacaccctgtcgcttgcgtatttgtatcatccttatctggatatacagctgtctgatttttctcccatcgttctttggttggggcaaacctgggtatcatggggatatctttgagtggtgtgctacaagctggctgacaagcgcctacttcacagggtttatcgtttgcctcttgtatgcccccgctgcctttgtggtgtgttttacttatttccatatctttaagatctgtcggcaacacacgaaggagatcaacgaccggcgggcccgatttccaagccacgaagtagacagcagcagagagacaggacacagcccagatagaagatatgccatggtcctgtttcgtattactagcgtgttttacatgctgtggctgccatatattatatattttttgcttgagtcctctagagtcctggacaaccccaccctgtctttccttacaacttggctggccatatctaacagtttctgtaactgcgtcatctatagcctgtccaacagcgttttccggctcgggttacggcgactaagcgaaactatgtgcacttcctgtatgtgcgtgaaagatcaggaggcacaggaacctaaacccaggaagagggccaactcatgttctatctag

SEQ ID NO: 188653 - DNA, 960 bp, synthetic construct
  misc_feature 1..960: note = Description of Artificial Sequence: Synthetic coding sequence
  source 1..960: mol_type = other DNA
atgagccagcagaacaccagcggcgactgcctgttcgacggcgtgaatgaactgatgaagaccctccagttcgctgtgcacatccccacattcgtcctgggcctgctgctgaatcttctggccatccacgggttcagtacattccttaaaaacaggtggcccgactatgcagctacatctatttatatgatcaacctggcggtctttgatctcctcctggtcctgtctctgccgtttaagatggtcctgtcccaggttcagtcacctttcccaagcctctgcacgctcgtggagtgcctgtattttgtgagtatgtatggctctgtattcacaatctgctttatatccatggaccgatttctggctattagataccctttactagtgtcccacctgcgctcaccaaggaagattttcggtatttgctgtaccatctgggttctggtatggactggctcaatccctatatactcctttcatggaaaagtggaaaaatacatgtgcttccacaacatgagcgatgatacatggagcgctaaagtctttttcccattggaagtcttcgggttcctgcttcctatgggcattatggggttctgctgcagcaggtcgattcacatcctgctgggccgtagagaccacacccaggactgggtgcagcagaaggcttgtatttactcaatcgccgcatccctggctgttttcgtcgtgagtttcctcccagtacacttgggattcttccttcaattcctcgttcgcaatagctttatcgtcgaatgtagggctaaacaaagcattagtttctttttgcagctgtctatgtgctttagcaacgttaactgttgcctggatgtattctgttattattttgtgattaaagaattcaggatgaacatcagagcgcacaggcccagccgagtccagctggtgttacaggacacgacgatatcacgtggatag

SEQ ID NO: 188654 - DNA, 960 bp, synthetic construct
  misc_feature 1..960: note = Description of Artificial Sequence: Synthetic coding sequence
  source 1..960: mol_type = other DNA
atgagccagcagaacaccagcggcgactgcctgttcgacggcgtgaacgagctaatgaagaccctgcagttcgccgtccatatccctacatttgttctgggtttactcttaaacttgctagcgattcacggattttcaacattcctcaagaaccggtggcctgactacgccgccacaagcatctacatgattaatctggcagtattcgacctgcttttggtcctgtctcttccgtttaaaatggtgttatcacaagtgcagtcccctttcccttctttatgtacgctggttgagtgcttatactttgtgagcatgtatggcagcgtatttacaatttgctttattagcatggatcgtttcctggcaatccgctatcctcttttagtgtcccacttgcggtctccccgtaaaattttcggtatttgttgcaccatctgggttctggtgtggacagggtcgatcccaatttattcttttcacgggaaggtagaaaagtatatgtgttttcacaacatgtctgatgatacctggagcgccaaggtgtttttccctttggaagtgttcggcttcctgcttcctatggggattatgggcttttgctgctccaggtctatacacatcctcctgggtcgccgggatcatacgcaggactgggtgcaacaaaaggcctgcatctacagtattgccgcgtctttggcagtgttcgtcgtgagcttcctacccgtgcatctcggcttttttctgcagttcctcgtgaggaacagtttcatcgtggagtgccgggccaagcaaagcattagcttttttctgcagttgtcaatgtgcttctctaatgtgaattgctgcctcgatgtgttctgctactatttcgtaatcaaggaattcaggatgaatatccgggcacatcgccccagtagagttcaactcgtcctccaagacaccaccattagccgcgggtag

SEQ ID NO: 188655 - DNA, 729 bp, synthetic construct
  misc_feature 1..729: note = Description of Artificial Sequence: Synthetic coding sequence
  source 1..729: mol_type = other DNA
atgagccagcagaacaccagcggcgactgcctgttcgacggcgtgaacgagttgatgaagacactgcagttcgccgtccatatcccaacattcgttttggggctactgttgaacctgcttgctattcacggctttagcacatttttaaagaatagatggccggattacgccgctacgtctatctatatgatcaatctcgctgtgttcgatctgcttctggttttgagcctcccttttaagatggtactttcacaggtacagagtcccttccccagcctgtgcacccttgtagaatgtttatatttcgtctccatgtatggatccgtgtttactatatgttttataagcatggaccgtttcctggcgatacgttaccctcttcttgtgagccaccttcgcagcccccgcaaaattttcggtatttgttgtactatttgggtactggtgtggaccggaagcatcccaatatacagtttccacggaaaagtagagaagtatatgtgcttccacaatatgagcgacgacacctggtccgccaaggtgttctttcctctggaggtgttcggattccttctgcctatgggcattatgggattctgctgcagtcgatccattcatatccttcttgggcgccgcgatcacacccaagactgggtgcagcagaaggcgtgcatctatagtatcgctgccagcttggccgtattcgttgtaagtttcctccccgtatag

SEQ ID NO: 188656 - DNA, 960 bp, synthetic construct
  misc_feature 1..960: note = Description of Artificial Sequence: Synthetic coding sequence
  source 1..960: mol_type = other DNA
atgagccagcagaacaccagcggcgactgcctgttcgacggcgtgaacgagctaatgaagacgctgcagtttgccgtgcatataccaactttcgtgctgggccttctgcttaatctgctggcaatacacggcttctcaaccttccttaagaatagatggcccgattacgccgcaacgtcaatatacatgattaatctggcagtctttgatcttctcctggtgctcagcctgccattcaaaatggttctctcccaggtacaatcaccttttccttctctgtgtacccttgtggaatgtctttactttgtatcaatgtacgggagtgtgttcacgatctgcttcatcagcatggaccgatttctcgccattcgttatccattgctggtttcccatttaaggtctccacgaaaaattttcgggatctgctgcacaatctgggttttggtctggacgggatccatccccatctacagcttccatgggaaagtggagaaatacatgtgtttccataacatgagcgacgatacttggtctgccaaggtgttctttccactggaagtgttcggattcttactaccaatgggaataatgggattttgctgttccaggtccattcacattctcctgggtcgaagggaccacacacaggactgggtacagcagaaggcctgtatatactctatcgccgctagcctcgcagtctttgtcgtgtcctttctgcctgtccacttaggctttttcctccaatttcttgtgcgaaattccttcatcgtggagtgtcgagcaaaacaaagcatttcattcttcctgcaacttagcatgtgtttctcaaatgtcaattgctgcctggatgttttttgctattactttgtgatcaaggaattccgtatgaacatccgcgctcatcgcccatcacgagtgcagctggtgctccaagacaccaccatctcgcggggctag

SEQ ID NO: 188657 - DNA, 1572 bp, synthetic construct
  misc_feature 1..1572: note = Description of Artificial Sequence: Synthetic coding sequence
  source 1..1572: mol_type = other DNA
atgaccccccagagcctgctgcagaccaccctgttcctgctgagcctgctgttcctggtccagggcgcacatggccggggacatagggaagattttcggttctgtagtcaacagctgcagagcctcgagtctaaactcacctccgtcaggtttatgggcgacatggtcagcttcgaagaggatcgcatcaacgctaccgtgtggaaactgcaacctacagctggactgcaagacctccatattcattcacggcaggaagaagaacaaagcgagatcatggaatactctgttctgctgccacgcactctctttcaacgcaccaaggggcgcagtggggaggccgaaaaacgactccttctggtggacttcagttcccaggctctctttcaagacaagaactcatcacaagtactaggagagaaagtacttggcatcgtcgtgcagaacacaaaagttgccaacctgacagagccagtggtcctgacattccaacatcagttacaacctaagaacgttacccttcagtgcgtcttttgggtggaagacccaaccctgtcctcgccaggtcattggtctagcgccggatgcgagacagtgaggagggagacccaaacatcctgcttctgcaatcacttgacatacttcgctgtgttgatggttagctctgttgaagtagacgcagtccacaagcactacttgtccctgctttcgtacgtgggatgcgtagtgtctgctttggcttgcctggtgaccatcgccgcctatctgtgctctagggtccctctgccatgtagacgcaaaccgagagactataccatcaaggtccatatgaacctgctattggccgtttttctcctggacacctctttccttctcagtgaaccagtagctctgacaggatccgaagccggctgccgcgcctctgctattttcttacatttctccctgttaacatgcctttcatggatggggttggaagggtataacttatatcgcctagtggtggaggtgtttggtacatatgtcccggggtatctgctcaaacttagcgccatggggtggggattccccattttcctcgtcaccctggtggcattggtggacgttgacaactatggacccatcatcctggccgtccaccgcaccccagaaggggtcatctacccatccatgtgctggattcgtgactccttggtgtcctatatcaccaatttaggactgttctccctggtgttcctgtttaatatggctatgctcgccaccatggtggtgcaaatcctgagacttcggccccatacgcagaagtggtcccacgtcctgacgctgctcggcctgagcctcgtgttgggactaccttgggcacttatctttttttcattcgcctctgggaccttccaactcgtggtactttacctgttttctatcatcacaagtttccaggggttcctgattttcatctggtactggtctatgagactccaggcgagaggaggtccatctcctttgaagtcaaactctgattctgctcggctacctatttcctctggctcgaccagttcaagccgtatttag

SEQ ID NO: 188658 - DNA, 2082 bp, synthetic construct
  misc_feature 1..2082: note = Description of Artificial Sequence: Synthetic coding sequence
  source 1..2082: mol_type = other DNA
atgaccccccagagcctgctgcagaccaccctgttcctgctgagcctgctatttctagtgcagggcgcgcacggcagaggccaccgagaggactttcggttttgttcacaaaggaaccagacccacagaagcagtttgcattataaacctactcctgatttgcgaattagcatcgagaatagcgaagaggctttgacagtgcatgccccattccccgccgcccacccagcgtcacggagttttcccgacccacgtgggttgtaccacttctgcctctactggaaccgccacgccggacgcctgcatctgctatacggtaagcgcgacttcctcctttcagataaggcgtctagccttctgtgttttcagcaccaggaggaaagcctcgctcagggccccccgttgcttgccacatctgtaacttcctggtggtcaccccagaacatttcactgcctagcgccgcatcttttacatttagttttcacagtccaccccatactgcagcccataacgcgtcagtggatatgtgcgagttaaagcgcgacctccagctcctttcgcagtttctgaagcatccacagaaagcgtcgcggcggccaagtgcagcccccgcgtcacaacagctccaatctctagagagcaaactaacctctgtgcgcttcatgggcgacatggtaagcttcgaagaggacagaataaacgcaactgtgtggaaactgcagcctactgccggcctgcaagacctgcacattcactccagacaggaggaggagcagtccgagataatggagtatagtgtgctgctacctcgaacgttgtttcagaggacaaagggccgcagcggcgaggctgaaaagcgattactcctggtggacttctcatcccaggctctattccaggacaagaatagctcgcaagttcttggcgaaaaggtactgggcatcgtcgtgcagaacacaaaggtcgcaaacttgacggagcctgttgtcctaacatttcagcaccagctacagccaaagaacgtgaccctgcagtgtgtcttctgggtcgaggaccctaccctgagctccccagggcattggtcttccgctggctgcgaaacagtcagacgagagacgcagacctcctgtttctgtaaccacctcacttatttcgctgtgctgatggtgtcttctgtcgaggttgacgccgttcacaagcactacctgtcccttctcagctatgtcggctgcgtcgtcagcgctctcgcatgcttggtgaccatcgcggcttacttgtgtagccgggtacctctcccatgcaggcggaagccaagggactacaccattaaggtgcacatgaatctgctgctggctgtttttctgctagacacatcctttctgctatccgagcctgtggcgctgaccggatctgaggcagggtgccgagcatctgccatcttcctgcatttcagtctacttacctgtttgagctggatgggcctggaagggtataatctctacagactggtggtggaggtgtttggcacgtacgttcccggttatctgcttaagctgtcagcgatgggttggggattccccattttcctggtcacactggtggctctggtggacgtggataactatggccccattatcctcgctgtgcaccgcactcctgagggggtcatctacccctcaatgtgctggattcgggacagcctcgtgtcatacataaccaacctcggccttttttccctggtctttttattcaatatggcaatgttggccactatggtggtgcaaatcctgagactgaggccacacacacaaaaatggtcccacgtgctgaccctgttgggattgtcacttgtcttgggactgccatgggctctaatcttcttctctttcgcaagtgggacttttcagcttgtcgtgttgtacctcttttcgattataacatctttccaaggctttctgatttttatctggtactggtcgatgaggctgcaggcccgtgggggacccagcccactaaagtctaactccgacagtgccaggctgccgatttctagcggctctacatcttcctctagaatttag

SEQ ID NO: 188659 - DNA, 2082 bp, synthetic construct
  misc_feature 1..2082: note = Description of Artificial Sequence: Synthetic coding sequence
  source 1..2082: mol_type = other DNA
atgaccccccagagcctgctgcagaccaccctgttcctgctgagcttgctttttctcgttcagggcgcccacggccggggccacagagaggactttagattctgcagccagaggaatcagacccacagaagtagcctgcactacaaacccacccccgatctgcggatttcaattgaaaactcagaggaggctttgacagtgcacgccccatttccagctgctcacccggctagtcgttcgttccctgaccctcggggactctaccatttttgcctgtattggaatcgacacgctggcagactccatttgctgtatggcaagagagacttcctcctaagcgataaagcatcttccttgctgtgcttccagcatcaggaggagagcctggcccagggaccacccctgttggccacctccgtcacgtcttggtggagtcctcagaatatctccctgccaagcgccgccagttttacattcagcttccactcccccccccacacagctgcacataatgcctcagtggatatgtgcgaactcaagcgggacttgcagctactgagccaatttctcaagcacccacagaaggcttcccgacgtccatcagccgcaccagcctctcaacagctgcaatccctggagagtaaacttacgagtgtgaggtttatgggcgacatggtgtctttcgaagaggatcgcatcaacgctactgtgtggaagctacagccgacggcaggattgcaggacctacatatacactcccgacaagaagaggagcagtctgaaattatggaatattctgttctgctgcctcgcacattatttcagcggaccaaaggcaggagcggagaggcagagaaaaggctcttacttgtagacttttcttctcaggctctgttccaggacaaaaactcaagtcaggtactcggcgagaaggtgctaggcatcgtagtccagaataccaaagtggccaatcttaccgaaccggtcgtcctgacatttcagcaccagcttcagcccaagaatgttacgctgcagtgtgtgttttgggttgaggaccctaccctctcatctccgggacactggtccagtgcaggatgtgagacagttcgaagagagactcagactagctgcttctgtaaccacctgacctactttgcagtcttgatggtaagttccgttgaagtggacgctgtgcataaacattacctttctctgctctcctacgtgggatgtgtggtgtccgcactggcctgtctggttactatcgccgcctacttatgctccagagtgcccttaccttgtaggcggaaaccacgtgactacactatcaaagtgcacatgaacctcctgttagccgttttcctactcgacaccagctttcttctctccgagccagtagcattaaccgggagtgaggccggttgcagggcctcagccattttcctgcacttctccttgctgacatgcctttcctggatgggtcttgaagggtataatctatatcgcctcgtcgtcgaagtgtttggtacctatgtacccggttacctgctcaaactttccgccatgggttggggctttcccatttttctagttaccttagtggccctggttgacgtagataactacgggccaataatcctggctgtacacagaactcctgagggcgtgatatatccatccatgtgttggatccgggatagcctggtgagctatataacaaacctgggactattttcactggtgttcctgttcaatatggccatgctggccaccatggttgtccaaatcctccgcctgaggccccacacacagaagtggtctcacgtgttgacccttttggggctttctctggtcctgggacttccgtgggctctgatttttttctcgtttgcctcgggtacttttcaacttgttgtgctgtacttgttttccatcattacgagtttccaaggcttcttaatcttcatttggtattggagtatgcgcctgcaggcccgaggggggcccagcccgttgaagagcaactcggactccgcacgtctgcctatttcatccgggagcacatcctcttctaggatctag

SEQ ID NO: 188660 - DNA, 2064 bp, synthetic construct
  misc_feature 1..2064: note = Description of Artificial Sequence: Synthetic coding sequence
  source 1..2064: mol_type = other DNA
atgaccccccagagcctgctgcagaccaccctgttcctgctgagcctgttgttcctggttcagggggcccacgggagaggacatcgggaggatttcagattttgttcccagaggaaccagacacacaggagctccctgcattacaagcccacacccgatttgagaatctccatagagaatagtgaagaggcactgactgtgcacgctcccttcccagcagcacacccggcttcacggtctttccctgaccccagaggactgtaccatttttgcttgtattggaaccgccacgccggcaggctgcatctactgtacggaaagagagactttctccttagtgacaaggcttcaagcctcctctgttttcagcatcaagaggagtccttggctcagggaccccccctgctggcgacatctgtcacgtcctggtggtctcctcaaaacatctctcttcctagcgctgcctccttcaccttctcttttcacagccctcctcacaccgctgcgcacaacgcctccgtggacatgtgcgagcttaaacgggatttgcagctgctgtctcagttcctgaaacacccccagaaggccagtcgacgaccaagtgccgctcctgctagccagcaactgcagtcattagagagtaagttgacgagcgtgcgcttcatgggtgacatggtgagctttgaggaggatcgaatcaacgcaactgtttggaaactgcaaccgactgcggggctgcaggatctacacatccactcgaggcaagaggaggaacagtcagagataatggagtattccgttctgctgcctcgaactctcttccagcgcaccaaggggcgctctggggaagccgagaaaaggttgctgctcgtggatttcagttcccaggcactgttccaagacaagaacagttcgcaggtgcttggtgagaaggtcttgggcatagtcgtgcaaaacactaaggttgctaacctgaccgaacccgtggttctcacattccagcatcagctccaacccaagaatgtcaccctccagtgtgttttctgggttgaagaccccactctctcaagccctggacactggtcaagcgcgggttgtgaaacagtgagacgagaaactcagacctcttgcttctgtaaccaccttacgtacttcgccgtgcttatggtgtcaagcgtggaggtcgatgcggtgcacaagcattatctgagtcttctatcttacgtggggtgcgtcgtgagtgccctggcatgcctcgtaacaatcgccgcctatctgtgctcccgcaggaaacctagggactacaccattaaagttcatatgaacctcctgctagcagtcttcctgctagacacctcattcctgctaagtgagccagtggccctgaccggttctgaggcagggtgtagagcctccgcaatttttctgcacttttctctgctgacatgtttatcctggatggggttagaaggatacaatctctataggcttgtggtggaagttttcggtacctacgtgcccggctatttgctgaaactgtctgctatgggctgggggttcccgatctttctcgtgactttggtcgccttagttgacgtggataactacggacctatcattcttgccgtccacaggactccagaaggcgtgatctatccatccatgtgctggattagggactccctggtgagctatatcaccaatttaggactgttcagtctggtgtttttgttcaatatggcgatgctggcaaccatggtggtgcagattctccggctgaggccccacacccagaagtggagccacgttctcacattactgggactgagcctggtgctggggctgccttgggctctgatcttcttctccttcgccagcggaacttttcaactggtggtattgtatttgttttccatcatcacctcttttcagggcttccttatcttcatatggtattggtccatgcgactgcaagccagaggtggcccctccccgctgaagagtaactcagactcagccagactgcctattagttcaggtagtacatccagttctcgtatctag

SEQ ID NO: 188661 - DNA, 2082 bp, synthetic construct
  misc_feature 1..2082: note = Description of Artificial Sequence: Synthetic coding sequence
  source 1..2082: mol_type = other DNA
atgaccccccagagcctgctgcagaccaccctgttcctgctgagcttgctctttcttgtgcagggggcccatggaagaggacaccgcgaggatttcaggttttgttctcagcggaaccagacgcacagatcttccctgcattacaagcctaccccagatttgaggatttccatcgaaaactctgaagaggcgctgaccgtgcatgccccgttccctgccgcccaccccgccagccgctcctttcctgaccccagggggctgtaccatttttgtttgtactggaatcggcacgccggccgcctccacctgttatacgggaagcgtgacttccttttatctgacaaagcttcatcgctgctgtgctttcagcaccaggaagaaagtctggcgcagggacccccattactcgccaccagtgttactagttggtggtcccctcagaacatctcccttccatctgctgcatcgtttacattcagcttccactccccaccacacacagctgcacacaatgcatcggtcgatatgtgcgagctgaagcgtgacctgcaactgctgtcccagttcctgaaacatcctcaaaaggcttcccgacgcccttctgccgcccccgctagccagcagctacaatctcttgagagtaaactgacctccgttcgcttcatgggagacatggtgtcattcgaggaagacaggattaatgcaactgtctggaagctgcagccaaccgccggtctgcaagatcttcacatccattcccggcaagaggaggagcagagcgaaattatggagtactcggtgttactgcccagaaccctgttccaacgcacaaaggggaggtcaggcgaagcagaaaagaggcttctgctcgtcgatttttccagccaagccctcttccaggacaagaactcctctcaggtgctgggtgagaaagtgctgggaatcgtcgtgcagaatactaaggtggcaaacctgaccgagcccgtcgttctcacatttcagcaccaactgcaacccaaaaatgtgacgctgcagtgcgtgttttgggttgaggacccaactttgagcagccctgggcattggtctagcgctggatgcgaaaccgtaagacgggagacccaaacctcttgtttttgcaaccatctcacctatttcgccgtgctgatggtatcgtctgttgaagttgacgccgtccacaaacactacctttccctgttaagctatgtcggctgtgtagtgtccgcccttgcctgcctcgtcacgatagcggcatatctgtgttcgcgcgttcccctgccatgccggcggaaacctcgcgattacacaatcaaggtgcatatgaatctactgctggcggtgtttctcctggacacctccttcctgctgagcgaacctgtcgcactgaccggatccgaagccggctgcagagcctctgctatcttcctgcacttttccctgctgacttgtctctcttggatgggtctcgaggggtataacctgtaccgcctggtcgtggaggtgtttggtacctacgtacccggctacttacttaaactttccgctatgggatggggattccccattttcttagtgacactcgtggccctggtggacgtggacaattatggaccaatcatactggccgtgcatcggacacccgagggggtcatctatcccagcatgtgctggattcgcgactcgcttgtgtcatacattacaaacctggggctgttcagtctcgtgtttctgttcaacatggcaatgctggcgacaatggttgtgcagatcctgcggctgcggccacacacccaaaagtggtctcacgtgctaaccctgcttggcctctctctcgtgcttggactcccttgggcgctgatcttttttagcttcgcctcagggactttccagctagtggtgctctatcttttcagcattatcacttccttccaggggttcctaatctttatttggtattggtccatgcggttgcaggcgcgcggcggtccaagccctctcaagtctaattccgattcagctaggctgccaatcagttccggcagtacttccagctccaggatttag

SEQ ID NO: 188662 - DNA, 2064 bp, synthetic construct
  misc_feature 1..2064: note = Description of Artificial Sequence: Synthetic coding sequence
  source 1..2064: mol_type = other DNA
atgaccccccagagcctgctgcagaccaccctgttcctgctgagcctgctgttcttagtccagggcgcccatggtcgggggcatagagaggactttcggttctgtagtcagaggaatcagactcaccgatcctctctgcattacaaaccaactcccgacctgcgcattagcattgagaactcagaagaggcattaactgtgcatgctcccttcccagctgctcaccccgccagtcgctcctttcccgacccccggggtttgtaccacttctgcttatattggaacagacacgctggtaggctgcacctgctgtacgggaaacgcgatttcctgctatcggacaaggcctcttccctgctgtgcttccagcaccaggaggagagccttgcccaaggccctcctctgctcgcaacttccgtgacaagctggtggtctcctcagaatataagtctgccctccgcagctagctttaccttcagctttcactccccaccccacacagcagcccataatgctagcgtcgacatgtgtgagcttaagagggatctccagctgctgagtcaatttctgaagcacccccaaaaggcaagccgacggccaagcgcagctcctgcatcccagcagctgcagagtctggagtccaaactgaccagcgttcggtttatgggagacatggtttcatttgaggaagatcggatcaatgccactgtctggaagctacaaccaactgctgggctccaggatcttcacatccactcgagacaggaggaggagcaaagcgagattatggaatactctgttttgcttccccggaccctgtttcagagaaccaaggggcggagtggtgaggcagagaaacggctgctcctggtagatttctcttcgcaagctctattccaggataaaaatagttcccaggttctgggggagaaggtgcttgggattgtagttcagaacacaaaggtcgcaaaccttacagagcccgtagtcttaacattccagcaccaattacagcctaaaaacgtgactctacagtgcgtgttttgggtagaggatccaactttatcttcacccgggcactggtcatccgctgggtgtgagacagtgaggcgggagactcagactagctgtttctgcaatcatcttacttatttcgcggtactcatggtgtcttccgtcgaagtcgatgcagtccacaaacactacctgtctctcttgtcttacgtggggtgcgttgtgagcgcactggcttgtcttgtgaccattgctgcctacctgtgttcaagacgaaagcctcgggactacacaataaaagtgcatatgaatctgctgctggccgtctttcttctggacacgtcattcttgcttagcgaaccagtggctctgacgggcagtgaggccggctgccgtgctagcgcaatttttctccacttcagtttgttaacatgcctttcgtggatgggtctggagggttataacctgtatcgcctggttgtggaggtgtttggcacgtatgttcccggctacctgctgaagctgtccgcaatgggttggggcttcccaattttcctggtcacactggtagcacttgtggacgtcgacaactacggcccaatcattttggcagtacatagaacaccagaaggtgtcatctacccctcaatgtgctggattcgtgattccctagtgagttatatcacaaatctcggactcttcagcctcgtttttctgttcaacatggctatgttggccaccatggtggtgcaaatcctacggctgagaccccatacccagaaatggtcccacgtcctcaccttgctgggtctgtcactggtcctgggcttgccatgggcgttaatattcttctccttcgcctctggtacctttcagctcgtggttttgtatcttttctccataatcactagctttcaagggtttctgatttttatctggtattggtctatgagattgcaagctcgcgggggtccgagtccacttaagagcaactcagattccgcccggctcccaatctcaagtgggagtacctcaagctcgcgcatctag

SEQ ID NO: 188663 - DNA, 2064 bp, synthetic construct
  misc_feature 1..2064: note = Description of Artificial Sequence: Synthetic coding sequence
  source 1..2064: mol_type = other DNA
atgaccccccagagcctgctgcagaccaccctgttcctgctgagcctgttattcctcgtgcaaggggctcacggccgcggtcaccgggaagattttagattctgctcccagcggaatcagacacacaggtcatctctgcactataagcccacccctgatttacggattagcattgagaactctgaggaagctctcacagtgcacgccccatttccagctgcgcatcctgccagccgatcatttcctgaccccagaggcctataccacttttgcctgtattggaatagacacgctggtcggctgcacctcctctacggcaagcgcgacttccttttatccgacaaagcttccagtctcctgtgtttccagcaccaggaggagagcctggcccaggggccaccacttcttgcgacctctgttacctcatggtggtcaccgcaaaatattagcctcccttccgccgccagctttaccttttcatttcactctcctcctcatacagccgcccataatgcctcagtcgatatgtgcgagttgaagcgagacctccagttactgtcacagtttctcaaacatcctcagaaggcctccaggagaccttcagcagcccctgctagtcagcagttgcagagcctcgaaagcaaactcacctctgtccgattcatgggcgacatggtgtccttcgaggaggaccggatcaacgcaaccgtttggaaactgcagcctacagcaggcctccaggatctccacattcactctcgccaggaggaggagcagtcggaaattatggagtactcagtattgctaccccgcactctgtttcagcgcaccaagggaagatccggagaagcagagaaacggctcctgttagtcgatttctcatcccaggccctcttccaggacaagaattcgagccaggtcctgggagaaaaggtgctgggtattgtggtgcagaacacaaaggtggcaaacctgacagaacccgtcgtgctcacgtttcaacaccagctccaacctaagaatgtgaccttgcaatgcgttttctgggtggaggatcccacgctcagcagtcctggacattggtcttccgccgggtgcgagactgtgcgaagagaaacccaaaccagctgcttttgcaatcatctgacctacttcgctgtcttaatggtttcgagcgttgaggtagatgccgtgcacaagcattaccttagcctgctatcttacgttggctgcgttgtgtcagcactcgcctgtttggtcacaattgccgcctatctgtgctctcgtcggaagccaagagactacaccatcaaggtacatatgaatctgctcttagctgtattcctcctggacacatcgttcctgctgtctgagccagtggctctgactggatctgaagccggatgtcgggctagtgcaatcttcctccatttctcgttgttgacatgtttgtcctggatgggtctcgaagggtacaacctgtatagactcgtggtggaggtttttgggacttacgtgccaggctatctgctgaagctcagtgcaatgggttggggattcccgatttttcttgtgaccctcgtggccctggtggacgtagacaattacggccctatcatcctggccgtacaccgtacccctgagggcgtgatttacccgagcatgtgttggatcagggatagtttggtgagctatatcaccaacctgggactgtttagcctcgtgtttctctttaatatggccatgcttgccaccatggtcgtccagatcttgcgtttgaggccccacacgcagaagtggtcccatgttctcacattgctcggattgtctctcgtgctggggctgccttgggccctcatcttcttctcctttgcttccggtacatttcaactagtcgtcttgtacctgttctcaatcataactagctttcagggcttcctgatcttcatttggtactggagcatgagactgcaggcgcggggcgggccttccccactgaagtccaattcagactcagcccgtctccctatttcttccggaagtacttccagttcacgcatctag

SEQ ID NO: 188664 - DNA, 1539 bp, synthetic construct
  misc_feature 1..1539: note = Description of Artificial Sequence: Synthetic coding sequence
  source 1..1539: mol_type = other DNA
atgtgcgagctgaagcgggacctgcagctgctgagccagttcctgaaacacccccaaaaagcatctagacgccctagtgccgctcctgctagccagcagctgcagagtctcgagagcaagctaaccagcgttagattcatgggagatatggtgagtttcgaagaggaccggatcaatgccactgtctggaaacttcagccgacagcaggactgcaggacctgcacattcattccagacaggaggaggagcaaagcgagatcatggagtattccgttctgctgccgaggaccctgttccagaggactaagggaaggagcggcgaggctgagaagcggctcctgttggttgatttctcctcccaagcgcttttccaggacaagaactccagccaggtattaggcgaaaaagttctgggcattgtagtgcagaacactaaagtcgcaaatctcaccgaacccgttgtcctcacctttcaacatcagctgcaacctaaaaacgtcacgttacagtgcgtgttttgggtggaagacccaaccctttcctcccccggccactggagcagcgccggttgtgaaacagtgaggcgcgaaacacagacatcgtgtttttgcaaccacctgacctatttcgccgtgctgatggtgtcgtccgtggaagtggatgccgtacacaagcactacctctcactgctgtcctatgtcggctgcgtggttagcgccctggcctgcctggtaaccatcgctgcctacctctgttcacgccgaaaaccacgtgattatacaattaaggtgcatatgaaccttcttttggcagttttcctgcttgataccagctttttattgtccgaacccgttgccctgacagggtcagaagctggatgtcgggctagcgccatcttcctgcacttctctttgctgacatgtctgagttggatgggactggagggttataacttgtaccggctggtggtggaggtgtttggcacatacgtgcctggctacctgctgaagctatccgccatggggtggggtttccctattttcctggtaactctagtggctttagtcgatgtcgataattacggccccattattttagccgtccatcgcaccccagagggtgtcatatacccatcgatgtgctggatacgggactcactggtaagttatatcactaacctgggactgttctctcttgtattcctattcaatatggctatgctggccacaatggtcgtgcaaatccttaggcttcgaccacacacccagaagtggtcacatgttctgacactgctagggctttccctggtgctgggcctgccatgggcgcttatcttcttcagcttcgccagcggaactttccaactggtggtcctctacctcttctccattatcacttcattccagggcttcctaatatttatttggtactggtctatgcgcctgcaggccaggggagggccttcaccactcaagagtaacagtgactcagcacggttacccatttcaagtggtagtacttcctcttcgcgcatatag

SEQ ID NO: 188665 - DNA, 2064 bp, synthetic construct
  misc_feature 1..2064: note = Description of Artificial Sequence: Synthetic coding sequence
  source 1..2064: mol_type = other DNA
atgaccccccagagcctgctgcagaccaccctgttcctgctgagcctcctatttctggtgcaaggcgcacacggccgcggtcatcgcgaggactttagattttgttcacaaagaaaccaaactcatcggagttctcttcactataagccaaccccagatctgaggatcagcatagagaactcagaggaggctctgacagtgcatgcaccctttcctgcagcacatccagccagtcggtcctttcctgacccaaggggtttgtatcacttctgtctctattggaatagacacgccggcagacttcacctgctctatggcaagagggacttcctgctcagcgacaaagctagttcactcttatgcttccagcatcaggaagaatccctagcgcagggaccgccgttgctcgccacctctgttacaagctggtggtcgcctcaaaatataagtttgccatctgccgctagtttcacattcagctttcattcaccaccacacactgccgcccacaatgcgtccgttgatatgtgtgaactgaaaagagatctgcagctcctttcccagtttctgaaacaccctcagaaagcttcacgtagaccatcggcagctcccgcctctcagcagctgcagtctcttgagtccaaactcacctcggtccgtttcatgggagacatggtgtccttcgaggaagatcggatcaacgctacagtgtggaagttgcagcccaccgccggactacaggaccttcacattcacagtcgacaagaggaagaacaaagcgagattatggagtactcggtgttactgccgaggactttgttccagcgaaccaagggccggagcggagaagccgagaaacgattgctgcttgtggatttcagctctcaagccctctttcaagacaagaactcctctcaggtcctcggtgaaaaagtcctaggaattgtggtccagaataccaaggttgctaatctgacagaaccagtggtgcttactttccagcatcagctccagcccaagaacgtaaccctccagtgtgtattctgggtcgaggatcctacgctgagcagcccaggccattggtcctcggccggttgcgaaactgtccggcgagagacacagacttcctgtttctgcaaccacctcacttatttcgcagtgctgatggtctcttctgtagaggtagacgctgtgcacaagcattatctatcgcttctgtcctatgtcggctgtgtggtgtccgccctggcttgtctagtcacgattgctgcgtacttgtgttcaagaagaaagcctcgcgactacacgatcaaggtgcatatgaatctcctgcttgcagttttcctcttggataccagtttcttgctgtccgaacctgtggccctgaccggatccgaagccggctgcagagcatctgctatctttctgcattttagtctgctaacctgtctatcctggatgggcctggaaggttacaatctgtacagactggtcgtggaagtgttcgggacctatgtgcctggctatctgctgaagctgtctgctatggggtggggcttcccaatctttttggttactctggtcgcactggttgacgttgacaattacggtcccatcatcctcgcagtgcatcggactcccgaaggagtgatctaccctagtatgtgttggatccgagacagcctcgtttcctacatcaccaacctaggtctattcagcctggtcttcctgttcaatatggctatgctggctactatggtcgtacagatactccgactacgaccccacactcagaaatggtcccatgtgttgacgctgttagggcttagcttagtgttgggactgccctgggcccttatcttcttttctttcgcaagcggaactttccagctggtcgtgctttatctcttctctataataacatcgttccagggattcctgatcttcatttggtattggagtatgaggctgcaggcacgagggggacccagtcctttgaagagcaattccgactccgctcgcctgcccatttcctccggtagtacatcttcaagtcggatatag

SEQ ID NO: 188666 - DNA, 2064 bp, synthetic construct
  misc_feature 1..2064: note = Description of Artificial Sequence: Synthetic coding sequence
  source 1..2064: mol_type = other DNA
atgaccccccagagcctgctgcagaccaccctgttcctgctgagcttattattcctggttcagggggcccatgggagaggacaccgcgaggatttcagattctgctcccagcggaatcagacccacaggagttctctgcactacaaacctacccccgatttaaggatctcaatcgaaaatagcgaagaggcgctgaccgttcatgcacctttccccgctgcacaccccgcatcaaggtccttccctgatccccgcggtctctaccacttctgcttgtactggaatagacacgccggccggctccatctactttatggaaagcgagactttttactcagtgacaaagcgagctctctgctttgtttccaacatcaggaagagagcttagcccaaggtcctccgcttctggctacaagcgttacatcatggtggtcgccccaaaatatctcgttaccctccgcagcctctttcacattctcttttcacagccctccacacacagcagcccacaacgccagcgttgatatgtgtgagttgaaacgggacctccagctcctgagccaatttttgaaacacccccagaaagccagccggaggcctagcgctgcaccagcatcacaacagctccagagcctggagtcaaagctgaccagtgtgcgtttcatgggtgacatggtgtcctttgaggaagataggatcaatgctactgtctggaagctgcagcccacagctggattacaggatttacatattcactctcggcaggaagaggaacagtctgagatcatggagtattcagttcttctgccacgcaccctttttcaaagaactaaaggacgaagtggagaagccgaaaaacgccttttgctcgtggacttctcttctcaggctctctttcaggataagaatagttcacaggtgctgggagagaaagtgctgggcatcgtggtgcaaaacacaaaggtcgccaacttgacagaacctgtggtgctcacatttcagcatcagctgcagcctaaaaatgtgacccttcaatgtgtgttctgggtcgaagaccccaccctgtctagccccgggcactggtcatccgctgggtgcgagaccgtgcgaagggaaacccagacttcatgcttctgcaatcaccttacatactttgctgtcttgatggtatctagcgtcgaggtggacgccgtccacaagcattacctgtcactcctgtcctacgtgggatgcgtcgtgtcagcccttgcgtgcctcgtgacaattgcagcttacttgtgttccaggcggaagccccgagattacaccattaaagtgcacatgaatctactgttggcagtctttctcctggacacctcattccttctgtcagagcctgtggccctgaccggcagcgaagctggatgtcgagcttcagcaatctttctgcatttttctctcctgacgtgtttgagctggatgggattggagggctataatctttatcggctagtggtggaagtttttggtacatacgtccctggctacttgctgaaactgtccgccatgggatggggttttcccatcttcttagtgacactggtggcattggtggatgtggacaattacggacctattattctagccgtgcacagaactcccgagggtgtgatctacccctcgatgtgctggatccgagatagcttggtgagctatatcaccaatctggggcttttttccctcgtgtttctctttaatatggcgatgctggcaaccatggtcgtgcagattctcaggttgagaccccacacccaaaaatggagccatgttctgacactactgggcctgagtttggtcttgggactcccttgggctctcatatttttcagtttcgcctctggcacatttcagctcgtcgtgctgtacttgtttagcatcatcacctcattccagggttttctcatattcatttggtactggtccatgagactgcaagctagggggggaccatcccccctcaagtcgaacagcgattctgctcgcctcccgatctccagcggatccacctccagtagtaggatctag

SEQ ID NO: 188667 - DNA, 1089 bp, synthetic construct
  misc_feature 1..1089: note = Description of Artificial Sequence: Synthetic coding sequence
  source 1..1089: mol_type = other DNA
atgaacgccagcgccgccagcctgaacgacagccaggtggtggtggtggccgccgagggagccgccgccgctgctactgcagcaggaggtcccgacacaggcgagtggggcccccctgctgccgcagccctcggcgcaggcggaggagcaaatggctcccttgagctcagctcgcagttgagtgctggcccccctgggctgctgttgcctgcagtgaatccctgggacgtgttgctttgcgtgtccggcaccgttatagccggcgaaaacgccctggtcgtggccttaatcgcttctactccagctctgcggactcctatgttcgtgttggtgggcagtctagctacggccgatctgctggcaggctgcgggttgattctacattttgtgtttcagtacctcgtcccctccgagactgttagcctgctcacagtggggttcctcgtggcctcgttcgccgcctccgtaagcagcctgttagcgataaccgtggacagatacctctccctgtataacgccctgacgtactacagtagacggacactgctgggcgtccatttgctgttggccgccacctggacagtgtcactgggtctggggcttctccccgtgctggggtggaactgtttggctgagcgcgctgcctgctccgttgtaaggccactcgcacgaagtcacgtggccctgctaagcgctgctttctttatggtgtttggtatcatgctgcatctgtatgtgcgcatctgccaggtcgtgtggagacacgcccaccagattgcccttcaacaacattgcttagctcccccacatttggctgcgactcgcaaaggcgtgggcaccctggccgtagtcctggggactttcggggcatcctggctgccttttgcaatctactgcgtagtgggatcacacgaagaccctgccgtctatacctacgcaacccttctaccagccacatataattcgatgattaacccaataatctatgcctttagaaatcaggaaattcagcgcgcactatggctgttactgtgcggctgtttccagagcaaagttccttttcgatctcgctcaccgagcgaagtttag

SEQ ID NO: 188668 - DNA, 1134 bp, synthetic construct
  misc_feature 1..1134: note = Description of Artificial Sequence: Synthetic coding sequence
  source 1..1134: mol_type = other DNA
atgaccctgctggcctggtgcacccggggcgccaaccccgccgccatgaatgcttcagctgctagtttgaatgattcacaggttgtcgtcgtggccgcggaaggggccgcagccgccgccactgcagccggcggcccagataccggggaatgggggcctcctgccgccgccgctctgggagccggagggggggccaacggatccctcgaactgagctctcagttgagcgccggcccccccggactacttttgcccgcggtgaacccctgggacgtgttgttgtgcgtaagtggaaccgttatcgccggggagaacgcccttgtggttgcgctaatcgcctcaacaccagctttaagaacgcccatgttcgttttggtgggatctcttgccaccgccgacctgctggcaggctgtgggctcatcctgcatttcgtcttccaatacttggtccctagtgaaactgtgtcccttctgactgtcggctttcttgtggcctcttttgccgcatctgtctcgagcctactcgccatcaccgtggaccggtatttaagcctgtacaacgccctaacatattactcaaggcggacccttcttggagttcatctcctcctcgcagcaacgtggactgtcagtctcggactcggcttattacccgtcctcgggtggaactgcctcgctgaaagagcagcatgtagcgtggttcgtccactggcgcgatctcacgttgcgctgctcagtgcagccttcttcatggtgtttgggatcatgcttcacttgtacgtgcggatatgtcaggtggtttggcgacatgcccatcagattgccctccagcagcactgtctggcgccccctcacctggccgcaacccgcaaaggggtggggacactcgccgtggtgctcggtaccttcggagcctcatggttaccatttgctatctactgcgtagtcgggagccatgaggatccagccgtgtatacttatgcaacattgctgccggctacctacaattcaatgattaatccaattatatatgcttttaggaatcaggaaattcagcgggccctatggctgttactgtgcgggtgttttcagtcaaaggtgcccttcagaagccgtagcccctcggaagtatag

SEQ ID NO: 188669 - DNA, 1023 bp, synthetic construct
  misc_feature 1..1023: note = Description of Artificial Sequence: Synthetic coding sequence
  source 1..1023: mol_type = other DNA
atgaacgccagcgccgccagcctgaacgacagccaggtggtggtggttgctgccgaaggcgctgctgcagcggcgactgcggccggggggcccgatacaggcgaatggggcccacccgcagccgcggccctaggcgctggtggtggtgcgaacggatcactcgagttaagctcacagctatccgccggaccccccggcctgctgttgccagctgtcaatccatgggacgtcctgctgtgcgtgtctggcaccgttatcgctggagagaacgctctggtggtggctctcattgcctcaactcccgccctgagaacacccatgttcgtcctggtgggaagtctggcaactgccgatctgttagcgggctgtggcctaattctccattttgtgtttcagtacctcgtgccttcagagaccgtgagcttactgacagtggggtttctggttgcctcattcgcagcctcagtcagttcactcctcgccatcacagttgataggtacttgtcgctgtataatgccctgacctattacagtagacgtactctgctcggggttcatttactcctggccgccacttggacggtgtcactcggcctcggcctcttacccgttctgggatggaattgcctcgcagaacgggccgcatgttcagtggttcggcccctcgcacgctctcacgttgcactgctcagtgccgcctttttcatggtgtttgggatcatgttgcatctgtatgtccgaatatgccaggtggtctggcgacacgcacaccagattgccctgcagcagcactgcctcgcacctccgcatttggcagcgactcgcaagggagtcggcacccttgccgtggtattgggaacatttggcgcgtcgtggttgccctttgccacgtacaactctatgataaaccccatcatttatgccttccgcaatcaggagattcagcgcgcgctctggttgctgttatgcgggtgcttccaaagcaaggttcccttccgatccaggtctcctagtgaggtgtag

SEQ ID NO: 188670 - DNA, 1740 bp, synthetic construct
  misc_feature 1..1740: note = Description of Artificial Sequence: Synthetic coding sequence
  source 1..1740: mol_type = other DNA
aacccccggctgaccgtgctggagcgggtggagggctacggcgagcaagaatggcagaagggcgatggcaaggggaggggagaaggccactctgaaagtggagtcttgtcggggtccggctcatgcactagtcatgtgagctgcttccttgccgtgacaaaagcagacccagctgcgacctctggccagaagggggacgagctgctcatactgcaacttccaggtctcgcactgtgcacccagaccaatttacctaaacgtcttcagtgggaggtgcctcccaccaagcctggcagccttggacttggctccccgagtcaggggcgctggactcgaatgggggacggaccccaggaggtaccttgggttccatcttttgggcctatggagagcagtcccatcccccagtctagcgggaatagctccactcttggaagggtaccccaaactcccggccccagcacagcttcaggggttcctgaggttggtctcagagatgtagccagcgaaagtgtggcactctttttcatgctcctgctggacctaacagcagtggcggggaatgccgcagttatggccgtgatcgcaaagaccccagccctccggaagtttgtgtttgtgtttcacctctgtcttgtcgacctgctggcggctctgactctgatgccgttggctatgctctcaagttctgccctgttcgatcacgctctgtttggggaggttgcctgtaggctgtacctgttcctatcggtgtgcttcgtttcattggcgatcttgtctgtttcagctatcaatgtcgagagatactactatgtagtccatcccatgcgatatgaagttcgcatgacactgggtcttgtcgcctcggttctagtgggtgtgtgggtcaaggccctcgccatggcgagcgtccccgtcttgggcagagtgtcctgggaagagggggctccctccgtgccacccggatgctcactccagtggagccactccgcatactgtcagctattcgttgttgtgtttgctgtgctctattttctcctgcccctgctgctgatcttagtggtatattgttctatgtttcgagtcgcgagagtagcagctatgcaacacggacccctacccacgtggatggagacacctcgacagaggagtgagagcctctcaagtaggtcaaccatggtcacatccagtggcgcccctcagactactccacatcgtacattcggcgggggcaaggccgccgtcgttctcctcgccgtgggagggcagttcctgctgtgctggctgccttatttttccttccatctgtacgtggccttgtctgcccagcccatcagcacgggccaggtggaaagtgtggtaacttggatcgggtacttttgtttcacctccaacccctttttttatggctgtctcaatcgccagattagaggggaactgtctaagcagttcgtgtgctttttcaagcctgcccctgaagaggaactccgcctgccatccagggaggggagcattgaagaaaacttccttcagttcctgcaaggaactggttgtccatccgagtcctgggtctcccggccccttccttcacctaaacaggaacctccggccgtcgacttccgaattcctggccaaatcgcggaggaaacctccgagttcctcgaacaacagttaaccagtgatatcatcatgtccgactcctatctgagacctgccgctagccctagacttgaaagttag

SEQ ID NO: 188671 - DNA, 1356 bp, synthetic construct
  misc_feature 1..1356: note = Description of Artificial Sequence: Synthetic coding sequence
  source 1..1356: mol_type = other DNA
atggagagcagccccatcccccagagcagcggcaacagcagcacccttgggagggtcccgcagactcctggtcctagtacagcgtctggagtgcccgaggtggggctccgggacgtagcttctgaatcagtagccctattttttatgctgttgttagatctgactgccgtggctgggaacgcagccgtaatggccgtgatcgcgaaaacgccggctctgaggaaattcgtattcgtatttcatctgtgtcttgtggacctcctggccgctctcaccctaatgccacttgctatgctcagcagcagtgcactcttcgaccatgcacttttcggggaggtggcttgtaggctttatctatttttatccgtgtgcttcgtgtccctggctattctgagcgtgagcgccatcaatgtcgagcgctactactatgttgttcacccgatgagatatgaagttaggatgactttaggactagtggcttcagtcctggtgggtgtgtgggtcaaggccttagccatggcttccgtgccagtgttgggaagggtttcctgggaggaaggcgccccgtctgtacctccgggatgcagcctgcagtggtcccactccgcttactgtcagttgttcgttgtggttttcgccgtgttgtacttcctgctacctctcttgcttatccttgttgtctactgttccatgttccgggtggcccgcgtggcagctatgcaacacggtccacttccaacttggatggaaacaccaagacagcgcagcgagagtctgagtagcaggtcaactatggtcacgagctctggcgctccacagaccacaccacacagaactttcggaggcggcaaagcagcagtggtgctgctggctgtcggggggcagttccttctttgttggcttccctatttttcattccacctgtacgtcgccctctccgctcaacccatttctaccgggcaggtggaaagcgttgtcacatggattggctacttttgcttcacttccaacccattcttttatggctgcctaaaccggcagatccgcggcgaactaagcaagcagtttgtttgtttctttaagcccgccccagaggaagagctgcgcctgccctcccgcgaaggttctatcgaggagaacttcctgcagttcctccagggaacaggctgcccctcggaaagctgggtgtcccggcccctcccaagccccaaacaggagccacctgccgtagattttcgcatcccgggccaaatcgcagaggaaacgagcgagttcttggaacagcagttgactagtgacatcatcatgagtgactcctacctcaggcctgcagcctcacccaggctcgagtcctag

SEQ ID NO: 188672 - DNA, 1356 bp, synthetic construct
  misc_feature 1..1356: note = Description of Artificial Sequence: Synthetic coding sequence
  source 1..1356: mol_type = other DNA
atggagagcagccccatcccccagagcagcggcaacagcagcaccttaggcagagtcccccagacacctggaccctccactgcctccggagttccagaggtgggcctgagagatgtggcaagtgaatcggtagcactgttctttatgctcctgctggacctgactgccgtggctgggaacgccgccgtgatggcagtgattgcaaagacacccgcactgcgaaaatttgtcttcgtcttccatctctgtctagtcgacctcctagcggccctgactctcatgccgcttgctatgctttcctcctccgccctcttcgatcacgcactgttcggggaggtcgcctgtcggctctacctattcttatccgtctgcttcgtaagcctggctatcttaagcgtgtcagccatcaatgtcgagcggtactactacgtggttcatccaatgcgctatgaagtcaggatgactttgggcctggttgccagtgtgctggttggcgtctgggtcaaggcgctggcgatggccagtgttcctgttctaggacgcgttagttgggaggagggcgcgccctccgtgccacccgggtgttcactccaatggtcccactccgcatattgtcaattattcgttgtggtctttgctgtactgtattttttactacctttgctgctcatccttgtagtgtactgctccatgtttagagtcgccagggtcgctgctatgcagcacggcccgcttcccacatggatggagactcctcgacaacgatcagaatccctgtccagccgctcaaccatggtcaccagctccggcgccccgcagacaacaccacaccggacattcggcggagggaaagccgccgttgtgcttctggctgttggcggacagtttctgctctgttggctcccctatttctccttccatctttacgtcgccctaagcgctcaacccattagcacaggccaggtggaatcggtggtaacctggatcggatatttctgtttcacgtccaacccctttttctatggctgcctgaacaggcagatacggggggagctctcaaaacaattcgtctgtttcttcaaacctgcacctgaagaagagttgagattaccctcccgggagggctccatcgaagagaattttctacagtttctacagggcaccggctgccctagtgaaagttgggtgagccgcccgttgccatcacctaagcaggaaccgcctgccgtggactttagaattcctggccagattgctgaagagactagcgagttcttggaacagcaactaacatctgacatcatcatgtccgacagctatttgcggccagccgcttctccccgtttggagagctag

SEQ ID NO: 188673 - DNA, 1356 bp, synthetic construct
  misc_feature 1..1356: note = Description of Artificial Sequence: Synthetic coding sequence
  source 1..1356: mol_type = other DNA
atggagagcagccccatcccccagagcagcggcaacagcagcaccttgggcagagtcccacagaccccaggtccgtcaaccgcttccggagtgccagaagttggcctgcgggacgtggcaagtgagtctgtggccctatttttcatgttactcctcgacctcaccgccgtggccggaaacgctgccgtaatggctgtcatcgcgaaaacgcccgctctgagaaagtttgtgttcgtgttccacctgtgtctggtcgatcttctggcggctctgacactgatgccactggctatgctttcatcaagcgctcttttcgatcacgccctgttcggcgaggtcgcatgtcgactgtacttgttcctgagcgtctgttttgtatcactggctatcctgtctgttagcgctataaatgtcgaacggtactactatgttgttcatcctatgcggtatgaagtgaggatgaccttaggcctcgtggcgtctgttctggtaggtgtgtgggtgaaagccctggccatggccagtgttcctgtgctgggccgagtttcatgggaggaaggcgcccctagcgtgccgcctgggtgcagtctgcagtggagtcacagtgcatattgtcagctgttcgtggtagtttttgctgtgttatatttcctattacctctcctgctgatcctggtagtctattgctctatgttccgagtcgcgagagtcgccgctatgcagcacggccccctccccacctggatggagaccccgcgacagcgctcagaatctttaagctctagaagtaccatggtcacttcgtctggcgcccctcagaccactccacaccgaaccttcgggggggggaaggccgccgtggtgctgctggcagtgggggggcagttcctgttgtgctggcttccctatttttccttccatctgtacgttgccttgagtgcgcagccaatatccaccggccaggtcgagagtgttgttacgtggatcggctatttttgttttactagtaaccccttcttctacggctgcttgaaccgccagatcaggggtgaactgagcaaacagtttgtgtgcttcttcaaacctgccccagaggaggaactccgcctgcctagtcgagaagggtctattgaggagaacttcctccaattcctccaggggacgggatgcccatcagaatcatgggtgagtagaccactcccgagtcctaagcaggaaccccccgccgttgattttcggatcccaggacagattgcggaagaaacaagcgagttcctggagcaacagttgacctccgacatcatcatgtctgactcttatctacgccccgctgccagtccccgtctagagagctag

SEQ ID NO: 188674 - DNA, 1107 bp, synthetic construct
  misc_feature 1..1107: note = Description of Artificial Sequence: Synthetic coding sequence
  source 1..1107: mol_type = other DNA
atggccaacagcaccggcctgaacgccagcgaggtggccggcagcctggggcttatattagccgctgttgtggaggtaggagctttgctaggcaatggggcgttgctggtagttgtcctgcgcaccccaggccttcgcgacgccctgtatctggctcatctgtgcgtggtggatctgctcgctgctgcgtccattatgccgttgggcttgctagctgcaccaccaccaggcctggggcgagtaagactgggtcccgccccatgtcgggctgcaaggttcctttctgccgcattactcccagcctgtaccctcggcgtggctgccctcggactggcaaggtataggttaatcgtgcacccattgcgaccgggcagtagacctcctcctgtactggtgttaaccgcagtgtgggcggctgcgggactgttaggtgctctgagcctgctaggcaccccacccgctccacctcctgctcccgcccgatgctctgtcttggctggggggctcgggccatttcgacctctgtgggcgttactggcctttgccttgcccgcactgctcctgctcggcgcctacggtgggatattcgtggtggcccggcgcgccgctctccgcccgccccggcccgcacgcggttccagactacatagcgatagcctggattcccggctgtccattctgccgcccctgaggcccaggctccctggtggcaaggccgccctcgccccagccctggccgttggtcagtttgctgcttgttggctgccttatgggtgtgcttgcctggctcccgcggcccgcgctgctgaggctgaagcagccgtaacatgggtggcctacagcgctttcgctgctcatccgttcttgtacgggctcctgcagcgtccagtgagattggcactgggccgactgtctcgacgtgctctccccggaccagtgcgggcatgcacaccccaggcatggcatcctagggccctgctacagtgtcttcaacgcccgcccgagggtcctgcggtggggccttctgaagccccggaacagaccccggagttagcaggcggccgtagcccagcctaccagggacctcctgaatcttcccttagttag

SEQ ID NO: 188675 - DNA, 1434 bp, synthetic construct
  misc_feature 1..1434: note = Description of Artificial Sequence: Synthetic coding sequence
  source 1..1434: mol_type = other DNA
atggccaacatgcagggcctggtggagcggctggagcgggccgtgtcccggcttgagtccctgagcgccgagagtcatcgtccacctggcaattgtggagaagtgaatggagtgatcgctggtgtcgcgcccagtgtggaagctttcgataagttgatggacagcatggtggcagaatttctgaagaacagtcgaatcctcgcaggcgacgttgaaacccacgcagagatggtgcatagcgcatttcaggcccagcgggcattcctgttgatggcgagccagtatcagcagccccacgagaatgacgtggcagcccttctgaagcccatcagcgagaaaatccaggaaattcagaccttcagggagaggaaccgcggttccaacatgttcaatcatctgtccgccgtctctgagtccatccctgctctgggttggatcgcggtcagccctaaaccgggtccctatgttaaggaaatgaacgatgctgctaccttttacacgaaccgtgttcttaaagattataagcacagtgatttgaggcacgttgattgggttaaatcctaccttaatatttggtccgagttacaagcatacatcaaggagcatcatacaacaggcctgacctggagcaaaactggtcctgtggcttctactgtctccgccttctccgtattgagcagcgggcctggtctcccaccccccccccctcccttgccacctccagggccgccccctctgttcgaaaatgagggtaaaaaagaggagtccagcccatccagatctgcattgtttgcccagttgaaccagggggaagcaatcaccaaaggactaaggcacgtgacagacgaccagaagacatacaagaatccttctctgcgagcgcagggaggacagacccagtcgccaactaagagtcatacgccgtccccaacgagcccaaagtcctatccaagccagaagcatgcccccgtcctggagctggaaggtaagaaatggagagtggagtaccaagaggacagaaatgacttggtgattagcgagaccgaacttaaacaggtggcctacattttcaagtgcgagaaaagtaccatccagattaaaggcaaagtgaatagcattatcatagataattgcaaaaaactgggcctggtgtttgataatgtggtgggaatcgtcgaagttatcaacagtcaagacatccagattcaggttatggggagagtgccgacaatttccataaacaaaactgaagggtgccacatctacctgagcgaagacgcactggactgtgagatagtttccgcaaagtcctccgagatgaacatcctgatcccccaggatggagattacagggaatttcctattcccgagcagttcaaaacggcctgggatggctccaagctgatcaccgaacctgccgagatcatggcctag

SEQ ID NO: 188676 - DNA, 1260 bp, synthetic construct
  misc_feature 1..1260: note = Description of Artificial Sequence: Synthetic coding sequence
  source 1..1260: mol_type = other DNA
atggtgttcagcgccgtgctgaccgccttccacaccggcaccagcaacaccacattcgtggtttacgagaatacatacatgaacattacactccctcccccgttccaacatccagacctatctccactactaagatactcgttcgagaccatggctccaaccggtctgtccagcctaactgtgaattccactgctgtgcctacaactccagccgcatttaagtcattgaacctcccccttcagatcacactgtcagccataatgatattcattctttttgtttcctttctgggcaacctcgtggtgtgcctgatggtttaccagaaggccgcaatgcggtctgccataaacattctgctggcctcattggcgtttgccgacatgcttttggcggtcttaaacatgcctttcgccctagtgaccatactgaccacgcgctggatttttggaaagtttttctgtagggtaagcgctatgttcttctggctctttgtgatcgagggtgtggctattctgctgatcatctccatagacagattcctgatcatcgtgcagagacaggacaagttgaacccctatagagcaaaagtcctgatcgccgttagttgggcgacgtctttttgtgttgcattcccgcttgcggtgggcaacccagatcttcagatacccagtagagctccacagtgtgttttcggttataccaccaacccaggctaccaagcctatgtgatcctgatctcacttattagcttcttcattccgtttctggtgatcctctacagctttatgggaatactgaatactctaagacacaatgcattgaggatacactcatatcctgagggcatctgtctctcacaggccagcaagctgggtcttatgagcctacagcggccgttccagatgtccattgacatggggttcaagacccgtgctttcactacaattctgattctgttcgccgtgtttatcgtctgctgggccccatttaccacatattcactggtcgcgacatttagcaagcacttttattatcagcacaatttctttgaaatctctacatggctgctttggctctgctatctcaagagtgccctgaaccctctgatttactactggcggattaagaagtttcacgacgcctgtttggacatgatgccaaagtcttttaagttcctgcctcagctccccgggcacaccaaaagacgcatcagaccttcagcagtgtacgtttgcggagaacatagaactgtcgtttag

SEQ ID NO: 188677 - DNA, 1260 bp, synthetic construct
  misc_feature 1..1260: note = Description of Artificial Sequence: Synthetic coding sequence
  source 1..1260: mol_type = other DNA
atggtgttcagcgccgtgctgaccgccttccacaccggcaccagcaacactacattcgtggtctatgaaaacacatacatgaatattacactgcctccaccttttcagcaccccgatctttcccccctgctccggtatagttttgaaacgatggcccctacaggcctgtcgagcctcaccgttaactctacagctgttccaaccacccctgcggcctttaagagcctcaatctgccactgcaaataactctcagtgctatcatgatcttcattctgttcgtatcattcctcggcaatttagtggtgtgtctgatggtgtaccagaaggccgccatgagaagtgcaatcaacatactgctcgcctccctcgcatttgctgacatgcttttggctgtgctgaacatgccctttgccctggtcaccatccttaccacccgctggatctttggaaagttcttttgccgggtgtctgccatgttcttctggctgttcgtcattgaaggtgtggccatcctacttataatttcaattgatcggttcttgataatcgtacaaagacaggacaagctgaatccctacagagctaaagttttgatcgcggtgagttgggccacgagcttttgcgtggctttcccgctggcagtgggcaacccggacctccagattcccagccgggcccctcagtgcgtctttggctataccactaaccctggctatcaagcttacgttattctgatatctcttatctcattcttcatccctttcctggtaatcctgtattcatttatgggcatattgaataccctccggcacaacgccttacggatccactcatatccagaaggtatttgcctgtctcaggcctccaaactgggacttatgtcactacaacgcccattccagatgtccatagacatgggatttaagacaagggcctttacaacgatcctcatcctatttgctgtctttatcgtctgctgggcaccttttaccacttactctctggtcgctaccttttccaagcatttctactaccaacataatttcttcgaaatctctacttggctcctgtggctgtgttatctgaagtcggcgcttaatccactgatttactactggcggattaagaaattccatgacgcctgcttggacatgatgcctaagagtttcaaatttctgccccaacttcctgggcacactaaacgccggattaggccctctgctgtgtatgtgtgtggcgagcaccgaaccgttgtctag

SEQ ID NO: 188678 - DNA, 1332 bp, synthetic construct
  misc_feature 1..1332: note = Description of Artificial Sequence: Synthetic coding sequence
  source 1..1332: mol_type = other DNA
tactgctgcagcgtgctgaagtgcctgaagaacagctgcatcagcgcctgtatttttcacccgaccgagaccatggtattcagcgccgttctcacagccttccacactggaacatctaacaccacctttgttgtgtatgaaaacacttatatgaatattacacttcccccccctttccagcacccagatttgtcgccattgctgcggtacagcttcgagaccatggccccgactggcctatcaagcctaacagtgaacagcactgccgtgcccaccactccagccgcctttaagtctttaaacttgcctttacaaatcacactttccgcaatcatgatattcattctttttgttagcttcctggggaacctcgtggtgtgcttaatggtgtaccagaaagctgccatgaggtcagctattaatatcctgttggccagcctggcgtttgctgacatgctgctggcagtgctgaatatgccctttgccctggtcacaatcctgaccactagatggatcttcggcaagttcttttgtcgcgtatcggctatgttcttctggctctttgtgatcgaaggtgtcgccattttgctcatcatcagcatagaccgtttccttatcatagtgcagcggcaggataaattaaacccctaccgggcaaaagtgctcattgctgtctcgtgggccacatctttctgcgtcgcctttcccctggctgtgggcaaccccgatctccagatcccaagccgcgccccccagtgcgtcttcggctatactacaaaccctgggtaccaggcgtatgttatactaatctctctgatcagctttttcatccctttcctagtcatcctttacagtttcatgggcatcctcaataccctgcgccacaacgcgctgagaatacactcatacccagagggcatctgcctgagtcaggcgtccaaactgggcctcatgtcactgcaacgccctttccaaatgtctatcgacatgggattcaagacccgtgctttcacgactatattaattctatttgccgtgtttattgtatgttgggcccccttcacaacatactccctggtggcgaccttcagtaagcatttctactatcagcataacttttttgaaatcagtacctggctactgtggctctgttatttaaagtctgcattaaacccgcttatatactactggaggattaagaaattccatgatgcctgcctggatatgatgcccaagtcctttaaattcttacctcagctgcccggccataccaagcgccggatccggccttccgcagtctacgtgtgtggggagcatagaaccgtggtgtag

SEQ ID NO: 188679 - DNA, 2697 bp, synthetic construct
  misc_feature 1..2697: note = Description of Artificial Sequence: Synthetic coding sequence
  source 1..2697: mol_type = other DNA
atggtgttcagcgtgcggcagtgcggccacgtgggccggaccgaggaggtgctattgacatttaagatatttctcgtcatcatctgtctccacgtcgtgttggtcacaagcctggaagaggataccgataactcgagcttgtccccccctccagaagtcgagaccacaagtctcaacgatgtgacactgagtctgctgccttcaaatgaaaccggagttaaacctcagcgcaacatttgcaatctgtccagcatctgcaatgattcagcttttttccgcggggaaatcatgttccagtacgataaggagtctactgtcccgcaaaaccagcatattaccaatggtacactaaccggcgtgcttagcttaagcgaattaaaaagatcagaattgaataagaccctccagacgctcagcgagacctacttcatcatgtgcgccactgccgaggcgcagtctacactcaactgcacctttacaattaagctaaacaataccatgaacgcctgcgccgtgattgctgctctcgagcgcgtgaaaataaggccaatggaacactgttgctgttctgtacggatcccgtgccccagcagccctgaagagcttgagaagctgcaatgcgatctgcaggatccaatcgtatgcttggccgatcatccacgcgggcccccattcagtagcagtcagagcataccagtcgttccaagggcaacagtgctgtcccaggtgccaaaggcaacttctttcgccgagccgcctgattacagccccgtgacacataacgttcccagtcctatcggcgaaatccagcctctttcaccccagccatctgccccaatcgcctccagtcccgccatcgacatgccaccacagtccgaaacaatatctagccctatgccacagacgcacgtgtctggaacccctcctcctgtgaaggcctccttcagttccccaacagtatccgctcctgctaacgttaatacaacatctgcccctcccgtccagactgatatcgtgaatactagctcgatttccgacctggagaaccaggttcttcagatggaaaaagcgctttctctgggaagcctggagccaaatctcgcgggagagatgataaaccaggtgagccggctgctgcactctcccccagatatgcttgcccctctcgcacagaggctgcttaaagtggtggacgatattggtctgcagctgaacttctccaatactactatctcactcacctccccatccctggccttagctgtgatccgcgtcaatgcgagctcattcaataccacgacctttgtggcgcaagaccctgcgaatctgcaggacgaattgacagttagatgcgtgttttgggacttgggacgcaatggcggacggggaggctggtctgataacgggtgctctgtcaaggaccggaggctgaacgaaaccatctgtacctgttctcatctcacaagctttggtgtgctgttggacctgtcacgaacgtctgtcctccccgctcagatgatggccctcactttcatcacatacatcggatgcggactgagtagcattttcctatctgttacccttgtcacttacattgcctttgagaagattcggagagactatccaagcaagattttgatccagttatgcgcagctttactcctgctaaacctcgtgtttctgctagatagctggattgccctgtataagatgcagggactctgtatttcggtggcagtgtttcttcattatttcctactggtgtctttcacatggatgggcttagaggccttccatatgtacctcgccttggtgaaagtgttcaacacctacatcaggaagtacatactcaagttttgtattgttggatggggggtgccagccgttgtcgttacgattatactgacaatttccccagataactacggcctaggaagctatggcaagttccccaacggatctcctgacgatttttgctggatcaataataacgctgtattttatattacggtggtaggttatttttgcgtcatttttctcctaaacgtgtctatgttcatagtcgtgctggtccagctgtgtcggatcaaaaagaagaagcagctcggggcgcagaggaaaaccagtatccaggatctcagatctatagccggtttgacattcctactggggattacctggggtttcgctttttttgcttggggccccgttaacgtaacatttatgtacctgtttgcgatattcaacacccttcagggcttttttatatttatcttttactgcgtggccaaagaaaacgtgaggaagcaatggcggcgatacctgtgttgcgggaagcttagactggctgagaattctgattggtctaagacagccacgaacggactcaaaaaacagactgtaaaccaaggcgtgtccagcagttcaaattctcttcagagtagttccaattccaccaatagtactacactgctggtgaataacgattgcagtgtgcacgctagcggaaacggaaatgctagcactgagaggaatggcgttagcttctccgtgcagaacggtgacgtgtgtctgcatgattttactggaaagcagcacatgttcaatgaaaaggaggactcttgtaatgggaaaggcaggatggccctgcgacgcacctccaagcgaggctcactgcacttcatagaacagatgtag

SEQ ID NO: 188680 - DNA, 3006 bp, synthetic construct
  misc_feature 1..3006: note = Description of Artificial Sequence: Synthetic coding sequence
  source 1..3006: mol_type = other DNA
atggtgttcagcgtgcggcagtgcggccacgtgggccggaccgaggaggtcttgctcacattcaaaatattcttagtgatcatttgccttcatgtggtactggtgaccagcctagaggaggacactgacaattcctccctgagtccacctcccgatgaagaaaccggggcttgttctgacgtcactctgtcactgcttcctagcaacgaaacggaaaaaaccaagattaccatcgttaaaacctttaacgccagtggggttaaacctcaacgtaatatatgcaacttatcatcaatttgcaacgacagcgccttctttagaggggagatcatgtttcagtacgataaggagagcacggtgccacagaaccagcatattacaaacgggacactaacaggggtcttgtccctttccgaattaaagcgctctgaattgaacaagaccctgcaaaccctgagcgagacatattttataatgtgtgctacagctgaggcgcaatccacactcaattgtacgttcaccatcaaattgaataacactatgaacgcatgcgctgttatagcagccctggaacgggtgaagatccggcccatggaacactgctgttgctctgttagaattccatgcccctcaagtcctgaggagctggaaaagctccaatgcgatctccaggatcccatcgtgtgcctcgcagatcacccccgtggtcctccgtttagcagcagccagagcatacccgtggttccaagagccacagtcctgtcacaggtgccaaaggctacgagctttgccgaacctcctgattacagcccagtcacacataatgtcccctcccccattggcgagattcagcccctttccccgcagccaagcgcccctatagcgagcagtcctgcaatcgatatgcccccgcagtctgagactatttcatcacctatgcctcagacccatgtttctggaacccccccccctgtcaaagccagcttttcctcccctacagtctcggcccccgcaaatgtgaataccaccagcgctccccccgtgcagaccgatattgtgaacacctcaagcatttccgacttggagaatcaagtactacagatggaaaaggcccttagcttgggtagcctcgaaccgaatttagccggcgaaatgattaaccaagtgagccggctgctacactcaccacctgatatgctggccccgcttgcacagaggctgttgaaagttgtcgatgacataggccttcaactcaacttttcaaatacaaccataagtctgacctcaccctctttagctttggccgtaattagagtgaatgcctcttcctttaacactacaacctttgtagcgcaggatcccgctaaccttcaggtctcattagagacacaggctcccgagaactccattgggactattacactgccaagcagcctcatgaacaatctgcccgcccacgatatggaactggcatccagagttcagtttaattttttcgagacccctgcgcttttccaggatcccagtttagaaaatttatccctgatcagctacgtgattagttcctctgtcgccaatcttaccgtgaggaacctgacaagaaacgtgacagttactctaaagcatatcaacccttcgcaggatgaacttacagtcaggtgtgtgttctgggatctgggtcgaaacggtggacgcggtggctggtcagataacggctgttcggtgaaagatagaaggctcaacgaaactatctgtacttgctcccatttgacatcctttggagttcttctcgatctgtctagaacttctgtacttcccgcccagatgatggctctgacattcatcacctatatcggctgcgggctctcttccatcttcctatctgtgacactggtcacctacatcgcgttcgaaaagattcgtcgcgattacccttccaaaatcctcatccagctgtgtgctgccctgctgctcttaaacctcgttttcttgttggatagctggattgccctgtataagatgcagggcctctgtatatctgtggccgtgttcctccactattttctgctcgtgagctttacatggatgggtttggaagcatttcacatgtacctggctctggtcaaagtcttcaatacatatatccggaaatatattctgaaattctgtatcgtgggttggggggtgcccgctgtggtggtcacaataatcctgaccatcagtcccgacaactatgggttgggttcatatggcaagtttccaaacggatctccagatgatttttgttggatcaataacaacgctgtgttctacatcacagtcgtgggttatttctgtgtgatctttcttttaaacgtgagcatgtttatagtggtgctggtccagctctgtaggatcaagaagaagaaacagctcggcgctcagagaaagacctccatccaggacctgcggagcattgctggcttgacgttcctgctcggaatcacatggggtttcgcattcttcgcctggggcccagtcaacgtgacttttatgtacctgtttgccatattcaacacactacagggattttttatattcattttctactgcgtggctaaagaaaacgtccggaaacagtggagaaggtatctgtgctgcgggaaactccgtttagccgaaaactctgattggtccaaaacagctactaacggactgaagaagcaaacagtcaatcagggtgtgtcctcaagttcaaattcactgcaaagttcatctaactcaacaaattcgacgacgctcctggtaaataatgattgttccgtgcatgcgagtggcaacggaaacgcatccacagagagaaacggagtaagcttctctgtgcaaaacggagacgtctgcctgcacgactttaccgggaagcaacacatgttcaatgaaaaggaagattcttgcaacggcaaagggagaatggccttgaggaggaccagcaagcgcggttccctccactttattgagcagatgtag

SEQ ID NO: 188681 - DNA, 3012 bp, synthetic construct
  misc_feature 1..3012: note = Description of Artificial Sequence: Synthetic coding sequence
  source 1..3012: mol_type = other DNA
atggtgttcagcgtgcggcagtgcggccacgtgggccggaccgaggaggttcttctgacttttaagatttttctggtcatcatctgtctacatgtggtactggtgactagccttgaggaagacacagataatagcagtctcagccctccacctgctaagctctctgtcgtttccttcgccccttccagtaacggaacacccgaagtggaaactacgagcttaaacgatgttactttaagcctcctgcctagcaatgagactggcgtgaagccgcagcggaacatctgcaacctgagctccatctgcaatgacagcgcgttctttcggggggagattatgttccagtatgacaaggagtctacggttcctcagaatcagcatattacaaacggaaccctcaccggggttttgtccttaagcgagctcaagagaagcgaactgaataagaccctgcagacgctgtccgaaacttattttatcatgtgcgcaaccgcggaggcccaatctaccctgaactgtaccttcactatcaaattgaacaacaccatgaacgcctgcgccgtcatcgccgccctcgaacgggtgaagatccggcccatggaacactgttgctgctccgtcaggataccctgtccgagttctcccgaggagctggagaagctacagtgtgacctgcaggatccaatcgtgtgtctcgcagaccacccacggggccctccattcagtagcagtcagtctattcctgtcgtgcccagagcaacagtgctgtcgcaggtaccaaaggccacctcctttgcagagcctccagattacagtcccgtcactcataatgttccaagtccgataggggaaatccagccactttcccctcaaccgagcgccccaatcgcttcctcccccgcaatcgacatgccccctcaaagcgagacaatcagcagtcctatgccgcagacacacgtttccggtactcccccgcccgttaaggcgtccttctcctctcctaccgttagcgcacctgccaatgtaaacaccacctctgcaccccccgttcagactgatatcgttaacacttctagcatatctgatctggaaaatcaagtgcttcagatggagaaggctctgagtctaggatctctggagccaaacctcgcaggagaaatgattaatcaggttagcagactactgcattcacccccggatatgctggcccccctcgctcagcgattacttaaggtggtggacgacattggtctccagctgaacttcagcaataccacaatttctctgaccagcccatccctggcccttgctgtaattcgggtgaatgccagctcatttaatactactacctttgttgctcaggatcccgctaatctgcaggtaagtctggagactcaggcccccgaaaacagtattggcaccatcacattacccagctctcttatgaacaatctcccagctcatgacatggagttggcgtcaagagtgcagtttaactttttcgagaccccagccctgtttcaggatccatccttggagaacctgtctttgatttcatacgtaatatcgagctctgtagctaatttgaccgtgcgcaaccttactaggaacgttacggtaacccttaagcacattaacccttcccaggacgaactcactgtccgctgcgtattctgggatctgggtcggaacgggggcagaggcggctggagcgataacggatgtagcgtgaaagatcgccgcttgaacgaaactatttgcacttgcagccacctgacctcttttggcgtgctcctggacttgtcccggacaagcgtgctacccgcccagatgatggctttaacgtttattacttacatcggatgcggattgtcatctatctttctcagtgtcacgctggtgacttacattgcattcgagaaaattaggagagactatccgtctaagattctgattcagttgtgcgccgctctcctcttgctaaatttagtttttcttctggactcctggatcgctctatacaaaatgcagggcctctgcatttccgtcgccgtgttcctccactactttctcctcgtaagcttcacttggatggggctggaggcctttcacatgtatctggccctagtgaaggtttttaatacctacatacgaaagtacattcttaaattctgcatcgtcggctggggtgtaccagccgtggttgtgacaatcatcttgactatttcaccagataactacggtctgggttcctatggaaagttccctaatggctcgccagatgacttttgttggatcaacaataacgccgtgttctatataactgttgttgggtacttttgtgtcatcttcctgctgaacgtgtcaatgttcatcgtcgttctggtgcagctgtgcaggatcaagaaaaagaagcagctgggagcacagagaaagacttctatccaggacttaaggagcatagcaggcctaacctttctgttgggaatcacatggggtttcgcgtttttcgcatggggacccgttaatgtgaccttcatgtacctgttcgcaatcttcaacacacttcaaggcttcttcatttttattttctattgcgtcgcgaaagagaatgtgcggaagcaatggcggagatacctttgctgtggcaagttgcgcctcgctgagaactcagactggtctaaaacagccactaacgggcttaagaagcagaccgtcaatcaaggagtatcctcctccagcaactcgttacagtcctcctccaacagcaccaacagcacgaccctcctcgtcaataatgattgttctgttcatgcgtccggcaatggaaacgcctccaccgaacgcaatggcgtttcgttcagcgttcagaacggcgatgtgtgcctccatgacttcacaggaaagcagcacatgttcaacgagaaagaagactcctgcaatgggaagggcagaatggctcttagacggacttccaaaaggggaagtctacatttcatcgagcaaatgtag

SEQ ID NO: 188682 - DNA, 2964 bp, synthetic construct
  misc_feature 1..2964: note = Description of Artificial Sequence: Synthetic coding sequence
  source 1..2964: mol_type = other DNA
atggtgttcagcgtgcggcagtgcggccacgtgggccggaccgaggaagtactgctgaccttcaagatcttcctggttatcatttgtctgcatgtcgtactggtcacctctcttgaggaggatacagacaattccagcttaagcccgccgcctgaagtggaaactacgtccctgaatgacgtgacgctcagcctgctgcccagcaacgaaacaggcgtgaagccgcagcgcaacatttgcaacctgtcaagtatttgcaatgactcggccttcttccgcggagagatcatgttccagtatgataaagagtctacagtgccccagaatcagcacattacaaacggtactttgaccggcgtgctctctctcagcgagctgaagcgctcagagctgaataagactctgcaaacgctgtcagaaacatacttcatcatgtgcgctaccgccgaagctcagtccaccttaaattgcacatttactattaagcttaataacaccatgaatgcttgcgccgtcattgcggccttggagagggtcaagatcagaccaatggagcattgctgctgcagtgtgaggatcccctgtccatcctctcctgaggaactggaaaaactgcaatgtgacctgcaggacccaattgtgtgcctagcagaccatccaaggggacccccgttctcttcatctcagagcattcccgtagtgccacgcgccacagttctatcccaggtcccgaaagctacatctttcgccgaacctcccgactatagtccggtgacacataacgtcccatccccgatcggcgaaatccagcctctgtccccgcaaccatccgcccctatcgcttctagccccgcaatcgacatgccccctcagagcgaaacgatttcaagcccaatgccgcaaactcatgtgtctgggacaccacccccggtgaaggcttctttctcttcacctacagtttctgcacctgccaacgtaaacaccacttctgcccccccagtccagactgacattgtgaacacttcttccatcagcgacctggaaaatcaagtactgcagatggaaaaggccctctctctcgggtcattggaacctaacctggcaggcgagatgattaatcaagtcagccgtctactccactctccgcccgacatgctagccccattggctcagagactgttgaaggtagtagacgacatcggcctgcagctgaacttctctaatacaactatatcgcttaccagcccgagtctggcgcttgcggtcatcagagtcaacgcctcatcgttcaataccactacatttgtcgctcaggaccctgcaaacctacaggtgagcctggagacccaggcaccagagaactctatcggcacaattactctgccctcatccttgatgaacaacctgcccgcccatgacatggagctggcctcccgcgttcagttcaactttttcgagaccccagcactgtttcaggacccaagcctggaaaatctgagtttgatatcttacgtgatctcgtcttcggtggctaacctgacagtgagaaatctgactagaaatgtcaccgtgactcttaagcacattaatccaagccaggatgagctgactgtgcggtgtgtgttctgggatctgggtcggaatggtgggcgaggcggatggagtgacaacgggtgtagcgtcaaagaccgcaggctgaatgagactatatgcacctgtagccacctgacttcatttggggtgctgctggacctgagccggaccagtgtcctaccagcccagatgatggctttgaccttcattacctacattggctgcggtctgagctccatattcctgagcgtgacattggtgacatacattgcttttgagaaaatcagacgagattacccctctaaaattctgatccagctgtgcgccgctcttctcttacttaatctcgtattcctgctggatagctggatcgccctgtataagatgcagggcctctgtatttctgtggcggtattcttgcactatttcttactggtgtctttcacttggatgggattagaggcctttcacatgtatctcgctttggtcaaggtttttaacacatatatacggaagtacatcttgaaattttgcattgtaggatggggagtaccagcggtcgtcgtcacaatcattctcacgatttctcccgacaattatggcctggggtcttatgggaaattccctaatggctcgccggatgacttctgttggatcaataacaacgcggtgttttacataacggtggtcggctacttttgtgtgatcttcctccttaatgtgagcatgtttatcgtcgtgctggtccagctatgccgcataaagaagaagaaacagctcggtgcccagcgcaaaacctcgattcaggatctgaggtccattgccggtctcacctttcttctgggcatcacatgggggttcgcctttttcgcttggggccctgtgaacgttacattcatgtacctgtttgccatctttaatacacttcagggcttcttcattttcattttttattgcgtggcaaaagaaaatgtgcggaagcagtggagacgatacttgtgctgtgggaaactcagattggccgagaacagcgattggtccaagactgccaccaacggcctcaagaagcagactgtaaatcaaggggtgtcaagcagcagtaatagtctgcagtcatcgtctaacagcaccaactctacaaccctcttggtgaacaacgattgctcagtgcacgcctcaggcaatggaaacgcctcgactgagagaaacggggtctcattttccgtccagaatggcgatgtatgtctccatgattttactggaaaacagcacatgtttaatgagaaggaggatagttgtaacggaaaggggcggatggccctcagaaggacctctaaacggggatcacttcatttcattgagcagatgtag

SEQ ID NO: 188683 - DNA, 3045 bp, synthetic construct
  misc_feature 1..3045: note = Description of Artificial Sequence: Synthetic coding sequence
  source 1..3045: mol_type = other DNA
atggtgttcagcgtgcggcagtgcggccacgtgggccggaccgaggaggtcctgttaaccttcaagatctttctggtaatcatatgcctgcatgtggtattggttaccagtctggaggaagataccgacaactcctccctcagccctcctccagccaaactaagcgtggtgtccttcgccccctcctccaatgaggtggaaactactagtttgaatgacgtgaccctctcattattaccatccaatgaaacagaaaagaccaaaatcaccatcgtgaagacattcaacgcctccggtgtgaagcctcagagaaacatctgcaatctgtcctctatttgtaatgactctgcctttttcaggggagagattatgttccaatatgacaaggaaagcactgtaccccagaaccagcacatcactaacggtacactgaccggtgtgctgtcactgagcgaactcaagcggtcagaactgaacaagactctgcaaactctttctgagacttactttattatgtgtgccacagctgaggcccagtccacgctgaattgcacatttacaatcaaactcaacaatactatgaatgcatgcgcagtgatagcagccctcgagagagttaagatacgtccaatggaacactgctgttgttccgtccgcattccttgtccttcatcccctgaagaacttgaaaagctgcagtgtgatcttcaggatcctatcgtgtgtctggccgaccatccccggggccctcccttctcctcttcccagagcatcccagtcgtgccacgagcaacagtcctctcacaggtgcctaaggccaccagctttgccgagccccccgactatagcccagtgacccacaatgtgccatccccgattggggagatacagccactgtcacctcagccaagcgctccaattgcttcctccccagcaatcgatatgcctccacagagtgagactatctcatcacccatgccccagacacacgtatccggtacccccccgcccgtcaaagcttcctttagcagccctaccgtgtcagcacccgctaatgtgaataccaccagcgccccgcccgtccaaacagacatcgtgaatacctcatcgatttctgacttggaaaaccaggtgctgcagatggagaaggccctgtcacttggcagccttgagccaaacctggcaggggagatgatcaatcaagtgtctcggttgctgcactccccccctgacatgttagcgcctctggcacagcgcctgctgaaagtcgtggacgacataggcctgcagctcaatttctccaataccaccatcagtttgacatctccctccctcgctcttgccgtcattagggtgaacgcctctagctttaacacgacaactttcgtggctcaggacccggctaacctgcaagtgtcactggagactcaagcacctgaaaattccattggcacaataacgctaccctcatctttgatgaacaatttgcctgctcacgatatggagctggcatcaagggtgcagtttaatttttttgaaacacccgctttgtttcaggacccttccctagagaatttatctttgataagctacgtgatcagctcaagtgtggcgaacttgactgtcaggaacctcacccggaacgttaccgtgacactcaagcatataaatccctcccaggacgaactcacggtgagatgcgtgttttgggatctggggcgcaatggcgggcgcggaggttggagtgacaacgggtgcagtgtgaaagataggagacttaatgagaccatctgcacttgtagtcacctgaccagcttcggcgtcctccttgatctgtcccggacatccgtgttgcctgcccagatgatggctcttacttttattacctacataggctgtggtctctcatccatttttctttccgtcaccttggttacctatatcgcgtttgaaaagatacggcgcgactacccaagtaaaattctgattcagctgtgtgctgccctgctcctcctgaatcttgtcttcctgctggatagttggattgccctgtataagatgcagggtctgtgcatctctgtcgcagtttttctgcattacttcctgcttgtttcgttcacttggatgggactggaggcattccatatgtatctggccctcgtcaaggtgttcaacacttacatccgaaagtacatcctcaaattctgtatcgtgggatggggagtgccagcagtcgtggttacaattatactcacaatcagtcccgacaactacggactcggatcatacggcaagttccctaatgggagtccggatgacttttgctggatcaacaacaatgcagtgttctatatcactgttgtgggctatttttgcgtgatttttctcctgaatgtttccatgttcatcgtggtgctcgtgcagctttgtagaatcaagaaaaaaaaacagttgggtgcccagcgaaaaacctccattcaggacctgagatcgatcgcgggtttgacttttctcctaggcatcacctggggatttgcttttttcgcttggggccccgttaacgtgactttcatgtacttatttgccatctttaatacactgcagggcttcttcatttttatcttttattgcgtagcaaaggaaaatgtgcgcaagcagtggcggcgctatctctgttgtggcaaactccggctggccgagaacagcgactggtctaaaactgccacaaatggactgaagaagcagaccgtgaaccaaggtgttagctcatcctcaaattctcttcagagttcaagcaattctactaacagtactactttgttagtgaacaacgactgcagcgtgcatgcctctgggaacggtaatgcttccactgagaggaatggggtctccttttccgtccagaatggcgatgtgtgtctacacgattttacgggcaagcagcatatgttcaatgagaaggaggattcatgtaatgggaaaggcaggatggccctgcgcaggacatcaaagcggggatccctgcacttcattgagcagatgtag

SEQ ID NO: 188684 - DNA, 2988 bp, synthetic construct
  misc_feature 1..2988: note = Description of Artificial Sequence: Synthetic coding sequence
  source 1..2988: mol_type = other DNA
atggtgttcagcgtgcggcagtgcggccacgtgggccggaccgaggaggttctcttgacttttaagatttttctggtcatcatctgtctgcacgtcgtcttagtgacctcattggaggaggacactgacaactcgtctcttagtcccccaccagccaaactgtctgttgtttcattcgctccgtcgtcgaatggtacgccggacgtgaccttatcccttcttcccagtaacgaaaccggtgtcaaaccccagcgcaacatctgtaatctgtcttcaatctgtaatgactctgcgttcttccgcggtgaaatcatgtttcaatatgataaggagagcacagtgcctcaaaaccagcacattactaacggtactctgaccggggtcctgtctctctctgagctgaaaaggtccgagctaaataagacattgcagactctgtccgaaacatactttatcatgtgcgctacagcggaggctcagtccacactcaattgtaccttcacaattaagttaaacaatacaatgaatgcctgtgctgtgatagccgcactagagagagtcaagatcaggcccatggagcactgctgttgcagcgtgaggattccttgtccatcgagccccgaggaattggagaagctccagtgcgatctgcaggatcctatcgtctgcctggcggaccacccaagaggccctcctttctcgtcctcccagtccatccctgtcgtgcctcgagctaccgttctctcccaggtaccaaaagctacaagtttcgccgaaccgcctgactactctccagtcacacacaatgttccgagtcccattggagagattcagccactgtccccgcagccctcagcccctattgccagcagccccgctattgatatgccgcctcaatccgagaccatttcctcaccaatgccccaaacccatgtgtcagggaccccacctcctgtcaaggcgtccttcagtagccctacagtgtcggctcccgctaacgtgaacactacatctgcccccccagtacagaccgacattgtcaacacgtcgtctatctccgatctggaaaaccaggtattacagatggagaaggcgcttagcttagggtctttagagcccaatcttgcaggagagatgattaatcaggtcagtcggctcctacactccccaccagacatgctcgcacccctggcccagaggttgctgaaagtcgtggatgatattggcctgcagctcaacttctctaacactactataagtctcacgtccccaagtcttgccttggcggtcattcgggtgaacgcctcaagcttcaatacaactacattcgtagcccaggaccccgcaaacctgcaggtctctcttgagacgcaggcaccagagaattctatcggaactatcacgttgccgtctagtctcatgaacaatcttccagctcatgatatggagctggcttccagagtgcagttcaacttttttgagacccctgccctttttcaagacccttctttagagaacctctccctcatttcttacgtgatttcttcctccgttgccaacctgactgtcagaaatctaactcggaacgtcaccgtgacgttgaaacacattaacccttcccaggacgagctgactgtgaggtgtgtgttctgggacctggggcgtaacggggggagaggcgggtggtctgataatgggtgctccgtgaaggatcggcgtttgaatgaaaccatctgcacctgttcccatttgacatcatttggcgtgctcctggatttgtcgagaacatcggttcttcccgcccagatgatggctctcacctttatcacgtacattggctgtgggttgagctccatctttcttagcgtcactttggtgacctatatcgctttcgagaaaattaggcgcgattatccttctaaaatcctgatccagctttgcgccgccctgctgttgctgaatctggttttcttgcttgattcatggatcgcgctgtataaaatgcaaggtctgtgtataagcgttgctgtctttttgcactactttctcctcgtgtctttcacgtggatgggcttagaggcatttcatatgtacctggctcttgtcaaggtgtttaacacctatatccgtaaatacatccttaaattttgcatagtaggatggggcgtacctgccgtggtcgtgaccatcattttgaccatttcacctgacaactacggcttgggcagttatgggaaatttccaaacggttcgcccgacgatttctgctggatcaacaataatgctgtcttttacatcacggtggttggatacttctgcgtaatctttcttctgaacgtgtccatgtttatcgtggtccttgtgcagctttgtcggatcaagaaaaaaaagcagttgggagctcagcgtaagacaagtatccaggaccttaggtcaatcgcagggctgacttttcttctggggattacgtggggattcgcattcttcgcgtggggaccagtcaatgtgacttttatgtacttattcgccattttcaacaccctgcaagggtttttcattttcatattctactgcgtcgctaaagaaaatgtccgaaaacagtggaggagatatctgtgttgcgggaaactgcggctcgccgagaactccgactggtctaagactgcaacgaacgggctgaaaaaacagacagtgaatcaaggagtgtcaagttcctctaattcattgcagagctcttctaactccacaaattcgacgacccttctggtgaataatgattgtagcgtgcacgccagcggcaacggaaacgcctcgacggaaagaaatggcgtgtccttcagcgtacagaacggcgacgtctgtctgcacgacttcacaggcaaacaacacatgtttaacgagaaggaagattcttgcaacggcaagggtaggatggccctccggagaacaagcaagcggggcagtctgcactttattgaacagatgtag

SEQ ID NO: 188685 - DNA, 3054 bp, synthetic construct
  misc_feature 1..3054: note = Description of Artificial Sequence: Synthetic coding sequence
  source 1..3054: mol_type = other DNA
atggtgttcagcgtgcggcagtgcggccacgtgggccggaccgaggaggtgctcctgacattcaagatttttttagtgatcatttgcctgcacgtggtgctggttacatctttggaagaggacacggataactccagcctgtcaccacccccagccaaattatcagtggtctcttttgcccccagctccaacggcacaccggaggtggagacaacttcattgaacgacgtgacactttcattattgccatcaaatgaaacagagaaaaccaagatcacgatagtgaagaccttcaatgcctctggtgtcaaacctcagcggaatatatgcaacctgtccagtatttgtaatgacagcgctttctttagaggtgaaataatgtttcagtacgacaaggagagcactgtaccccagaaccaacatatcacgaatggcaccctgaccggtgtcctctcactttcagagctgaaacgatccgaattgaacaaaacgttgcagaccctaagcgagacgtatttcattatgtgtgccacagctgaggcccaaagcacattgaattgcacattcaccataaagttaaataataccatgaatgcttgcgctgtgatcgccgctcttgagcgagtgaagatcagacccatggaacactgctgctgctctgtgagaataccctgcccctcctcccctgaggagttggagaaactgcagtgcgacctgcaagatccaattgtgtgtctggcagaccaccccagggggcctccattcagtagtagccaaagcatccctgtcgttccccgagcgacagtcctgtcccaggttccaaaggctaccagcttcgcagaaccaccagactactctccagtgactcacaacgtacccagtcctatcggagagattcaacccttgtcaccccagccttctgccccaattgcctcatccccagccatcgatatgccacctcagagtgagactatcagcagtcctatgccccaaacccacgtgtccgggacgccccccccagtgaaggctagcttctccagcccgacagtaagcgcccccgcaaatgtgaatacgacctccgcccctccagtgcagaccgacattgtgaatacctcttcaatcagcgacctggagaatcaagttctgcaaatggaaaaagctctgtccctgggcagcctggagcccaatctggctggggaaatgatcaatcaggtgtctagactgctgcactcgccacctgacatgttagctcctctggcacaaaggctactaaaggtcgtggacgacatcgggctccagctaaacttttcgaacacaacaatcagcctgacctcacctagcctcgctcttgccgtaatccgagtcaatgcctcctcttttaacacaacaacatttgtcgcccaggatcccgctaatctgcaggtttctctggagacgcaggcaccggagaattcgatcggaacaattacattgccaagctccctgatgaacaatctgcctgcccatgatatggaactggcatctcgggtccagttcaacttcttcgagactcccgctctcttccaggatccctctctcgagaatttaagtcttatcagctatgtgatctcatcttcagttgccaacctgacggtccgtaatcttacgaggaacgtgactgttacgctgaagcacattaacccatctcaggatgagctcacagtacggtgtgttttctgggatctcggccgcaatgggggccgtggcggttggagtgacaacggctgcagcgtaaaggatcgtagactgaacgagaccatatgtacatgttcccacctgacatcgttcggggtcctgctggacctctctcggacttccgtactccccgcgcagatgatggctctgaccttcatcacgtacatcggatgtggcttgagtagcatattcctctcagtgacactcgtgacctacattgcctttgagaaaattcgccgcgattacccgagcaagattctgatacagttgtgcgcagcactcttgctgttaaatcttgtttttctactagatagttggatcgcactttacaagatgcagggtctgtgtatatcagtggcagtgtttctgcactacttcctccttgtgagctttacctggatgggcctggaagcattccatatgtacctcgccttggtgaaggtgttcaatacctacattagaaagtatatccttaaattctgcattgttgggtggggcgttcctgcggtcgtcgtgaccattatcctaactatttcccccgacaattatggtctaggcagttatgggaaatttccgaatggatctccggacgacttctgctggatcaacaacaatgcagttttttatattactgttgttggatacttctgcgtgatctttctacttaacgtatccatgttcatagtcgtgcttgtgcagctctgcagaatcaagaaaaagaaacaactcggagcacagcgtaagacgagtatccaggacctgcgctccatcgcgggactgacttttctgttggggatcacatggggctttgccttctttgcctggggacctgtgaatgtgactttcatgtatttatttgccatctttaacactctccaaggattcttcattttcatcttctactgtgtcgccaaagaaaatgtgagaaagcagtggaggcgctacctatgttgtggaaagctgcgcctggcagaaaattcggactggagcaagactgcaacgaatggactcaagaaacagacggttaatcagggggtctcatccagctcaaactcactccagagctcatcaaacagcacaaatagcactaccctcttggttaataacgattgtagcgtgcacgcaagcggtaacggcaacgcttccacagagaggaacggagtgagcttttcggttcagaacggtgacgtctgcctgcatgattttactggaaaacaacacatgtttaatgagaaggaagactcatgcaacggcaagggtcgaatggcacttaggcggacttcaaaacgcggaagcctgcatttcatagagcagatgtag

SEQ ID NO: 188686 - DNA, 2901 bp, synthetic construct
  misc_feature 1..2901: note = Description of Artificial Sequence: Synthetic coding sequence
  source 1..2901: mol_type = other DNA
atggtgttcagcgtgcggcagtgcggccacgtgggccggaccgaggaagtgctgttaacattcaaaatcttcctggtcattatctgtttacacgtggtcctggttacgagccttgaagaggacacggacaattccagcctaagcccacctccagccaaactgtccgttgtgtccttcgcccccagttccaatggtactcccgaagtagagaccacgtctctaaacgatgtgacactgtctcttttgccttctaacgaaaccgagaagacaaagattacaattgttaaaactttcaatgcctcaggggtgaagcctcagagaaacatctgtaacctttcatctatttgcaatgattccgcctttttccgcggcgagatcatgtttcagtatgacaaggaaagcaccgttccacaaaatcagcatattactaacgggaccctgacgggagtcctatcactgtcagagcttaagaggtcggagctgaataaaaccttacaaactttgtctgaaacgtacttcataatgtgcgctaccgccgaggcacaatctacgttaaactgtactttcactattaaactgaacaacacaatgaacgcctgcgcggtgatcgctgcactggaacgcgtcaaaatacgcccaatggagcactgttgctgtagcgtccgcatcccttgtccaagctcccccgaggagttagaaaagctacagtgcgatctccaggatcccatagtctgtctggctgatcacccgcggggcccccccttcagcagttctcagtccattcccgtcgtgcccagagctaccgtacttagccaggtcccaaaggctactagcttcgctgagcctcctgactacagccccgtgactcacaatgttccctcccccattggtgagatccagcccctaagtccccagcctagtgccccgattgcatccagcccagccatagacatgccaccacaaagtgaaacgatttccagccccatgccccaaacccatgtctccggaactccgcctcctgtgaaagcgtccttcagctcacctaccgtctctgctccggcaaatgtgaacacaacctccgctccaccggtgcagacagacattgtgaacacctcctccatctccgatctcgagaaccaggtgctgcaaatggagaaggccctgagcctgggatccttagagcccaacctagccggagagatgatcaaccaggtgtctagattgctccacagtccacctgacatgctggcaccgctggcccagagactgctcaaggttgtcgatgacatagggttgcagctgaacttctcaaacaccaccatctccttaacatctcccagcctggccctggccgtgatacgcgtgaacgcttccagcttcaatactactactttcgtcgcacaagatcctgcaaatttgcaggtctccctggagactcaggcaccagaaaacagcatcggtactataactctcccatcgagtctgatgaacaatctgcctgcacatgacatggaactggcaagtcgcgtacaattcaacttcttcgagacgcccgctttgttccaggacccgtccctggagaatctgagtctgatctcctatgtgatctctagctctgttgctaacctcaccgtccgcaacctgacaaggaatgtgactgtgacactgaagcacattaaccccagccaggatgagctcacagtcagatgcgttttctgggatctggggcggaacggcggccggggaggctggtcagataatggatgcagtgtgaaagatcggaggctgaacgaaactatttgcacctgctcccacctgacgagttttggggtgttactcgatctctcgagaaccagcgtgctccccgcgcagatgatggccctaacctttatcacttatataggctgtggcttgtccagcatctttttgagtgtcaccctcgtgacgtacatagcctttgaaaagattcgccgtgattacccctccaaaatcttaatccagctctgtgccgctttgctgctgcttaacctggtgtttcttctggatagctggattgccctgtataaaatgcagggcctgtgtataagtgtggccgtctttcttcactacttcctgctggtttcttttacctggatgggattggaggcctttcacatgtacctggcactggtgaaggtgtttaacacatacatacgtaagtatatccttaagttttgcattgtcgggtggggtgtccctgccgtggtcgttactatcatcctaactatctctccagacaattacggtctgggaagctacggcaagtttccaaatgggtcacccgacgacttttgttggatcaacaacaatgcggtattttatatcactgtcgtcggctatttctgtgtcattttcctgttgaatgtgtccatgttcatcgtcgttctggttcagctgtgcagaatcaaaaagaaaaagcagctgggggctcaaagaaaaacctccatccaggatctgcgttctatcgcggggcttacatttctgctcggcatcacttggggattcgcattcttcgcctggggtccagttaacgtcacgttcatgtacctattcgccatcttcaacactttgcagggctttttcattttcatcttctactgcgtagccaaggaaaatgtgaggaagcagtggcgccgctacctttgttgcggcaagctccgtctcgccgagaactccggtaacgcatcaactgagcgtaacggcgtttctttcagcgtgcagaatggagatgtgtgcctgcacgatttcaccggcaaacaacacatgttcaatgaaaaggaggatagttgtaacgggaaagggagaatggctctccggcgcaccagtaagaggggatcactgcattttatagagcagatgtag

SEQ ID NO: 188687 - DNA, 2982 bp, synthetic construct
  misc_feature 1..2982: note = Description of Artificial Sequence: Synthetic coding sequence
  source 1..2982: mol_type = other DNA
atggtgttcagcgtgcggcagtgcggccacgtgggccggaccgaggaagtgttgctgacattcaaaatttttctcgtgattatctgcctccacgtggtgctggtgacatctctggaggaggatactgataatagctcactgtctcctccacccgatgtgaccctgtctctcctgccctccaatgagaccgagaaaaccaaaataacaatcgtgaagactttcaacgcctccggcgttaagccgcagcgcaatatttgcaacctgagctcaatatgtaacgacagtgctttttttagaggagagattatgttccaatacgacaaggagtctacagttccacagaaccagcatatcactaacggaaccctgaccggcgtgctttccctctcagagctgaagcgaagcgaactaaacaagacacttcagaccttgagtgaaacctacttcattatgtgcgcgaccgccgaagcccagtccacactaaactgtacattcactatcaaactcaataataccatgaacgcgtgtgccgtgattgcggctctggaacgggtgaagatacgacccatggaacactgttgctgctccgtgcgcataccatgtccttcctcccctgaggaattagaaaagttacagtgtgatctgcaggaccccatcgtgtgtttggcggatcaccctcggggcccccccttctcgagtagccagtcaatacccgttgtgccacgggccaccgtgctcagccaggtccccaaggccacctctttcgcagagccccctgattacagccccgtaacccataacgtccctagcccgattggagaaatacagcccctctcacctcaacctagtgctcctatcgcttcgagcccagccatagacatgcctcctcagagtgagactatctcaagccccatgcctcagacacacgtgtccgggacaccaccgcctgtcaaagcctccttttcgtcgccgaccgtgtctgcgcctgccaatgttaatacaacaagcgcgccgcctgtacagaccgatatagtcaacactagcagtatcagtgacctagaaaaccaggtgctgcagatggagaaggccctctccctcggttctttggaaccaaatctggcaggagaaatgatcaaccaggtctctaggttgttacactctcctccagacatgctggcccccttggcacaacggctactgaaggttgtagatgatatagggctccagctcaacttctccaatactactattagcctgacatctcccagtctggctctggccgtcatccgggtaaacgcctctagcttcaacacgaccaccttcgttgcccaggatcccgccaacctgcaggtttctctcgagacacaggctccagagaattcgatcggaaccattacacttccatcctcattaatgaataacctgccagcccatgacatggaattggcgagcagagttcagttcaacttttttgagacccctgccctgttccaggatccttcactggagaacctgtccctgatatcctacgtgatttcctccagcgtagctaacctcaccgtgagaaatcttactcggaatgtgactgtgaccctgaaacatataaatccgtctcaggatgaactcaccgtgcggtgtgtcttctgggaccttggacgcaatggaggtagaggaggatggtcagacaatggttgtagcgtaaaggaccggcgattgaacgagaccatatgcacttgctcccatttgacttccttcggcgtcttactggacctgtctaggactagcgtgctgcccgctcagatgatggcactgacgttcatcacctatattggatgtggtctatcttcaatctttctgagtgtaacattagtgacatatattgcatttgagaagattcgacgcgattacccatccaagatcctcatccagctgtgtgctgccttgctgctgctcaacctcgttttcctcctagacagctggatcgcactatacaagatgcagggtctgtgtatctctgtggccgtattcctccactacttccttctggtgagctttacatggatgggtctggaagctttccatatgtacttagctctggtcaaggtttttaatacgtacatcagaaagtacattctgaagttctgcatcgttggctggggagtcccagcagttgtggtgacaatcattcttacaatcagccccgacaactacggcctcgggagctacggaaaatttcctaatggcagtccagacgatttctgttggatcaataataatgctgtgttttacattaccgtggtagggtatttttgtgtcatcttcctactgaatgtcagcatgtttatagtcgtgctggtccagctgtgcagaattaaaaaaaagaaacagctgggagctcaacgtaaaaccagtattcaggacctccgatctattgccgggttaactttcctcctcgggataacctggggtttcgctttttttgcctggggccctgtgaatgtaaccttcatgtacctcttcgcaatattcaacacattgcaaggattcttcatcttcattttctactgtgtggccaaagaaaatgtcagaaagcagtggcggcggtatctctgttgtggtaaattgaggctcgccgagaacagcgattggtctaagaccgccacgaatggactcaagaagcagaccgtgaatcaaggggtatcaagctctagcaatagtctccagagttcttctaatagcaccaactcaacaacattgctggtcaataacgactgcagtgtgcatgcaagcgggaatggcaacgcctccaccgagcggaacggcgtctcgttttccgtacagaacggcgatgtgtgcctgcatgacttcactgggaaacagcatatgttcaatgaaaaagaagattcatgcaacggaaaaggacggatggcacttaggaggacatcgaaacgcgggagtctccattttatcgagcagatgtag

SEQ ID NO: 188688 - DNA, 3006 bp, synthetic construct
  misc_feature 1..3006: note = Description of Artificial Sequence: Synthetic coding sequence
  source 1..3006: mol_type = other DNA
atggtgttcagcgtgcggcagtgcggccacgtgggccggaccgaggaggtgctcttaacgtttaaaattttccttgttatcatctgcctgcacgtggtgttggtgacttctttggaagaggacaccgacaatagcagcttgtcccctccccccgaggttgaaactacaagcctgaatgatgttactctgtccttgttaccatccaacgagactgaaaagaccaaaatcacaatcgtcaagacctttaatgccagtggagtgaagcctcaacgcaacatctgcaacctgagctctatctgtaacgattcggcttttttcagaggagaaataatgttccagtacgataaggagtcgacagtgccacagaaccagcatattactaatggaacactgacgggggtgcttagcctgtctgagctaaaacggtctgagctaaataagaccctgcaaaccttatcggagacatacttcattatgtgcgccactgcggaggcgcagtccacattaaactgtacgttcactattaagttgaacaacactatgaacgcctgtgctgtgatagcagcattggagagggtcaaaattaggcccatggagcattgctgctgttccgtgagaatcccctgtcctagtagtcccgaagaacttgaaaagcttcagtgcgaccttcaggaccccatcgtctgcctggcagaccatcctcgggggcctcctttctcctcgtctcaaagcatacctgtggtgccacgggccactgtgctgtctcaggttccgaaagcgacctcattcgcagagcccccagattattcccctgtgacccataatgtgccttcccctatcggggaaattcagccacttagccctcagccttctgcaccgatcgcctcatctcctgctattgatatgccgcctcagtccgaaacaatttcatcacctatgccccagacccatgtttcaggaactcccccgcccgtaaaagcctctttcagtagtcccaccgttagcgcacccgccaacgtgaacactacctcagcccctcctgtgcagacagatattgtaaatacctcttctatcagtgatctagaaaaccaggtccttcagatggagaaggccttgtcgcttggtagtttggaacccaatttagccggagaaatgattaatcaagtcagtaggttgctccacagccccccagacatgctggcccctctagcgcagcgtttacttaaggttgtggacgacatcgggttgcagcttaatttcagtaacaccacaatctccctgacgagcccctctttagcgttagccgtcatccgcgtaaacgcttcctcctttaatactaccacttttgtggcgcaggatcccgccaatctgcaggtgagcctagaaacccaggccccggagaatagcatcggcacaattaccctgccttccagcctcatgaacaacctcccagcgcacgacatggagttggccagcagagtgcagttcaattttttcgaaacgcccgctctctttcaggacccctcattagaaaatctgtctcttatcagttacgtgattagtagttcagttgcaaatctgacagtcaggaacctgacaaggaatgtaactgtgactttgaaacatatcaaccctagtcaggatgaactaacagtgcgctgcgtattctgggacctgggccgtaacggtggccggggggggtggagtgataacggatgtagcgtgaaggatcgcagactgaatgagactatctgtacctgttctcatctgacaagtttcggcgtattacttgacttatcaagaacctccgtgctcccagcacagatgatggcgcttacatttattacatatattggatgcggactttcctcaatcttcctgtcagtaaccctggtcacctatattgcgtttgagaagatacgccgtgactacccttctaagatcctgatccagctgtgcgccgccctgctgctgctcaacttagtgttcctgctcgatagctggatcgccttgtataaaatgcaggggctgtgtattagcgttgcagtatttctgcactactttctgttggtgtccttcacctggatgggactagaggcctttcacatgtaccttgctcttgttaaggtgtttaatacatacatccgtaaatatattctgaagttttgcatcgtgggatggggggttcccgccgtggtcgtcactatcatattgactatctcacctgacaattatgggcttggatcatacggcaaatttcccaatggatctcccgatgatttctgctggattaacaacaatgccgtgttttacatcacggtggttggctacttttgtgtgattttcttgttgaacgttagcatgtttatcgtcgttctggtgcagctgtgtcgcatcaagaagaagaaacagcttggcgcacaaagaaagacaagcattcaggacctgaggtccatcgctggcttgacgttcctgcttggcattacctggggcttcgcattctttgcatgggggcctgtaaatgtgacattcatgtatctgtttgctatctttaatactctgcagggatttttcatcttcatcttttattgtgtcgccaaggagaacgtgcggaagcagtggcggaggtatttgtgttgtggaaagctacgtctagcggagaactcagactggagtaaaactgctacgaatggcttaaagaaacagacagtcaatcaaggggtctcctcttcctctaactccctgcagagctcttctaacagcaccaattctaccaccttgctggttaataacgattgttcagtgcacgcaagcggcaatgggaacgcttccactgagcgcaacggcgtctccttcagcgttcagaatggcgatgtgtgtttacatgatttcaccgggaagcagcatatgtttaacgagaaggaagatagttgcaatggcaaaggtaggatggccttgcgccgcacatccaagcgagggagtcttcacttcattgaacagatgtag

SEQ ID NO: 188689 - DNA, 354 bp, synthetic construct
  misc_feature 1..354: note = Description of Artificial Sequence: Synthetic coding sequence
  source 1..354: mol_type = other DNA
atcctgctgaccatgcagcacatcaacaccggcatcgacatgctgaatcagctagggtgtgtgtttttcgctggggttaaacctcagagaaacatctgtaatctttcatctatttgcaatgactccgctttcttccgtggggaaatcatgttccaatacgacaaggaatcgacggtgccccaaaatcagcacatcaccaacggaacactgactggcgtattaagcttgagtgagctcaagcggtcagagcttaacaagacactgcagacgctgagcgagacatactttatcatgtgtgctacagccgaggcccagcgccacattaagctctacatccataataagactgagtag

SEQ ID NO: 188690 - DNA, 1014 bp, synthetic construct
  misc_feature 1..1014: note = Description of Artificial Sequence: Synthetic coding sequence
  source 1..1014: mol_type = other DNA
atgaacagcacctgcatcgaggagcagcacgacctggaccactacctgttccctatcgtttacatcttcgtcattatcgtgtctataccagccaatataggaagcctgtgcgttagctttctgcaggccaagaaagaatctgagttgggcatctatctattcagtctgtccctcagcgacctgctgtacgctctgaccctccctctttggatcgactatacttggaataaagacaactggacattttctcccgccctgtgcaagggatcagcgtttctgatgtatatgaacttctactctagtacagctttcctcacctgtatcgctgtggatcgctacctcgcggtggtttaccccttgaagttcttttttctgcgcacccggcgctttgccctgatggtctcattgtccatttggatcctggagaccatctttaatgccgtcatgctttgggaagatgagactgtggtggaatactgcgacgccgagaaatctaacttcaccctgtgctatgataagtacccactcgaaaagtggcagataaatttgaacctgttcagaacatgtactggttatgcaattccgttggttacaatcttgatttgcaatcgcaaggtgtatcaagccgtacgccataataaggctactgaaaacaaggagaagaagcggattataaaactgctggtgagtataacggtgacttttgtcctgtgcttcacgccatttcatgtcatgctcctgattagatgcatactggagcacgccgtgaatttcgaagaccactcaaacagtggaaagcgcacgtatacgatgtatagaataacagtcgcccttacatcactgaattgcgtggcggatccaatcctctattgttttgtgaccgaaacaggacgatatgacatgtggaacatcctgaagttctgcaccgggagatgcaatactagtcaacgccagagaaagcggatcctctccgtcagcactaaagacaccatggagttagaagtgctagagtag

SEQ ID NO: 188691 - DNA, 1623 bp, synthetic construct
  misc_feature 1..1623: note = Description of Artificial Sequence: Synthetic coding sequence
  source 1..1623: mol_type = other DNA
atgaacagcaccggccacctgcaggacgcccccaacgccaccagcctgcacgtgccacattcccaggagggaaattcaacatcactgcaggaaggcctccaggatctgatccacaccgcaaccctggtcacatgcactttcttgttggccgtgatcttttgcctgggatcgtacggtaactttatagtcttcctgtccttcttcgatcctgccttcagaaaatttcgtactaacttcgactttatgatcctgaacctcagtttctgtgacttgtttatttgcggtgttaccgcccctatgttcacatttgtgctgtttttctcctccgcttcttccataccagacgccttttgctttactttccacctaactagcagcggatttatcatcatgagtcttaaaaccgtcgcagtgatagccctgcaccgcctgaggatggtcctcggtaagcaacccaacaggacggccagttttccatgcactgtactgttgacactcctcctatgggctactagttttacgcttgccaccctcgcgaccttaaaaacgtcaaagagtcatctatgcttgccaatgagcagtctcattgcaggtaaggggaaagccatcctttctctctatgtcgtcgatttcacattctgcgtcgccgttgtttctgtgagctacattatgatcgcccagaccctgagaaaaaacgctcaagtccgcaagtgtccaccagtgattacagtggatgcaagccggccacaacctttcatgggcgtcccagtgcaaggagggggggatccaatccagtgtgccatgccggctctctaccgaaatcagaattataacaaattgcaacatgtccaaactaggggctacactaaaagccccaatcagcttgtcacccccgccgctagtcgtctgcaactggttagcgccattaatctgagtacagctaaggacagcaaagccgtggtgacctgcgtgattatcgtgttatctgtgttggtgtgctgtttacctctcggcatatcccttgtgcaggtggttctttcttctaacggctcctttattctctaccagtttgagcttttcgggttcaccctcattttctttaaaagtggtcttaatccatttatatacagtaggaattccgctggtttaagaaggaaggtcctgtggtgtctccagtacatcgggctgggatttttctgttgcaaacagaaaacgaggctaagagctatgggtaagggaaacctcgaggtaaaccgaaacaaaagcagccaccacgagactaacagcgcttacatgttgtccccaaagccacaaaagaagttcgtcgaccaggcatgcggaccttctcactctaaagaaagcatggtttctccaaaaattagtgccggtcaccagcactgtggacaaagttccagtactccgatcaacacaagaatagagccatactacagtatctacaactcgtccccatctcaggaggagagcagtccctgcaacctgcagcctgtgaatagcttcggcttcgccaactcctatattgcgatgcactaccatactaccaacgaccttgtgcaggagtatgatagtacctcggcaaagcaaattcccgtaccgagcgtatag

SEQ ID NO: 188692 - DNA, 1092 bp, synthetic construct
  misc_feature 1..1092: note = Description of Artificial Sequence: Synthetic coding sequence
  source 1..1092: mol_type = other DNA
atgggccccggcgaggccctgctggccggcctgctggtgatggtgctcgccgtggctttgctgtctaatgcccttgtattactgtgttgtgcatattccgctgagctgagaaccagggcctcaggtgtccttttagtcaatctctcactaggacacttgctacttgcggcactggacatgccttttaccctcctcggggtcatgcgcggaagaacacccagcgcacccggcgcctgccaggtaatcggattcctagacacctttctggcgagtaatgctgctctaagtgtggccgcactgtccgctgaccagtggctggcggtgggatttcctctgagatacgctggccgactgcgccccagatatgcaggactgttgctaggttgcgcctgggggcaaagtcttgctttttctggtgctgccttaggttgctcctggctgggatatagctccgcatttgcatcttgttcccttcgtctgcccccagagcccgagcggccccgctttgcagcctttactgcaacattacacgctgttggtttcgtgctgcccctggctgtcctctgtctgactagcctgcaggtgcaccgtgtggccagacggcactgccaaagaatggatactgtcaccatgaaggcccttgctctgctcgctgatctacacccttccgtccgccagaggtgccttattcagcagaagagaagacggcaccgggccacgcgcaaaattgggatcgcaatcgccaccttcctcatctgcttcgccccttatgttatgacaagactggctgaactggtgccctttgtgaccgtgaacgcacaatggggtatcctgtccaagtgcctgacatactccaaggctgtggctgacccctttacttattccctcctgaggcgaccatttcgtcaggttttggcaggaatggtccatagacttcttaaacgtaccccaagacctgcaagtactcacgactctagccttgacgtggctggaatggttcaccaactgttgaaaagaacccctcgccctgcctctacacataatgggtcagtagatactgagaacgactcatgtctgcaacagacccattag

SEQ ID NO: 188693 - DNA, 1011 bp, synthetic construct
  misc_feature 1..1011: note = Description of Artificial Sequence: Synthetic coding sequence
  source 1..1011: mol_type = other DNA
atgaacaacaacaccacctgcatccagcccagcatgatcagcagcatggccttgccaattatttacattctcctgtgtattgtgggcgtattcgggaacaccctgtcccaatggatcttcctgacaaaaatcggcaagaagactagcacgcatatttatctgagccacttggttactgccaaccttctggtttgttctgcgatgccctttatgagcatatatttcctcaagggctttcagtgggaatatcagagcgcacagtgcagagtagtcaactttctgggaacactgtctatgcacgcttcaatgtttgtttcactgttaatcctcagttggattgctatcagccgctacgcaacacttatgcagaaagacagctcccaagagacaactagttgttacgaaaaaattttctatggccacctactcaaaaagtttaggcaacctaatttcgctcgcaaactgtgtatctacatatggggtgtggtgctcggaatcatcattccagtaacagtctactacagtgttatcgaagctaccgagggagaggagtctctctgttataatcgccagatggagttaggagccatgataagtcagatcgcaggactcattggaactacattcatcgggttctccttcctggtggttctgacttcctactactcgtttgtgtcccacctgcgaaagatacgcacatgtacatcgatcatggaaaaggaccttacgtactcgtcagtcaagagacatttgctggtaatccaaatccttctgattgtgtgtttcttaccctatagtatttttaagccgatcttttacgtattacaccagcgagacaactgccagcaactgaattatctgatcgagacaaagaatatactgacatgtttagcatcagctcggagctcgacagacccgataattttcctgttactagataagacctttaaaaagactctgtataacttgttcactaagtccaattcggcgcacatgcagagctatggatag

SEQ ID NO: 188694 - DNA, 1272 bp, synthetic construct
  misc_feature 1..1272: note = Description of Artificial Sequence: Synthetic coding sequence
  source 1..1272: mol_type = other DNA
atggtgccccacctgctgctgctgtgcctgctgcccctggtgcgggccactgaaccgcatgagggcagagcggatgagcaatctgcggaggcagcactggccgttccaaacgcttctcatttctttagctggaacaactatactttcagcgactggcagaacttcgtcggcagaagaaggtacggcgccgaaagccagaacccaaccgtgaaggccctgctgattgttgcctatagctttattatcgttttctcactctttggcaacgtgctggtatgccacgttatttttaaaaaccaaaggatgcactctgcaacaagcctatttatagtgaacctcgctgtggctgatattatgattactcttttaaacaccccatttactttagtaaggttcgttaacagcacatggatcttcgggaaggggatgtgtcacgtgtcaagattcgctcagtactgctccttgcacgtgtcagcgctcacactcactgctatcgccgttgatcggcaccaggtcatcatgcacccacttaagccacgtatctcaatcactaagggcgtaatctacatagccgtgatctggacaatggctacatttttttcgctgccccatgctatctgtcagaaattattcacctttaagtacagtgaagacattgtgcgctccctgtgtctgcccgacttcccagagcccgccgatcttttctggaaatacttggacctcgccaccttcatactgctgtatatccttcccctactcatcatctcggttgcttacgccagagtggctaagaagttgtggctctgcaacatgataggagacgtgactacggaacaatatttcgcgctgcgaaggaagaaaaagaaaacaatcaagatgctcatgctggtcgttgtcttgttcgccctctgctggttcccgcttaattgctatgttctgctgttgtcatcaaaggttattcgcacaaacaatgcactatattttgcttttcattggttcgcgatgtcctccacctgctataaccctttcatctattgctggctgaatgagaacttccgaatagagttgaaggctctactgtcgatgtgccagcgaccgccaaagcctcaggaagataggccaccctcccccgtgccctcattcagagttgcctggaccgaaaagaacgatggacagagagcccccttggcgaacaacctcttgcccacctcccagttacagagcgggaaaactgatctctcttccgtcgagcctattgtgacgatgtcctag

SEQ ID NO: 188695 - DNA, 1191 bp, synthetic construct
  misc_feature 1..1191: note = Description of Artificial Sequence: Synthetic coding sequence
  source 1..1191: mol_type = other DNA
atgtggaacagcagcgacgccaacttcagctgctaccacgagagcgttctgggctacaggtatgtcgctgtcagctggggtgtggttgtggccgtgaccggaaccgtgggcaatgtgttaacactcctggcccttgcaattcaacccaagctgcgtactcgattcaacctgcttattgctaacttaacacttgctgacttgctctactgcaccctgttgcagcccttttcagtggacacatacttgcacctgcactggagaacaggagcaacattttgtcgcgtgtttggactcttactgttcgccagtaattctgtttctatcttgaccctctgcctcatcgcactgggccgctatttactgatcgcccacccgaaactgtttccccaagtattttcggccaagggaatcgttctggcacttgtgtccacctgggtagtgggagtggctagcttcgcgcccctgtggccgatttacatcttagtaccggtggtgtgcacctgctcatttgataggattcgaggaaggccttacacaactattctgatgggcatttacttcgtcctcggtctttccagtgtgggcattttctactgtttgattcaccgccaggtgaagagggctgctcaggcactggaccagtacaagctgcgccaggcttcgatccacagtaatcacgtggcaagaacggacgaagcaatgcccggacggtttcaggaacttgactcacggttggccagcgggggtcctagcgaaggcatctcatcagagccggtgagtgccgccaccacacagactctggaaggcgatagcagtgaggtaggcgaccaaatcaactccaagcgtgctaaacagatggctgagaaatctccccccgaagcctcagcaaaggctcagccaattaaaggtgcgcgccgggcgccagatagtagcagtgagttcggcaaggtaactcggatgtgcttcgcagttttcctgtgctttgctctatcatatattcctttcttgctgttgaatattctggatgcccgagtccaagccccacgcgtagtccacatgctggctgcaaacctgacgtggctcaacggctgcataaacccggtgctgtacgccgccatgaatcgacagttcaggcaggcatatggctctatcctgaagcgcgggcctcggtcttttcacagactgcactag

SEQ ID NO: 188696 - DNA, 1191 bp, synthetic construct
  misc_feature 1..1191: note = Description of Artificial Sequence: Synthetic coding sequence
  source 1..1191: mol_type = other DNA
atgtggaacagcagcgacgccaacttcagctgctaccacgagagcgtgcttggttacagatatgtcgctgtctcctggggggtggtggtcgctgtgactggcaccgttggaaatgtacttactctgctggctttagccatacagcccaaactgcgcacaagatttaacctgctgattgcaaacctcaccctcgccgacctcctatattgcacactgctgcagcccttctccgtggacacttatttgcacctccactggagaactggagctacgttctgcagagtgttcggcctcctgctcttcgcaagtaactctgtctcaatactgaccctatgtctgattgccctgggtaggtatctcctcattgcgcacccaaagctgtttccccaggtattttccgccaaagggatcgtgttggctctggtctctacctgggtggtgggagttgcatcctttgctcccttatggcctatctacatattagtgccagtcgtttgtacttgtagctttgataggattcgcggacggccctacaccacaatacttatgggcatttacttcgtgttagggctgagcagtgtcggaatcttttattgcctcattcatagacaggtgaagcgagcagctcaggcactggatcagtacaaacttaggcaggcctccattcattctaatcacgtggctagaacggacgaggcaatgcctggaagatttcaggagctggattcacgattggcctccggcggccctagtgagggcatatcatcagagccagtatccgctgctacgacacaaacactggagggtgacagtagcgaggtgggtgatcagataaactccaaaagagcgaagcaaatggcagaaaaatctccacctgaggccagcgcgaaggcgcagcctattaaaggtgcccgcagggcgccagactccagttccgagtttgggaaggtgaccagaatgtgctttgccgtgtttctttgctttgccctttcctacatacccttccttctactaaatatactagatgctagagtgcaggcccctcgcgtcgtgcacatgctggctgcaaatctgacctggctaaacggttgtattaacccagtgttgtatgccgctatgaacagacaattcagacaggcatacgggtctatcctgaagagaggaccaagatcctttcacaggttacattag

SEQ ID NO: 188697 - DNA, 1113 bp, synthetic construct
  misc_feature 1..1113: note = Description of Artificial Sequence: Synthetic coding sequence
  source 1..1113: mol_type = other DNA
atggccaactacagccacgccgccgacaacatcctgcagaacctgtcacctctgacagcatttcttaaactcactagcctcggctttatcatcggcgttagcgtagtgggtaatttgcttatctctatcttgctagtgaaggataagacactgcaccgcgcgccttactatttcctcctggacctgtgttgttcggatattttaaggagcgctatctgctttcccttcgtctttaattcagtgaaaaacggctctacctggacttacggtacactcacatgcaaggtgatcgctttccttggcgtcctctcctgcttccacacagcgttcatgctcttctgtatttcggtgacaaggtatttagctatcgcacaccaccgcttctatacgaagcgcctaaccttctggacttgtctagctgttatatgcatggtgtggaccctgagcgtggccatggcttttccccccgttctggatgtgggaacgtactcatttattagggaagaggatcaatgcacgttccagcatagatcttttagagctaacgattccctgggctttatgttactgctcgcccttatcctgctcgccacccaattggtatatctcaagctgattttcttcgttcatgaccgacgtaagatgaagccggttcagttcgttgcggctgttagccagaactggacgttccatggccccggcgcatcaggacaggccgcagcgaattggttggctggcttcgggcggggtcccaccccgccaactctcctcgggattcgacagaatgctaacacgactggtaggcgcagacttctggtgctagatgagtttaaaatggagaagcgcatttctagaatgttctatatcatgacttttttattcctgacactgtggggaccatatctggtagcatgttattggagggtgttcgcaagaggaccagtggtgccaggcgggttccttacagccgcagtctggatgtcctttgcacaggccggcattaatccttttgtctgcatctttagtaatcgggaacttagaagatgcttctccaccacccttctgtactgtagaaagagccggctgccccgggagccgtactgtgtgatctag

SEQ ID NO: 188698 - DNA, 1113 bp, synthetic construct
  misc_feature 1..1113: note = Description of Artificial Sequence: Synthetic coding sequence
  source 1..1113: mol_type = other DNA
atggccaactacagccacgccgccgacaacatcctgcagaacctgtctcccctgactgccttcctgaagctcacgtcattgggattcataattggcgtcagcgtggtggggaatctcctcattagcatcttgctggtcaaagataagaccttacaccgagccccgtattacttcctgctggatctatgttgcagcgacatcctgcgctccgctatctgcttcccttttgttttcaatagcgttaagaacggctcaacatggacgtacggcactctgacgtgtaaggtgatcgccttcctcggagtgctcagctgctttcacaccgcctttatgttgttctgcatttccgttacacgttacctagcaattgcgcatcacagattctacaccaaaaggcttacattctggacctgtctcgcagtgatttgtatggtctggacattgtccgtggccatggcctttcctccagtgcttgacgttgggacttatagtttcatccgggaagaggatcagtgcacgttccagcatcggagttttcgggcgaatgattcccttggcttcatgctgctgcttgctttgatcctgctggccacgcaactagtctatctgaagttgatattctttgttcatgaccggagaaagatgaaacccgtccagtttgtggccgctgtgtcgcaaaattggacctttcacggtccgggggctagcggccaggcggccgccaactggctagccggattcggacgtgggcctaccccccccaccctgctgggaattcgacagaatgccaacactaccggcagaagacggctcctggttctggacgagttcaaaatggagaaaagaatctcacggatgttctacatcatgacctttctgtttttgaccctgtggggcccatatttagtagcctgttactggcgggtgttcgcgcgggggcctgtggtgcctggaggatttctcaccgccgctgtttggatgtcgttcgcccaggctggtataaatccatttgtgtgtattttctcaaatagggaactgaggcgctgtttcagtacaactttgctctattgccgaaaatcacgactccccagggaaccctattgcgtcatttag

SEQ ID NO: 188699 - DNA, 216 bp, synthetic construct
  misc_feature 1..216: note = Description of Artificial Sequence: Synthetic coding sequence
  source 1..216: mol_type = other DNA
atggccaactacagccacgccgccgacaacatcctgcagaacctgagccctttgactgcatttctcaagctgacctccttgggctttatcattggcgtttctgtggtcggaaatctgctaatttctatactcctggttaaagataagaccctgcaccgggccccatactacttcttgttagatctctgttgcagtgacatcctgcgtagtgcctag

SEQ ID NO: 188700 - DNA, 1113 bp, synthetic construct
  misc_feature 1..1113: note = Description of Artificial Sequence: Synthetic coding sequence
  source 1..1113: mol_type = other DNA
atggccaactacagccacgccgccgacaacatcctgcagaacctgtcccccctgacggctttccttaagttgactagtctcggttttattatcggcgtaagcgtggttggcaacctactgattagcatactcctagtcaaggacaagacgctacatcgagcaccatattacttcctcttggatctgtgctgttctgacatcctgagatccgccatttgttttcctttcgtgttcaacagtgtcaagaatggtagcacttggacatatgggaccctgacgtgtaaggttattgcatttctcggcgtgttaagctgttttcacacagcgttcatgctgttctgcatttccgtgacacgatacctagccatcgcccatcatcggttctacaccaagaggctgacattctggacatgtctggccgtgatttgcatggtttggacactgagcgtggcgatggcttttcctcccgtcctagatgtcgggacctattcctttattagagaagaagaccaatgcacttttcagcataggagttttagggctaacgactccctggggttcatgctgctgttggctttgattctgttggcaactcagctcgtctatctcaaattgattttcttcgtgcatgaccgccgcaagatgaagcccgtccaatttgttgctgctgtcagccagaattggacctttcatggacctggggcgtcaggacaagctgctgcgaattggcttgctggcttcgggcggggcccaactcctcccacccttttggggatccggcagaatgcaaacaccacaggcaggcggcgactgctggtgctggatgagttcaagatggagaaacgaatcagtcgcatgttttacatcatgacttttctattcttgacattatgggggccatacctggtggcttgctactggcgagtctttgcgcgcggacctgtggtccctggaggcttcctcaccgcggcggtgtggatgtctttcgcccaggccggaattaatccctttgtttgcatttttagtaaccgcgaactgagacggtgcttttccactactctcctgtattgccgcaaaagccggttgcctagagagccctattgcgtaatttag

SEQ ID NO: 188701 - DNA, 366 bp, synthetic construct
  misc_feature 1..366: note = Description of Artificial Sequence: Synthetic coding sequence
  source 1..366: mol_type = other DNA
atggccaactacagccacgccgccgacaacatcctgcagaacctgtcccccctaaccgcttttctaaaactgacttccctgggcttcatcattggggtgtcagtggtagggaatctgctcatcagcatcctgctggtaaaggacaagaccctgcaccgtgccccttactattttttgctcgacttatgctgtagcgacatcctgagaagcgccatttgctttccctttgtgtttaacagcgtgaagaatggtagcacctggacctatgggactctcacctgtaaggtgattgcgttccttggggtactcagttgtttccacaccgcctttatgttgttctgtatctcggtgaccagatatctgtag

SEQ ID NO: 188702 - DNA, 1113 bp, synthetic construct
  misc_feature 1..1113: note = Description of Artificial Sequence: Synthetic coding sequence
  source 1..1113: mol_type = other DNA
atggccaactacagccacgccgccgacaacatcctgcagaacctgagccccctcacagccttcttgaaactcacatcactgggttttattataggcgttagcgtggtcggcaatcttctcattagtatccttctcgtaaaagacaaaactttgcatagggctccttattatttcctcttagatttatgctgttctgacatactgagatctgcaatctgttttccatttgtgttcaacagtgtgaaaaacggaagcacctggacatacggaaccttaacctgcaaggtcatcgctttcctgggcgttcttagctgtttccatactgcttttatgcttttctgtatctccgtgacgagatatttggcgatcgcacaccatcgattctacaccaagagactgacgttttggacctgcctcgccgtcatttgtatggtgtggactttgtctgttgccatggcattcccgccagtgttggacgttggcacctacagttttattcgggaggaggatcaatgcacattccagcacagaagcttccgggccaacgactccctgggctttatgcttctgctcgccctgatcctgctcgctacacagctggtgtacctgaagctcatattctttgtccacgatcggaggaaaatgaaacctgttcagttcgtcgcagccgtttctcagaattggacatttcacggacccggcgcatcagggcaggctgccgctaattggttggctggctttggccgcggtccaacccccccaaccttgctgggcatacggcagaacgctaatactacgggtcgaaggcgcttacttgtgctcgacgagttcaaaatggagaagcggatctccagaatgttttatatcatgaccttcctgttcttaacactctggggaccttacttggtagcatgctactggcgggtgtttgctaggggccccgtggttccgggcggattcctcaccgcagccgtatggatgtcattcgctcaggctggtattaatcctttcgtgtgcattttctccaatcgcgagttaagacggtgtttctccactaccctcctgtattgcaggaagtctaggttgcctagagaaccctactgcgtgatatag

SEQ ID NO: 188703 - DNA, 1077 bp, synthetic construct
  misc_feature 1..1077: note = Description of Artificial Sequence: Synthetic coding sequence
  source 1..1077: mol_type = other DNA
atgggcttcaacctgaccctggccaagctgcccaacaacgagctgcacggacaggagtcccacaacagtgggaatagatcagatggcccgggcaagaacaccaccctccataatgagttcgacaccatcgtgcttccagtcttgtacctgatcatctttgtggcctctattctcctgaatggattggcagtgtggattttttttcacattcgtaataaaacctcatttatcttctatttaaaaaacatcgtggtggcggatttaattatgacgctgacttttcctttcaggattgtacacgacgctggtttcgggccgtggtatttcaagtttattttgtgccggtacaccagtgtactgttctacgctaatatgtacacctctattgtgttcctgggcctgatttccattgatcggtacctgaaggtcgtaaagccctttggtgactcccggatgtattccattactttcaccaaggttctgagcgtgtgtgtctgggtaattatggccgtgctttccttacccaatattattctgacaaacgggcaacccacagaggacaacattcacgattgctcaaaactgaagtctcccctcggcgtcaagtggcacacagcagtcacctacgtaaactcatgtctattcgtagccgtgctcgtgatactgattgggtgctatattgccatttctagatacattcacaagtcaagcagacagtttatctcccagtcctcccgaaagagaaagcataatcagtcaattcgggtggtggtagctgttttcttcacatgctttctcccctatcacctttgtagaattccattcactttctcacacttggaccgcctcctagacgagagcgcccagaagatactgtattactgtaaagagattactctattcctgtcagcctgcaatgtctgcctggacccaattatatactttttcatgtgcaggagtttctctcgccgtctattcaagaaatctaatatacggacgcggtccgagtctatccgcagccttcagtctgtgagacggtccgaggttcggatctactacgactatacggacgtttag

SEQ ID NO: 188704 - DNA, 1368 bp, synthetic construct
  misc_feature 1..1368: note = Description of Artificial Sequence: Synthetic coding sequence
  source 1..1368: mol_type = other DNA
atgagcttcctgatcgacagcagcatcatgatcaccagccagatcctcttcttcgggttcgggtggctgtttttcatgcgacagttattcaaagattatgaaatcaggcagtacgtggtacaagtgattttcagcgttacgtttgcattctcctgtacaatgtttgagctgattatttttgaaatcctgggagtgctcaatagcagcagcagatatttccattggaaaatgaacctgtgtgtgatactgctgatcttggtgttcatggttcccttctacatcggctacttcattgtatcaaacatcaggctccttcacaagcaaagactcctcttttcgtgtctgctctggctgacttttatgtacttcttttggaagttaggcgacccgttccccatcctcagccccaagcatggtattctgtccatcgaacagctgatctccagggtcggagttatcggtgttaccctgatggcactgttatccgggtttggcgctgtcaactgtccttacacatatatgtcgtacttcctgaggaacgtcaccgatacggacattctagctctggagcgcagattgctgcagacgatggacatgataatcagcaagaagaagcgcatggctatggcacggcgtactatgttccaaaagggggaggtccataacaagcctagtggcttttggggaatgatcaaatctgtaacaaccagcgccagcggctcagaaaatctgaccctgattcagcaggaggtggacgctctagaggaattaagccgtcagctgttcttggaaactgccgacctgtacgctaccaaagagcggatcgagtacagtaagacattcaaaggaaagtatttcaacttcctcggttacttctttagtatctactgtgtgtggaaaatcttcatggcgacaattaacattgtctttgatcgcgtgggaaaaaccgatccagtaacaagaggcatagagataactgtgaactatctggggattcagttcgatgtgaagttctggtcgcagcatatcagctttattctcgtagggattataatagttacttccatcagagggctgcttattaccttgacaaagttcttttatgccatttcctcctctaaatctagcaatgtgatcgttctgctcttggcgcagatcatgggaatgtattttgtctcgtctgtcttactgattcgaatgtctatgcctctcgagtatcgcaccattatcacagaggtactcggcgaattgcaatttaacttctaccaccgatggttcgatgtgatattcctggtgagcgctttgtcttccattctcttcttgtatctggcccataagcaggccccagagaagcagatggccccctag

SEQ ID NO: 188705 - DNA, 1008 bp, synthetic construct
  misc_feature 1..1008: note = Description of Artificial Sequence: Synthetic coding sequence
  source 1..1008: mol_type = other DNA
atgtacttcttctggaagctgggcgaccccttccccatcctgagccccaaacatgggatcctctcgatcgaacagcttatctctagagtcggcgttatcggcgtgacgctcatggcgctcctgtccggtttcggtgccgttaactgcccttacacatacatgagctattttctgcgtaatgtgacagatactgacatcttagcccttgaaagacgcttacttcagacaatggacatgatcattagtaagaaaaagcgtatggcgatggcccgtcggacaatgttccagaagggagaggtgcacaataaaccttcagggttctggggcatgatcaaatccgtcactacctcggcctctggctccgagaatctgacactgattcagcaagaagtagacgccctggaggagctaagtagacaattgtttctcgagaccgccgatttatatgcgacgaaggagcgcatagaatactctaagactttcaaaggaaagtacttcaacttccttggatactttttttctatctattgcgtctggaaaatttttatggcaacaataaacatagtatttgatcgcgtgggaaagacagaccctgtgactagaggcattgagattaccgtgaattacttgggtatccagttcgacgttaagttctggtctcaacatatcagcttcatactcgtgggaattataatcgttacatcaatcagaggactgttgataactctgacgaagtttttttacgccatctcctcaagtaagtcctccaacgtgatcgttttgttgctagctcagataatgggaatgtactttgtgagctccgtgctcttgatcagaatgtcaatgcctctggaatatcgaacaattataacagaagtactgggtgagctgcagtttaatttctatcacagatggtttgacgtcatcttcctagtctcagcactgtcctccatcctgtttctctatcttgcgcacaagcaggctcctgagaagcagatggccccctag

SEQ ID NO: 188706 - DNA, 1368 bp, synthetic construct
  misc_feature 1..1368: note = Description of Artificial Sequence: Synthetic coding sequence
  source 1..1368: mol_type = other DNA
atgagcttcctgatcgacagcagcatcatgatcaccagccagatcctgttcttcggatttggatggctgttcttcatgcggcagctgtttaaggactatgagatcagacagtatgtagttcaggtcatctttagcgtaacctttgcattttcttgtacgatgttcgagctgatcattttcgaaatcctaggagtgctcaactcctccagtaggtattttcattggaagatgaatctatgcgtgattctgctgattctggtctttatggtgcccttttacataggttacttcattgtaagcaacatccggctcctccacaaacagagattactcttcagctgcttgctctggctcacattcatgtactttttctggaagctcggagaccctttcccaatactttcaccaaaacacggaattttaagtattgagcagctgatttcacgcgtgggtgtgattggagtgacccttatggcgctgctcagtggatttggggcagtgaattgcccctatacatacatgtcatatttcctgcgcaatgtgactgacacagatatcttggcactggagcgtagactacttcagaccatggatatgatcatttccaaaaaaaaacgcatggcgatggcccgtaggaccatgtttcagaaaggggaggttcacaataaaccgagtgggttctggggcatgataaagtctgtgacaacatcagcctctggttcggaaaatttgacactgatccagcaggaagttgacgctttagaggagctgtcacggcaactgttcttagaaacagctgacctgtatgctaccaaagaacggatagagtattccaaaacttttaaggggaagtattttaactttctgggctacttcttctccatctattgtgtgtggaaaatatttatggctaccataaacatcgtgttcgaccgggttggaaagacagatccagtcactcgaggaatcgaaataactgtcaattatcttgggattcaattcgatgtcaagttttggtcacagcatatcagcttcattcttgtgggaataatcatagtaacctcaattcgggggctgttgatcacactcaccaaattcttctacgctatcagctcctctaagagttcaaatgtgattgtgcttttactggctcagatcatgggaatgtatttcgtatcctccgtgctgctgattcgcatgtcaatgccactcgagtaccgaacgattatcactgaagtactcggtgaacttcagtttaatttctaccataggtggtttgatgtaattttcttggtatcagctctgtcgagcatactgttcctgtacctcgcgcataaacaggcccctgagaaacagatggcgccttag

SEQ ID NO: 188707 - DNA, 18921 bp, synthetic construct
  misc_feature 1..18921: note = Description of Artificial Sequence: Synthetic coding sequence
  source 1..18921: mol_type = other DNA
atggacatcttcctggtgctgggcatgcccagcgccagcctgctggtaaacctactgtctgccctgctgatcctgtttgtcttcggcgagactgagatacgcttcacgggacagactgagttcgtggtgaacgagacctcaacgaccgtaatcaggttgattattgagaggatcggtgagccagctaacgtaactgcgatcgtctcactgtacggtgaggatgcaggagatttttttgacacttacgcggcagcttttattcccgctggggagactaaccggacagtgtatatagccgtctgtgacgacgacctgcccgagcctgacgagaccttcatcttccatctcactctgcaaaaacccagtgctaacgtgaaactgggctggccccgaactgtcacagtcacaatactgtctaatgacaacgcattcggcatcatttcctttaacatgctgccctccatcgcagtgtccgaacctaaaggccgaaatgaatctatgcccctgactctgatcagagagaaagggacctacggcatggtgatggtgacgtttgaggtggagggggggcccaaccctcctgatgaagatttgagccccgtcaaggggaacatcaccttcccccccgggcgcgcaactgtgatctataacctcacagtcttggacgatgaggtccccgaaaatgacgagatcttcctcatccagcttaaaagtgttgaaggaggggcagagattaacaccagtagaaacagtatagaaataatcattaagaagaatgactcgccagtgcgattcctgcaaagtatctatttggtgcccgaggaagaccatatcctgataattccagtcgtacgcggcaaggacaataatggcaatttgatcggctctgatgaatatgaggtatctatctcatatgctgtgaccactggaaattcaaccgctcatgcccaacagaatctcgacttcatcgatcttcaaccgaataccactgtcgtctttccccccttcattcacgagtcacatttgaaattccagatcgtggacgatacaatacctgagatcgccgaatccttccacataatgctcttgaaggacacgctacagggggacgctgtcttgatcagccccagcgtcgtgcaagttacaattaagcccaacgacaagccctacggagtgttgtccttcaactcggttctctttgagcgcacggttatcatcgacgaggaccgaattagtagatatgaagagattactgtggtcagaaatggtggcacccatggaaatgtaagtgctaattgggtgttaaccaggaattcgaccgatccttctccggttactgccgatatacgaccaagttccggcgtattacacttcgcccaaggtcagatgctcgctactatcccactgaccgtggttgacgacgatctccccgaagaggccgaagcttacttgctgcaaatactgccgcacactatcagaggtggcgctgaggtgagcgagccagcagagctactattctatatccaggactcagatgacgtgtacggattaatcaccttcttccctatggagaaccagaagatcgagagctctccaggagagagatacctgtccctctccttcacacgtctgggaggtactaaaggcgacgttagattgctttatagtgtgctgtacatacctgcaggcgccgttgatcccctgcaggccaaggaaggcatcctgaacatttccaggagaaatgacctgatcttccccgagcagaagacacaggttacaaccaagctcccgatccgcaacgacgcttttctacagaacggagcccacttcctggtgcaactggagacagtggagctgttgaacattatcccgttgataccaccgattagtcctagatttggcgagatctgtaatataagcttacttgtgaccccagccatcgctaacggggagatcggctttctttctaacttgccgattatactgcatgagcctgaggatttcgcagcggaggtggtgtacattccactgcatagagacggaacagacgggcaagctaccgtgtactggagcctaaaaccttccggctttaacagcaaagccgttacccccgacgacattggacctttcaatggatccgttcttttcttatctgggcagagcgatacgactatcaatataaccatcaaaggcgacgatattcccgagatgaatgaaactgtcacgctgtccttggacagggttaacgttgaaaatcaggttcttaaatccggatacaccagtcgcgacctgatcatcttggaaaacgatgaccccggcggagtgttcgaattctcacccgcatctagggggccttatgttatcaaggaaggcgagtcagtggagctgcatataattcgttcccggggctcactcgtcaaacagttcctgcattaccgcgttgagccacgggactccaacgagttctacggtaacacgggcgtcttggagtttaaaccgggcgagcgcgaaattgtgataaccctcctggcacgtctggacggaataccagaactggacgagcactattgggttgtcctgtccagtcacggagagcgcgagtcaaagctgggtagtgcgacgatcgtgaatattacaattctcaagaatgacgacccacacggcatcatagaatttgtaagtgatgggcttatcgtgatgatcaatgagagtaaaggggatgctatctatagtgcggtgtacgatgttgttagaaataggggaaacttcggcgatgtgtctgtgtcatgggttgtgtctcctgacttcacacaggatgtattccccgtgcagggaaccgtcgtgtttggcgatcaagaattcagcaaaaacatcaccatatattctctgccggatgagattcctgaggagatggaggaatttacggtgattctcctgaacggaacaggaggggccaaggtgggaaaccggacaactgcaacactgcgcatccggcgcaacgacgatcccatctatttcgccgaaccccgggttgttagagtgcaggaaggagagactgccaattttaccgtgctccgcaacggctcagtggacgtcacctgtatggtgcagtatgccacgaaggacgggaaggccacagctcgagagcgggatttcatcccggtagaaaaaggagaaacactcatatttgaggtggggtcgcgacagcagtccatcagtatatttgttaatgaggatgggattcccgagacagacgaacccttttacatcatcctactcaatagcaccggcgacactgtggtgtatcaatacggcgtcgccaccgtgattatagaggcgaatgacgaccccaacgggatcttcagcctcgaaccaatagataaggctgtcgaggagggcaagacaaatgcattctggatcctaaggcatcgcggttatttcggcagtgtgtccgttagttggcagctgttccaaaatgacagcgcccttcagccaggtcaggagttctacgaaacttctggaactgttaacttcatggacggcgaagaggctaaacctattatcctccacgcattcccagacaaaatacctgaatttaacgaattctacttcttgaagctggtgaatattagcggcgggagccccggccctggcggccaactcgcagagacaaacctccaggtgaccgtaatggtccccttcaatgacgatccattcggggtctttatcctcgaccctgagtgtttggagagggaggtggctgaagatgttctcagcgaggatgatatgagctatattactaactttactatcctccgccagcagggtgtgttcggtgacgtacaattggggtgggagattttgagctcagaattcccagctggcctgcctcctatgattgactttctcttggttggaattttcccaacgacagtacacctgcaacaacatatgcgccggcaccattctggtacagacgccctgtactttaccggcttggagggcgcatttggcaccgtcaaccctaagtaccaccctagtcggaacaatactattgccaactttacttttagcgcttgggtaatgccgaatgcaaataccaatggtttcattatcgccaaggatgacggcaatgggtcaatttattatggagtaaagattcagaccaacgagtctcacgttaccctttcactccattacaaaaccctcgggagcaacgctacctacatcgctaagaccactgtcatgaagtatttagaggagagcgtgtggctgcacctgttgattatcctcgaggatggcatcattgagttctacctggatggaaacgctatgcctagaggtatcaaaagcctaaaaggcgaggcaataaccgatgggccgggcattctgcggataggcgccggcattaacgggaacgaccgttttacaggactgatgcaggacgtgcgcagctatgagaggaaactgaccctggaagagatttacgagctgcatgccatgcctgccaagtctgatttacacccaatctcaggatacttggaatttcgccagggcgaaactaataagagcttcatcatttctgcacgagacgataatgatgaggaaggggaggagctgtttatactcaaactggtgtccgtctatggtggcgcgagaatctccgaggagaacactacagccaggctgacaatccaaaagagtgataacgccaatgggctattcgggtttacaggcgcatgcatccctgagatcgctgaagagggctctaccatttcatgcgttgttgagcgcactcggggcgcactggattatgttcacgttttctacaccatttcacagatcgaaaccgatggtattaactatctcgtggacgatttcgccaatgcctcaggtactatcacattcctgccctggcaacgctcagaagttctgaacatatacgtgctcgacgatgacatacctgaactgaacgaatactttcgggtcaccctagtatcagccatacctggagacggcaaattgggatccacccccacaagtggcgcaagtattgaccccgagaaggagaccacggatataaccatcaaagcgtcggatcacccctatggcctcctgcaattttccactgggctccctcctcagcctaaggatgccatgacactgcccgcgagttcagtgccacacatcacagttgaagaagaagatggcgaaatcagactcctcgtgattcgtgcccagggtttgcttggtagggtcaccgccgaatttcggaccgtgagcttaactgccttcagccctgaggactaccagaatgtggccggaactctggaatttcagcccggtgagagatacaagtacatctttatcaacataactgataatagtattccagaactggagaagtcctttaaagtggagctgcttaacttggagggcggggtggcggagctgttccgcgtggacggttctggtagcggtgatggtgacatggaattctttctcccaactattcacaagcgcgcatcactgggtgttgcatcccagatcctggtgactatagccgccagcgaccacgcccatggcgtctttgagttcagtcccgagtccctgtttgtgagtggcaccgagcctgaagacggttattctacggtcacccttaatgtcattagacaccacggcactcttagcccagtaactctacactggaatattgactctgatccagatggagatcttgctttcacttccggaaatatcaccttcgagataggccagactagtgccaatatcacagtggaaatactgcccgacgaagatcccgagcttgataaggccttctcggtctcagttctgtcagtttccagcggctcattaggggcacacattaatgcaactcttactgtgctggcctcggatgacccgtacggcatcttcattttttccgagaagaatcgcccagtgaaagttgaggaagccacccagaacatcactctttccataatcaggctgaaggggctgatgggcaaggtcttagtctcctacgccactctggatgatatggagaaacctccgtattttcctccgaacttggctcgcgccacacagggccgggattacatccctgcctccgggttcgctttgtttggagcaaatcaatccgaagcaaccatagctatatctatcctcgacgacgacgagcctgagcggtctgagtctgttttcatcgaactgctcaactccactctcgtcgcgaaggtacagtcacgaagtatcccaaatagccctcgcttagggcccaaagtcgagactatcgcccagctgataattatcgctaacgacgacgcgtttggaaccttacaactgagcgccccgatcgttcgcgtggccgagaaccacgtcggtcccatcattaacgtcacgcgaaccgggggcgccttcgctgatgtgagcgtgaagtttaaagcagtgccaataaccgccattgcgggtgaggattattcgattgcatccagcgatgttgtgttgctagagggagaaacgagtaaggctgtaccaatttacgtgataaacgacatctacccagagctggaagaatcctttcttgtgcaactgatgaatgagaccacaggtggagctagactcggcgcactgactgaagctgtcataatcattgaagcgagcgatgatccatatggcttgttcgggttccagatcacaaagctgatagtggaggaacccgagttcaattccgtaaaggtgaatctcccgattattagaaactctggcaccctaggaaacgtgactgtccagtgggttgccactataaacggtcagttggcaaccggggatcttcgtgttgtctctgggaatgtgacatttgcgccgggtgagacaatacagactctgctgctcgaggtcctggccgacgacgttccagaaatcgaagaagtgatccaggtacagctgactgacgcctccggaggagggaccataggcctcgacagaatagccaacatcatcatcccagccaacgacgacccctatgggacagttgcatttgcgcagatggtgtaccgggtgcaggagcctctcgagaggtctagctgcgctaacattactgtcaggcgctcagggggccattttgggcgcttgctgctgttctatagcaccagcgacatagatgtggtggcacttgctatggaggaggggcaagatttgctgtcctattacgagtcccccattcagggcgtgcctgatcctttatggcgcacctggatgaacgtgtccgccgtgggcgaaccgctttacacatgcgctacactgtgcttgaaggagcaggcctgctctgccttctcttttttctctgcttctgaagggccacagtgcttctggatgacatcatggatcagcccggcggtgaacaactcagacttttggacatacagaaagaacatgacgagggtggccagcctgtttagcgggcaagctgtggccggctctgactacgagccagtgacccgccagtgggctattatgcaggagggagatgaattcgcaaatctgactgtgtcaattttacctgatgactttccagagatggatgagagcttcctcatttctctcctagaggtgcacctgatgaatataagcgcctcactcaagaatcagccgaccattggccagcccaacataagcactgtggtgatcgctttaaacggggacgcattcggagtttttgtgatatacaacatttccccgaacacttccgaggacggcttattcgttgaagttcaggagcagccccagacgcttgtcgagctgatgattcatcgtacaggtggctccctcggccaggtcgccgtcgaatggagggtggttgggggcacagccaccgaggggctcgactttatcggggccggggagattcttaccttcgctgaaggggagaccaaaaagaccgtgattctgactattcttgacgactccgagcccgaggacgacgagtccattattgtctcgctggtctataccgaaggaggttctagaatcctcccctcttccgacaccgtccgggtcaacattcttgctaatgacaacgtcgcaggaatcgtttccttccaaactgctagtcgatctgtgattggtcacgaaggcgaaatcctgcaattccacgttattcgcacctttccaggtagaggtaatgtgaccgtcaactggaaaatcataggccagaacttggaactcaatttcgcaaatttctccgggcagctatttttcccagagggcagccttaacaccactctcttcgtgcacctcttggacgacaacattcccgaggagaaggaggtgtatcaagttatattatacgacgtgagaacacaaggcgtacctcctgcaggcattgccctgcttgacgcccagggctatgctgctgtgctgacagtggaagcttccgatgaaccccacggcgttctgaatttcgcgttgtccagccggttcgtgcttctgcaagaagcaaatattacaatacaattgtttatcaatcgggaatttggctcccttggtgccatcaatgtgacctacacaacggtgcccgggatgctctcgctgaagaaccagacagtgggcaacctcgcagaacccgaagtggatttcgtgcctatcatcggctttttaatcttggaagaaggggagacggccgccgccatcaatataaccattctggaagatgacgtaccggaattggaagaatatttcctcgtaaatctaacatatgtcggattgacaatggccgctagcacctcttttcccccgcggctcgactctgaggggctgacagctcaggtcataatagatgctaatgacggcgcaagaggggtcattgagtggcagcagagcaggtttgaagtgaacgaaacccacggttccttgactctggtcgcccagcgttccagggaacccttgggacatgtgtccctctttgtctacgcgcaaaacttggaggcacaagttggcctcgattacattttcaccccgatgatcctccatttcgctgatggcgaaaggtacaagaacgtgaatataatgatcttggacgatgacatccccgagggagatgagaagtttcagttgattctaaccaacccaagccccggtctggagttaggtaagaacactatcgccctcattatagtgttggctaacgatgatggaccgggcgtcctatcattcaataacagcgagcacttcttcctgagagaacccaccgcattgtacgtgcaagagtctgtcgccgttttatatatcgtacgtgagcccgcccagggtctcttcggtactgtcacggtacagtttatcgttactgaggtaaattctagtaatgagtccaaggatctgaccccctccaagggctatattgtactggaagagggagtgcgatttaaagctctgcagatctcagccatcctggacaccgagccagagatggatgagtacttcgtgtgtaccctgtttaatccaaccggtggggcaagactgggcgttcacgtccaaaccctgatcacagtccttcaaaatcaggctcctcttggactgttctcaatatcggccgtggagaatcgagctacaagcatcgacatcgaggaggcaaaccgaacagtgtatttgaacgtgagccggacaaacggcattgaccttgctgtctccgtgcagtgggagactgtcagtgagacagcattcggcatgagaggaatggatgttgtcttttcagtgtttcagtcctttttggatgagtccgcaagcggctggtgcttctttaccctggaaaacttaatctatggtatcatgctgaggaagtcctccgtgacagtgtacagatggcaaggcatatttattccagtggaagatctgaacatagagaaccctaagacatgtgaggcctttaatatcggctttagcccatactttgtgatcacccacgaggagcggaatgaggagaaacctagcctcaacagtgtgtttacattcacatctggatttaagctttttttagttcagacgataatcattttagagtcctctcaagtgcggtatttcacctctgatagtcaggattaccttattatcgccagccagcgggacgacagtgagttgacccaggtgtttcgctggaatgggggatcatttgtgctccaccagaagctgcctgtgaggggcgtgctgaccgtggctttgttcaataaaggaggcagtgtctttctagcaatctctcaggctaatgcaaggttaaacagcttactcttccgctggagtggaagcgggttcattaactttcaggaagtgcccgtgagtggcaccactgaggtggaagccctcagctcagctaacgacatttatctgatttttgcggaaaacgtattcctgggagatcagaacagcatcgacatcttcatctgggaaatgggtcagagctccttcagatatttccagtcagtggatttcgccgccgtgaatcggattcacagttttactccggcatccggaattgcacatattctcttgatcggacaggatatgtccgcactgtactgctggaacagtgagcgaaatcagttcagttttgtactggaagttcccagtgcttatgacgtggcctctgtgaccgtgaaaagcttgaactctagtaaaaacctgatcgcactggtaggggcacatagtcacatctacgaattagcttacatcagttcacacagtgactttatcccaagctccggtgaactcatatttgagcctggggaacgggaggccacaatcgcagtgaacatactggatgacaccgtgcctgaaaaggaagaatctttcaaagtgcagctgaagaacccaaaggggggcgccgagatcgggattaacgacagcgtcacgattactattctttcaaacgatgacgcgtacgggatcgtggccttcgcccaaaactccctctacaaacaggtggaggagatggaacaggacagcctagtcactctcaacgtggaacgtttgaagggaacctatggccgcatcaccatcgcttgggaagctgatggatccatcagtgacatctttcctacaagcggtgtaatcttatttacagagggacaggtcctcagcactataaccttaactattctggctgacaatattccggaactatccgaggtagtaatcgtgactctaacacgcataaccaccgaaggtgtcgaagattcctataagggagccaccattgatcaggatcgcagcaagtccgtgattaccactctgcccaatgatagtccattcggcctagttggatggagagccgctagcgtattcatccgggtcgccgagcctaaagaaaacaccaccacactacagctacaaattgcgcgcgataagggactgctaggggacattgccatccaccttcgggcccagcccaactttctcttgcacgtcgacaaccaggctactgagaatgaggattatgttcttcaggagacaatcataatcatgaaagagaatataaaagaggcacacgcagaggtgagtattttaccagatgacctcccagagcttgaagagggcttcatcgtgactatcaccgaagtcaatttagtgaactccgattttagtacagggcagccttcagtccggcgtccaggtatggagattgcggaaattatgattgaggaaaatgatgatccacggggaatcttcatgttccacgtgacaaggggggcgggggaagtaattaccgcttatgaagttcctcccccactcaacgtccttcaggtcccagtggtgaggctcgctgggagctttggtgctgtcaacgtgtattggaaggcaagtcccgactcagccggactcgaagactttaaaccctcgcacggtattcttgagtttgcagataaacaggtgaccgcgatgatcgaaattacaatcatcgacgacgccgagtttgagctgacagagacatttaacatcagcctcatttctgttgcaggaggaggacgcctcggggatgatgtcgtggttacggtcgtcatacctcagaacgattctccctttggtgtgtttggctttgaggagaagacggtgatgatcgacgagtcgctgtccagcgacgaccctgattcttacgtcaccctgacggtggttaggtctcctggtggaaaaggcacagtgcgacttgaatggacaatagacgagaaggctaaacataacctttctccactaaacggaacgttgcacttcgacgaaactgaatctcaaaaaactatagtactgcacaccctgcaggatacagtattggaagaggaccgccggttcactatccagttaatctctatcgatgaagtggagatatcacccgtcaaaggctctgctagtataattattcggggtgataagagagccagcggagaggttggcatcgcgccatcttcaagacatatcctgattggggaaccttccgctaagtacaacggcactgcaatcatttctttagtgcgaggccctggtattctcggggaggtgaccgtgttctggagaatatttccaccgagcgtaggggagtttgcagagacaagtggtaaactgaccatgagggacgaacagagcgcagtgatcgtagtcatccaagctctcaacgatgacatccccgaagagaaatcattctatgaattccagctgacagcagtctcagagggaggggtgctgtcagagtcttcatccactgctaatatcaccgtggtcgccagcgactcaccctatggtcggtttgccttctctcatgagcagctgcgagtgagcgaggcccaaagggtgaacatcacaatcatccggagttccggcgactttgggcacgtccggctctggtacaagactatgtcagggactgcagaggctggattggattttgtcccggcagctggggagttgctcttcgaagccggggaaatgcgcaagtccctgcacgtggagattcttgatgacgattaccccgagggacccgaagagttctctttgacgataactaaagtcgagctacaaggccgagggtacgactttactatccaagagaacggactccagatcgaccagcccccggaaattggaaatatttctatcgtgcgaataattataatgaaaaacgacaatgctgaagggattatcgagttcgatccaaaatacacagcattcgaggtggaggaggatgtaggcctgatcatgatccctgtagtgaggcttcacggaacatatggttacgtgaccgccgactttatcagccagtcaagttctgctagtcccggcggggtggattacatactgcatgggtcaacggtcacgttccagcatggacaaaatttatcattcatcaacatctctatcatcgatgacaacgagtccgagttcgaagaacctattgagattttactcacgggggctactggaggtgcagtcctggggagacacctagtgtctagaattatcatagcaaaaagcgactcaccctttggcgtcattcgatttcttaatcagtccaagatctcaattgcgaatccaaattcaacgatgatcctgagccttgttctggaacgaacagggggactcctgggcgagatccaggtgaattgggaaacagtgggccccaacagccaggaagctctgctgcctcagaatagggatatagcagacccagtttctgggctgttctactttggggaaggggagggtggcgttcgcaccataatcctaacaatctacccccacgaggaaatagaagtagaggaaacgtttatcattaaacttcatcttgtgaaaggtgaggccaagttggacagccgggccaaggacgtgactttgactatccaggagtttggggaccctaatggggtggtgcaatttgctcctgagaccttgagtaaaaaaacgtacagcgagcctctggctctggagggacccctgttaatcacattcttcgtgaggagggtcaagggtacgttcggtgaaatcatggtctactgggaattaagctctgagtttgacattacagaagactttttgtccacctcaggattttttaccattgccgacggtgagtccgaagcctcctttgacgttcatctgcttccagacgaagtgccagagattgaggaggactacgtgatacagttggtgtccgtggaaggcggcgctgagcttgacctggagaagtcaatcacctggttctcagtttatgccaacgatgacccacacggcgtcttcgctttgtactctgatcgccagtccattctgataggtcagaatctcatcagaagcattcagataaacataacacgcctcgccgggacatttggggatgtagcggtgggtctgcgcattagcagtgaccacaaggagcagcccattgtgacagagaatgccgagaggcagctggtggtgaaggacggggcaacatacaaggtggacgtcgtgcctataaagaaccaggtgtttctgtctttggggtctaattttacgctgcaactggtcacggtcatgctcgtagggggccggttctacgggatgccaacgatcctgcaggaggccaagtcagctgtgctgccggtgtctgaaaaggctgcaaactctcaagtgggtttcgagtctaccgcctttcagctgatgaacatcaccgctggtacttcacacgtgatgattagcagaagaggcacctatggggccctcagcgtcgcctggacaaccggctacgctccgggcctcgaaatccctgaatttatagtagtcggtaacatgacacccacgcttggaagcctttcttttagccacggcgagcaacgaaagggcgtattcctgtggacctttccaagccccggctggcccgaagcctttgttctgcacttgtcaggagtccagtcgagtgctcccggcggagcccaactgaggagcgggttcatcgttgctgaaatcgaacccatgggagtttttcagttttccacatcctcccgtaacattatcgtgtcggaggacacccaaatgatacgactgcacgttcagcgcctcttcggattccattctgatttaatcaaggtcagttaccaaacaacagccggaagcgcaaaaccactggaggacttcgagccagtacaaaacggcgaacttttcttccaaaaatttcagaccgaagtagacttcgagataacaatcattaatgatcagctctcagaaatcgaggaatttttttacattaatctaacttctgtcgaaatccggggtttgcagaagtttgacgtcaactggtcaccccggctgaacctggatttctctgtggctgtaattaccatcttggacaacgatgacctcgcaggaatggatataagcttcccagaaaccacagttgctgtggcggtcgataccacattaatccctgtagagactgaatccacaacttacctgtccactagtaaaacaactacgatacttcagcctacaaatgtagtcgcaattgtaacggaagctacaggggtcagtgccatcccagagaagcttgtgacgcttcacggtacccccgctgtatcagagaagcccgatgtcgccactgtcactgctaatgtttccattcacggcacattttcgctggggccatcgatcgtctacattgaagaggagatgaaaaatgggactttcaatactgccgaagtcctaatacgccgcaccggagggtttaccgggaacgtgtctattaccgtcaaaactttcggcgaacgctgcgcccaaatggagccaaacgccctcccatttcggggtatctacggcatttctaatctgacatgggccgttgaggaggaggactttgaagagcagacccttaccctgatatttctggatggagagcgagagcgcaaagtatcagtgcagatcttggatgatgacgagcctgaaggtcaggaattcttttacgtgttcttgacaaacccccagggaggcgcccagattgtggaagagaaggatgatactggctttgcagctttcgctatggttatcataacaggatctgatctccacaacggtattattggcttcagcgaggagtcgcagtctggtttagagcttcgcgaaggggccgtgatgcgcagactccacctcatagtaacacgccagccgaatagagcctttgaggacgtgaaggttttctggagggttactctcaacaagaccgtggtagttttacagaaggatggcgtcaaccttgtggaggagctgcagagcgtctctggcaccacaacttgtaccatgggccaaactaaatgttttatatccattgagttgaaacccgagaaggtgccgcaggtcgaagtgtacttcttcgtagagctctacgaggctactgctggcgctgcgattaataattcagcgcgctttgcgcagatcaaaatcttggagtccgatgaaagccagagcctagtatacttctcagtcggttcacgcctggccgtcgcccataaaaaggccacacttatctctcttcaagttgcgcgggactctggcacaggcctcatgatgtctgtgaacttttcaacacaggaactgcgatccgcagagacaatcggaaggactattatatctccagctatatcaggaaaagacttcgtgataacagagggcacactggtgtttgaacctggtcagagatccaccgtgttagatgttattctcactccagagacgggttcactcaattcattcccaaagaggtttcagattgtgctgtttgaccccaagggcggcgcacggatagacaaagtgtatggcaccgccaacataaccctagtgagcgacgccgattctcaggctatctggggcctcgcagatcaactgcaccagccagtaaatgacgatattctcaatagggtgctccatactatctccatgaaggtggccacagagaataccgatgaacagctgtctgccatgatgcatttaatagaaaagataactacagaggggaagatccaggcctttagcgtggccagtcggactttgttttacgaaattctgtgctccctgatcaatcctaagcgcaaagatacccgcggtttttctcacttcgccgaggtaacagaaaactttgcattcagtctgttaaccaatgtcacctgtggcagcccaggcgagaaatctaagacaatcctcgatagctgcccatacctcagtatattagccctgcactggtatccacagcaaataaacgggcacaagttcgaaggcaaggagggcgactatatcaggatcccggagagactcctggatgtgcaggacgccgagatcatggccgggaagagcacatgcaaactcgtgcagttcacagagtactccagtcagcagtggttcatctccggtaacaatctacccaccttgaagaataaggtcctgtctctttctgtaaaggggcagagctcccagctgctcactaatgacaatgaagtgctgtacagaatctacgcagccgaaccccgcattataccacagaccagcttgtgcctcctgtggaaccaagccgccgcatcttggctctccgattcacagttttgcaaggttgtggaagagactgcagattatgtggaatgtgcgtgttcacatatgtctgtgtatgcagtgtatgcgcgtaccgacaatctgtcatcttacaacgaagccttctttacctctgggttcatctgcatatccggcctctgtctggccgtcctctcacacatcttctgtgcacgatactctatgtttgccgccaaacttttgacccacatgatggcagcatcgctcggcacgcaaattcttttcctggcctctgcgtatgcttcgccacagctcgccgaggagtcgtgcagcgctatggcagctgtgacccactacctgtatctttgtcaattctcctggatgctgattcagagcgttaatttttggtacgtgctggtcatgaatgatgagcacacggaaaggagatacctccttttttttctcctttcgtggggtcttccagccttcgtcgttatcctgctgatcgttattctgaaaggtatctatcatcagagcatgagccagatctatggcctgatccacggcgatctatgcttcatccccaatgtgtatgctgcgcttttcactgccgctctggtgccgttaacttgcctggtggtcgtcttcgtggttttcattcatgcctatcaagttaaaccccagtggaaggcctacgatgacgtttttcgcggcaggacaaatgccgctgaaataccgcttatcttgtatctttttgcccttatttctgtcacttggctatgggggggcctgcacatggcgtatcgtcacttttggatgctggtgctctttgtgatctttaattccctgcagggactttacgtcttcatggtgtatttcatcctgcataaccagatgtgctgccctatgaaggccagctacactgtggagatgaacggacatccgggtccctccaccgcattcttcacccctggcagtggcatgcccccggccgggggcgagatctcgaaaagtacgcaaaaccttatcggcgccatggaagaggtgccacctgactgggaacgggccagcttccaacagggctctcaggcttctccagatttaaagccgtctccccaaaatggagctacttttccctcaagcggcggctacggacagggatccctaatcgccgacgaagaatctcaagagtttgacgatcttattttcgccctgaaaactggcgctggtctgagcgtctccgacaatgaatccggacagggttcacaggagggagggaccctgactgacagccagattgtcgagcttaggaggatccccatcgctgatacacatctgtag

SEQ ID NO: 188708 - DNA, 6921 bp, synthetic construct
  misc_feature 1..6921: note = Description of Artificial Sequence: Synthetic coding sequence
  source 1..6921: mol_type = other DNA
gtggacgtgttcatgttcctgggcatgcccagcgccagcctgctggtaaatttattgtcggcactcctcattctcttcgtgtttggggaaactgagatcagatttaccggccaaaccgagttcgtggtgaacgagacctcaactaccgtcatccgattgatcatagagcggatcggtgagccagccaacgtcactgctatcgtctcactgtatggggaggacgcaggcgatttcttcgatacctacgcagcagccttcatcccggccggtgaaacaaatagaactgtgtacattgcagtatgcgacgacgacctcccagaaccagacgaaactttcatcttccaccttacattacagaagccatccgcaaatgtgaagctcggttggccgcgaactgtgacagtcacgatcttgagcaacgataacgcctttggtataatcagtttcaacatgctgccctcgatcgctgtttccgagcctaagggccgaaacgagagcatgccgctgaccctgatcagggaaaagggcacgtatgggatggtgatggtcaccttcgaggtggagggtggacccaacccccccgacgaggacctctctcccgtcaaggggaacatcaccttcccgcccggccgcgccaccgtgatatacaacctgaccgttttagatgatgaagtgccggagaatgacgaaatctttttaatccagttaaaaagtgtggaaggcggtgcggagattaacacaagccggaacagcatcgaaataatcataaaaaagaatgattcaccagtaagatttctgcagtctatatacctcgtccctgaagaagatcatatcctcatcatacctgtcgtccgcggcaaggacaataatggcaacctcataggcagcgatgagtacgaagtttccatctcttacgccgtgactacggggaattctacagcacacgcgcagcaaaatttggacttcatcgacctgcagcctaacaccacggtcgtctttcccccttttatacacgagagccacctaaagtttcagatagttgatgacacaatcccagagattgcggagtcttttcacattatgctgctgaaggacacactccagggggacgcggttctcatttccccaagcgtggtgcaagtgaccataaagcctaacgacaaaccatacggggtcctatccttcaattctgtactatttgagcggacggtgattatagacgaagatagaatctcccgctatgaagagataacagtggtacgcaacggtggtacacacggcaacgtgagtgcaaactgggtgttaaccagaaacagtaccgacccttctcccgtgactgccgacattcgcccgtccagcggagtgctccatttcgctcagggtcaaatgttggcaaccattcccttaaccgtcgtggatgacgacctgcctgaagaagcggaggcttatcttctccaaatcctcccccacactattcgggggggggctgaggtgagcgaaccagcagagttgctgttttatatacaggactccgacgacgtctatggcctgattactttcttccctatggagaatcagaaaatagaatcatctccgggcgaaaggtatctttcactgagctttactaggttgggaggtaccaaaggcgacgtgcgtttactgtatagcgttctttacatacccgctggtgccgtggatcctctccaagctaaagagggcattcttaacatctccagaagaaatgacctgatctttcccgagcagaagacccaggtaaccacaaagctgccaatacgtaacgatgcttttctccagaacggagctcacttcctcgtgcagttggaaactgtggaattgctcaacatcattcctcttatcccaccaatcagcccgagattcggcgaaatttgcaatatcagtctgctcgtgacaccagccatcgctaatggggaaattgggtttctgtcaaatttaccaatcattctccatgaacccgaggatttcgccgccgaagtggtgtacattcctctgcatcgggacggcacggatgggcaggcaacagtctactggtctctcaaaccttcaggcttcaactcaaaagctgtgacacctgatgacatagggccttttaacgggagcgttcttttcttgtccgggcagtctgacacgacaattaatataaccatcaaaggagacgatatccccgaaatgaatgagactgtgactctttcacttgatagagtgaacgtagaaaaccaggtcctcaagagcggctacaccagccgggatctcattattctcgaaaatgacgacccaggcggggtctttgagttctcacccgctagtagggggccatatgtcatcaaagaaggagagtcagtggaactgcatatcataaggagtagaggaagcctcgtgaagcaattcttgcattatagggtagaaccaagggacagcaatgaattctacgggaacacaggagtgctggaattcaaaccaggcgaaagggagatagtcattaccctcttagcaagactcgacggtatacccgaactcgacgagcactattgggttgtactgtcctcgcacggcgaacgggagtctaaactcggcagcgccaccatcgttaacataaccattttgaagaacgacgacccgcacggtatcatcgagtttgtttctgacggactgatagtcatgattaatgagtcaaagggcgacgctatttatagtgcggtctatgacgtcgtccgcaatagaggcaatttcggagacgtttctgtgtcatgggtggtgagcccagactttactcaggacgtatttccagtccaaggcactgtcgtcttcggagaccaggagttcagcaaaaacataaccatctactctctcccggacgagattccagaagagatggaggagttcacagttattctgctcaacggaacaggtggcgccaaggttggaaataggacaaccgccactcttaggattcgccggaacgacgatcctatatactttgcagagcctcgggttgtcagagtgcaggagggcgagaccgcgaacttcacagtgctcaggaatggttctgtagacgtgacatgcatggtccagtatgccaccaaagatgggaaagctacggctcgagaacgggattttattcccgtggagaaaggcgagaccctaatattcgaagtgggatctagacagcagagtatctctatcttcgtcaatgaagacgggattccagaaaccgatgaacccttttatattatccttctgaacagcaccggtgatactgttgtttatcaatacggggttgcaaccgtgattattgaggccaatgatgaccccaacggtatattttccttggagccaatcgacaaagctgtcgaggaaggaaaaaccaacgccttttggatcctcagacatcggggttattttgggtctgtgtctgtgtcttggcaactctttcagaatgactcagcactccagcccggacaggaattctacgaaacatctggaaccgttaatttcatggatggggaagaggccaagcctatcatcctgcacgctttcccagataagatcccagaattcaatgagttttatttcctgaagctggtgaacatttcaggcggctcacctggtccagggggccagctagccgaaactaacctgcaggttaccgttatggtcccttttaatgatgatccttttggtgtcttcatcctggaccccgaatgtctggagcgcgaagtggcagaagacgtgcttagcgaggacgatatgtcgtatattaccaacttcaccatcctgcgacagcagggggtgtttggggatgtgcagctgggctgggaaatcctatcctcagagtttcccgctggtcttccgcctatgatcgactttctcctggtcggtatattcccaaccaccgtgcatctccagcagcacatgcgaaggcaccattcaggaaccgatgctctttacttcactggtctggaaggagcttttggaactgttaatccgaaataccatcctagcagaaacaataccatcgccaatttcaccttctctgcctgggtaatgcccaacgcaaacaccaatggttttataatagccaaggatgacgggaatggcagtatctactacggcgtcaagatacagacaaatgagtcgcatgttaccctgagcttgcactacaagacgctggggagtaatgctacatacatcgcaaaaacaacagtgatgaaatacctggaagagtccgtttggctccaccttctcattattctggaggacgggattattgaattctacctggatgggaatgctatgcctcgcgggattaagtctctcaaaggagaggccattactgacggccccggcatcctgagaataggcgcaggaatcaacggcaacgatcgattcacggggctgatgcaggatgtacgcagctatgaacgcaagcttacacttgaggagatctatgaactacacgccatgcctgccaagtctgacctccatcctatatccgggtatctggagtttcggcagggtgaaactaataagagttttatcatctccgcgcgggatgacaatgatgaggaaggtgaagaactatttatcctgaagctcgtgtcagtatacggtggcgccaggatctcggaggagaacacaactgctcggctgaccatccagaagagcgataatgccaacggacttttcggttttactggggcgtgcattccagagatagccgaggagggaagtaccataagctgtgtggtcgaaaggactcgcggcgctctcgattacgtacatgtcttttacaccatctcccagatcgaaactgacggaattaattacctggtagatgactttgcaaatgcttctggaaccatcacctttctgccatggcagcgctctgaagtgctgaacatctacgtcttggacgacgatatccctgaacttaacgagtattttcgtgtgactttagtgtcagctatccccggtgatggcaagttgggtagtacacccacttcgggggcctctattgatccagagaaagaaacaaccgacataacaatcaaagcctctgaccatccatacggacttctccaattctctaccgggctgcccccacagcctaaagacgcaatgaccctcccggcatcatcagttccacacattactgtggaagaggaggatggggagatccggctgctggtaatccgcgcacagggtctattaggccgtgtgaccgcagagtttcgaaccgtgtcgctcacggccttttcacctgaagactaccagaatgtggctggcacactagagtttcagcctggagaaagatataagtatatctttattaatattactgacaacagcatccctgaattggagaagtcatttaaagtggagctgctgaacttagaaggcggagtcgcggaactctttcgggtagacggaagcggatctggggatggggatatggagttcttcctgccaaccattcataagcgtgccagtttgggtgtcgctagtcaaattctggttactatcgctgcctctgaccacgcccacggtgtcttcgagttttctccggagagtctcttcgttagcggcaccgagccagaagacggctactccactgtaacgcttaacgtgatccggcatcacggcactctgtccccagtgaccctgcattggaatatcgacagcgatcccgatggggatcttgccttcacctctggaaatattacttttgagatagggcagaccagtgccaacataaccgtggaaattttgcccgacgaggatcctgaactggataaagccttttccgtgagcgtgttgagtgtgtcctcaggctctctgggcgctcatataaacgctaccttaaccgtcctcgcttcagatgatccatatggcatttttatattcagcgagaagaaccgtcctgtgaaggtcgaagaggctacgcagaacattactttaagcatcataaggctcaaggggctgatgggcaaggtgttggtgtcctatgctacccttgatgatatggaaaaaccaccatatttcccgcccaacttggcgagggccacgcagggccgggactacataccagccagcgggttcgccttattcggggccaaccagagcgaagccactatcgcgatatctattcttgatgatgatgagcctgaacgatcagagagcgtgtttatcgaacttcttaactccactcttgtggccaaggtgcagtcccgatctatcccaaacagcccccggctgggacccaaggtcgaaaccatagctcaactgataattatcgccaacgacgacgccttcggcacgctccaactatccgcccccattgtccgcgtcgcggaaaaccatgttggacccatcattaacgtcactaggactgggggagcatttgccgatgtctcagtcaagttcaaggccgtccccattacagccattgctggtgaagactactcaatcgcttcttcagacgttgttcttctcgaaggtgaaacctcaaaggcagtcccaatctacgtaataaacgacatctaccccgaattggaagagtccttcttggtgcaattgatgaatgaaaccaccggcggtgctcggctaggcgccttaaccgaagcagttattatcatcgaggctagcgatgatccgtacgggttgttcgggtttcaaatcaccaagttgattgtggaagagcctgagttcaattcagttaaggttaatttgcccatcatcaggaattcaggaactctcggcaatgtcactgtgcagtgggtcgccaccatcaacggccagttggccactggggatttacgagttgttagtggcaatgtgactttcgcccccggcatgtcctcatatccttctgctactaactag

SEQ ID NO: 188709 - DNA, 18921 bp, synthetic construct
  misc_feature 1..18921: note = Description of Artificial Sequence: Synthetic coding sequence
  source 1..18921: mol_type = other DNA
atgagcgtgttcctgggccccggcatgcccagcgccagcctgctggtgaacctcctttccgcactgctgatcctgtttgtcttcggcgaaacagagatccgtttcaccgggcagaccgagttcgtggtgaacgaaacaagcacaacagttatacggttgattatcgaaaggataggcgagccagcaaacgtgacagccatagtgtccctgtatggggaagacgcaggcgacttcttcgatacttatgccgccgcttttatccctgctggcgaaacaaatagaaccgtttacattgccgtgtgtgacgacgacctgcccgagccagacgaaaccttcatctttcacctgacgttacagaaaccttccgccaacgtcaagctgggatggccccgcacagtaacagtgactatcctgtcaaacgacaacgctttcggtattattagtttcaatatgttgcctagcatcgccgtgagcgagcccaagggccgtaacgagagcatgcctctgacgctaatccgtgaaaagggcacatatggaatggtgatggtgactttcgaggttgaagggggcccaaatccgcccgatgaagatctaagtcctgtcaaggggaatatcacttttcctccaggtcgcgccacggtgatctataacctcacggtgctagatgatgaagtgcccgagaacgatgagatcttcctgatccagttgaagagcgtggaggggggggctgagatcaacacctccagaaactccatcgaaatcattattaagaagaacgacagcccagtacgattcctgcagagcatttacttagtccccgaagaggatcacatcctaatcataccagtggtgcgaggaaaagataacaatggcaacctcataggctccgatgaatacgaggttagtatctcttacgcagtgacaacggggaactcgacagcacacgcccagcagaacctcgatttcattgacttgcaaccaaatactactgttgtatttcctcccttcattcatgagtctcacctgaaatttcagatcgtggacgatacaattcctgaaatcgctgaatctttccacatcatgcttttgaaggacacactgcagggcgacgccgtcctgatttcacccagtgtggtacaggtcaccattaagcctaacgacaagccatacggagtgctctctttcaactccgttttatttgaaagaacagtgattatcgacgaggaccgcattagccgatacgaagaaatcaccgtggtgagaaacggcgggacgcacgggaacgtgtctgccaattgggtactgactcggaattctacagatccttctcctgtgacagccgacattcggccctccagcggcgtccttcacttcgcacagggacagatgctcgcaaccattcccttgacagttgtggacgacgatctgcccgaggaggccgaggcttacctgctacagatacttcctcacactatccgtggcggcgcggaggttagcgaacctgcagagttgctcttttacattcaggatagcgacgacgtgtacgggttgattacgttttttccaatggaaaatcaaaaaatcgaaagttctcccggggagaggtatctgtccctgagctttacacgtttgggcgggactaagggggatgttagactcctatatagcgtgctctacattccagctggtgccgttgacccattgcaggccaaagagggcatcctcaacatttctcgccggaatgatctcatttttcctgagcaaaagactcaggtcactacaaaattgccaattcggaatgacgcttttcttcaaaacggggcccacttcctggtgcagctggaaaccgtggagctgctaaatattattcccctcatcccaccaatctccccgcgtttcggtgaaatctgcaatattagtctgcttgtaacacccgccatcgccaacggcgagattgggtttcttagcaatctgcccatcatactgcacgaacctgaagacttcgccgccgaagttgtctacatccctttgcatcgggacggcaccgacggtcaggccaccgtgtactggtccctgaaaccctcaggcttcaactccaaagccgtgacacctgatgatattggacctttcaacggttcagttctgtttctgtctgggcagagcgacaccaccattaatattaccattaagggtgacgacattcccgaaatgaacgagacagtgaccctttcgcttgatcgggtaaatgtcgaaaatcaagtattgaaatctggatacacaagtagggacctcataatactggaaaatgacgatccaggaggggtattcgagttctcacctgcaagcagaggaccctacgtgattaaggaaggcgaaagcgtggagctccacatcatccgcagccggggatcactagtgaaacaatttctgcactaccgtgttgaacctcgagacagcaacgaattctatgggaatacaggcgtcttggaatttaaacccggggagcgcgagattgtgatcaccctgttagcccggctagatgggatcccggagttggacgaacactattgggtcgtattatcgtctcatggcgagcgggagagcaagctggggtcagctacaattgtaaatattactattttaaagaatgacgacccccatgggatcattgagttcgtgagcgacggactaattgtgatgatcaatgaatcgaagggcgacgccatctatagcgccgtgtatgatgtggtgaggaatcgcggaaacttcggcgacgtgagtgtaagttgggtggtgagtcctgactttacccaagacgtgtttccagtccaaggaaccgtcgtatttggtgaccaagagttttccaagaacatcactatctacagtttgcctgacgagatccctgaagagatggaggagtttacagtgatccttctcaatggcaccggaggcgcgaaagtgggcaaccgcactactgctactctgcggatcagaaggaatgatgaccccatctatttcgcagagccccgcgtggtgcgtgtccaggaaggtgagactgctaatttcaccgttctgcgcaacggctctgtcgacgttacatgcatggtccagtatgccactaaagatggaaaggcgaccgccagagagagagactttattcccgttgagaaaggggaaaccctgatctttgaagtggggagtcggcagcaatcaatcagcatcttcgtgaacgaagacggcatcccagaaactgatgaaccgttttacattatactgcttaattccaccggagatacagtcgtgtaccagtatggcgtcgctacagtgatcattgaagcaaatgatgaccccaacggaatattcagtttggaacccatcgataaagccgttgaggagggaaagactaatgctttctggatcctgcggcaccgaggttacttcggctcagtatcagttagctggcaactcttccagaacgatagcgcattgcagcccgggcaggagttttacgaaacatcaggtaccgtgaatttcatggatggcgaagaagctaagcctatcatcctgcacgcctttcctgataaaatcccggagtttaatgagttctatttcctgaaattggtgaacatctcaggtgggagccccggccccggaggccagctggccgaaacaaacctgcaggtgacagtgatggtgcccttcaacgacgaccctttcggcgtcttcattctggaccctgagtgcctcgagcgggaagtggccgaagatgtgctgtctgaagacgatatgtcctatattacaaattttacaatcctgcgacagcagggagtcttcggcgatgttcagctgggttgggagatcctttcatccgaatttcccgctggtctccctcccatgattgattttcttctcgttggaatcttccccactacggtccatctccaacagcatatgcggcggcaccactccggaactgatgctctgtattttaccggtctggagggcgcatttgggactgtcaatcccaaataccatccgtctaggaacaacacaatcgctaattttaccttcagcgcttgggtcatgcccaatgcaaacaccaacgggtttattatcgccaaagacgacggaaacggatccatttattatggcgtcaagatacagacaaacgagagccacgtgaccctctctctgcattataagactctgggctcaaacgctacctacatcgcgaagaccacggtgatgaagtacttggaagagagcgtttggctccacctgcttataattctggaggatggaatcatcgagttctacctcgatggcaacgccatgccaaggggcattaagtccctcaaaggcgaagcgatcaccgacggtccaggcattcttcgaattggggccgggatcaatggtaacgacaggttcactggactgatgcaggacgttaggagctatgagaggaaactcaccctggaagagatttacgagcttcatgctatgccagcaaaaagcgacctgcaccctatcagcggctatctggaatttcgacagggagagactaataagagcttcataatctctgcaagagatgacaacgacgaagagggcgaggaacttttcatcctgaagttagtcagtgtatatggcggtgcccgtatttcggaggagaacaccaccgcccggcttactatccagaagagcgataatgcaaacgggctttttgggtttacaggtgcatgcattccagagatcgcagaggagggaagcacaatatcatgtgtcgtggagcggactagaggcgccctggactatgtccatgtgttctacactatatcacagattgagaccgacggcatcaattatctcgtggacgactttgccaacgcttctggaaccatcacttttctcccctggcaaagatcagaggtcttgaacatctacgtgctggacgacgatatccctgagctgaacgagtacttccgagtcactcttgtgtcagcaattcctggtgatggaaagctgggaagcacaccaacatctggtgcatcgattgaccctgaaaaggaaactactgatatcacgatcaaggcctctgatcacccctacggactcttgcagttttccactggacttcctccacagccaaaggatgctatgacgttacctgcttcatccgtgcctcacatcacagtggaggaggaggacggagaaatccgactcctggtgatcagagcacaggggttgttaggtagggtgacggcagaattccgcacagttagtttgaccgcattcagtcccgaggattatcagaatgtagcaggtactctggaatttcaacccggagagcgttacaaatacattttcatcaacataactgacaactccatccctgagctggagaaaagtttcaaagtggaactcctgaacctggaaggcggggtggccgagctattccgagttgatggttctgggagtggggatggcgatatggaatttttcctgccgaccatccataaacgggcttccctgggcgtggcctcccagattctggtaacaatcgcggcaagcgaccatgctcacggggtgtttgagttctcacccgagtctctgttcgtctccggcaccgagcccgaagacggctatagtacggtaaccttaaacgtaattcggcaccatgggacactttccccagtgactctacattggaatatcgattcagatccggacggtgatttggcattcacttccggaaacatcactttcgagattggccagacttctgctaacattactgtggagatcctacccgacgaggatcctgagcttgataaagcgttctccgtctctgtgctcagcgtttccagtggaagcctgggcgcccatatcaacgcaaccttgacagtgctggcctccgacgacccgtacggaatttttatattcagcgagaagaacaggcctgtaaaggtggaggaggccacccaaaacatcaccctgagcatcatccgactgaagggcctgatggggaaggtcctcgtaagctatgcaacattagacgacatggaaaaacccccttattttcctcccaacctggccagggcaacacaaggtagggactatattcccgcctctgggtttgcactttttggcgctaaccagtccgaggcaacaattgccatctctatccttgacgatgatgagcctgaaaggagtgaaagcgtgtttattgagctgctgaattctacgttagtggccaaggtacagtcacgaagcatcccaaatagcccaagacttggtccaaaagtggaaacaatagcacagttgattatcatcgctaacgatgatgccttcggcacgctgcagctgtcagcgcctatcgtcagagtggcagagaatcacgtgggtcctattatcaacgtcaccaggactggcggcgcctttgcagatgtgagcgtgaagttcaaggcagttcccataaccgccatcgctggagaagactacagtatcgcctcttctgatgtggtgttactggagggagagacctcaaaagccgtgcctatctatgttattaacgatatatacccagaactggaggagagcttccttgtccagctcatgaacgagacaaccggcggcgctaggttaggtgcgttaacagaggccgtcatcattatagaagcctcagacgatccatacggattatttggcttccagattactaaattgatcgtcgaggagcccgagtttaacagcgtcaaggtcaatctgcctattatccggaacagcggaacactgggcaatgtcactgtgcagtgggtggctactattaatggacaactggccactggggacctgagggtagtgagcgggaatgtcacattcgctcccggagagacgatacaaacactactcttagaggtgctcgcagatgatgtgcccgaaatcgaagaggtaattcaggtccagctcacagatgcaagtggcggaggaacaattggcctcgatcggatcgctaacataatcattcctgccaatgacgacccctatggaactgtggcttttgcacagatggtttacagggtgcaggaacccctcgaacggtcctcttgcgctaacattactgtgaggcgaagcggggggcatttcgggagactgctgctgttttatagtacctcagacattgacgtcgttgccttagcgatggaggagggacaggatctcctttcatactatgagtcaccaatccagggagtgccagaccctctgtggaggacctggatgaacgtaagcgccgtgggcgagcctttatacacatgtgccaccctatgtctgaaggaacaggcatgttctgctttttcatttttctctgccagcgaaggcccacaatgtttttggatgacaagctggattagtccagccgttaataattccgatttctggacctaccgcaagaacatgacccgcgtggcatccttattctcagggcaagctgtggctggttctgattatgagccagtgacgcgacaatgggcaatcatgcaagagggcgacgagtttgctaacctcactgtcagtatcctgccagacgacttccctgagatggatgaatccttcctcatttcactgttggaggtgcacttgatgaacatcagcgcttcactgaagaaccagcctacaatcgggcagccgaacatctctaccgtggtgatcgctctgaatggagatgccttcggcgtttttgtgatatataacatttccccaaataccagcgaggacggactctttgtcgaggtgcaggagcaaccgcagacactggtggagctgatgatacatcgcacggggggttctctggggcaggtcgctgtcgaatggcgggtggtaggtgggaccgccaccgaaggtcttgatttcatcggagcaggggaaattctgacctttgctgagggtgaaacaaaaaagacggtgattctcacaattctcgatgacagtgagcctgaagacgacgaatcgatcatcgtgtcattagtctacacagaggggggatccaggatcttacccagcagcgacacagtcagggtgaacatactcgctaacgacaacgtggccgggatagtctctttccagacagcttccaggtccgtcatcgggcacgaaggcgaaatactgcagttccacgtcattagaactttcccaggacgtggtaatgttaccgtgaattggaagattatcggtcagaatcttgagctcaacttcgccaatttttcggggcaattattttttccagaggggtcactgaatactacgctgttcgtacacttgctcgatgacaacattcctgaagaaaaggaagtgtatcaagtgatactatatgacgtgagaacacagggggtgcctcctgccggaatcgcgctgctggacgctcaggggtatgcggcagtcctgaccgtcgaggccagcgatgaaccccatggagtattgaactttgctttgagtagtagatttgtgctgcttcaggaagcgaacatcactattcagctgttcatcaaccgagagttcggctccctgggggccatcaatgttacatataccaccgtccctgggatgctttcactgaaaaaccagacagtagggaatctcgctgaaccagaagtcgattttgtacctatcattggcttcttgatcctggaggaaggcgaaaccgctgccgccattaatattaccatactcgaggatgacgtcccggaactggaagaatactttcttgtgaaccttacatacgtggggctcacaatggccgcgtcaacgtctttcccaccacgactggattctgagggactgacagcccaggtcattattgatgctaatgacggggcccgcggtgttatagagtggcaacaatccagattcgaggttaatgagacccacggttccctgacactggttgctcaaaggtccagggagccgttggggcatgttagcctgtttgtgtacgcccagaacctggaggcgcaggttggacttgattacattttcacccccatgattcttcattttgcagacggcgagcgatacaagaacgttaacatcatgatactggacgatgacatacccgaaggtgacgaaaagtttcaactgattctcacaaacccctcacctggcctggagctcgggaagaacacaatagccctgattatagtgctcgccaacgatgacgggcccggcgttttatcatttaataatagcgaacacttcttcctaagggaaccgaccgcactgtatgtccaggagtcggttgcagtgctgtatattgtaagagagcccgcccagggtctgttcgggaccgtaacagtccagtttatcgtgacggaagtcaactcttccaatgagtccaaggatctaacaccgagtaaagggtatatcgttctggaggaaggggtgcgtttcaaggctctgcagatttccgctatcctggacaccgagcccgaaatggatgagtacttcgtttgcaccctcttcaatccaacgggcggagcacgactcggcgtccacgtgcagaccttgattactgtcctgcagaatcaggccccactcggcctcttcagtatatccgcagttgagaatcgagcgacctctatcgatatagaggaggccaaccgaacagtatatctcaatgtatctcggactaatgggatcgatctggccgtctctgtgcagtgggagacagtttctgagactgctttcggaatgcgcgggatggatgtcgtgttcagcgtgtttcagtcattcctggatgaatcagcttctggatggtgctttttcactttggagaacttaatctacggaatcatgctgcgtaagagctccgtaaccgtgtatcgatggcagggcattttcatacccgtggaggacctaaacatcgaaaatcctaagacgtgcgaagcttttaacatcgggttcagtccctatttcgtgatcacccacgaggaaagaaacgaagaaaaaccctccctgaattccgtctttacattcacatcggggtttaaattgttcctcgtccaaacaatcattatcctggagagcagtcaggtcagatactttacatccgatagccaagactatctgatcatcgcaagccagcgagatgattccgagctgacccaggtcttccgatggaatgggggaagcttcgtactgcatcagaagttgccagtccgtggagtcctgaccgtggccttgtttaacaaaggaggatctgttttcttggctattagccaggccaacgcccggctgaacagcctcctctttcgctggtccgggtccggattcatcaactttcaagaagtacccgtctccggaaccactgaggttgaagcactgtcaagcgctaatgacatatatctgatttttgcagagaatgtgtttcttggggatcaaaatagtatcgatattttcatttgggagatgggccaaagctccttcagatacttccagagcgtggactttgccgcagtcaatcgcattcactccttcacaccagccagtggcattgcccacatcctcctaatcggacaggacatgagtgccctttactgttggaattctgaacgaaatcaattttcttttgtgctggaggtcccttccgcatacgacgtggccagcgtcacagtgaaatccctgaatagttccaaaaatttaatcgccttggtgggagcgcatagtcatatttatgagttagcatacatctcctcacacagcgatttcattcctagctctggggagcttatttttgagccaggcgagcgcgaagccactattgctgtgaatatactcgatgacaccgttcctgagaaagaggagtcctttaaagtgcagctgaagaatcctaagggaggagctgagatcggaattaatgactcagtcacgatcactattctatccaacgacgacgcctacgggattgtggctttcgcacaaaacagtctgtacaaacaggtggaggagatggaacaagattctctggttaccttgaatgtagagcggctcaagggcacctacgggaggatcacaatagcctgggaggccgacggatcaatcagcgatatttttcctactagcggagtgatcctctttactgagggccaggttctctccaccattaccctgacaatcctcgccgataatataccagaactgtcagaggtagtaattgttactctcaccagaattacaactgaaggagtggaggatagttataaaggcgcaactatagaccaggatcgttccaagtcggtgatcacaacccttcccaacgactctccgtttggactggtgggctggcgggccgcttctgtgttcatccgggtggccgaaccaaaagaaaataccaccactttacagctgcagattgccagagataagggtctgctcggagatattgcaatccaccttcgtgcacagcctaatttcctgctgcacgtcgacaaccaggcaactgaaaatgaagactatgtccttcaggagacgattatcattatgaaagagaatattaaagaggctcacgcggaagtgtcgattctccctgacgatctgcccgaactggaagaagggtttattgtaacgatcaccgaagtaaatctggtcaattcggacttcagcacagggcagccatcagtacggaggcctggcatggaaattgcagagatcatgatcgaagaaaatgatgatccaaggggaatcttcatgtttcatgttacccggggtgccggagaagtgatcaccgcatatgaggtgccccctccactgaatgtattgcaagtgcccgtagtgaggctagccggtagcttcggggctgttaacgtctactggaaagcatctcccgattctgccggtctggaagactttaagcctagccacggcatactggaatttgccgataaacaggtgactgccatgattgaaatcaccattattgacgacgcagagtttgagctaaccgagacatttaacatctccttaatttctgtcgctggcgggggcagactgggcgacgacgtggttgtgaccgtggtgattcctcagaacgacagcccctttggggtgtttgggttcgaggaaaaaactgtgatgattgacgaaagcctctccagtgatgaccctgacagctatgtcaccctgacagttgtgaggtccccaggtgggaaggggacagtccgcctggagtggacgatcgacgagaaggcaaaacacaatctctcccccctgaatggcactctgcattttgacgagacagaatctcaaaaaaccatagtactgcacacactacaggacaccgtgcttgaagaggataggcggtttaccatccagctgatctccatagacgaggtggagatctctccagtgaaaggcagcgcttcaataattatccggggcgataaacgcgcctctggagaggtcggtattgctccgagtagtcgtcatatcctgatcggcgagcctagcgccaaatacaatggcacggctattatctcgcttgtccgggggcccggtatcttaggtgaagtcaccgtgttctggcgcattttcccgccatctgtgggggaattcgcagagacatccggaaagctgaccatgcgggatgagcagagcgctgtgatagtggtgattcaggctctgaatgacgacattccagaagagaagagtttctatgagttccagctgactgcagtgtctgaaggcggcgtgttgtcagagtccagttctactgctaacattacggtggtggcctccgattcaccctatggccgattcgcattcagccatgaacagttacgtgttagcgaggcgcagcgagtgaatattaccataattaggtcctccggtgactttgggcacgttcgactctggtacaaaaccatgagtgggaccgccgaagctggcttagacttcgtcccggccgctggcgaactcctttttgaggctggcgagatgcgtaagagccttcatgtcgagattttggatgacgactacccagaaggacccgaggagttcagtctaactataaccaaggtcgagctccaagggagggggtacgattttactattcaggagaacggactgcagatcgatcaacctcccgagatcggaaacatctcaattgttcggattatcataatgaagaatgacaacgctgagggcataatcgaatttgaccccaagtatacagctttcgaggtcgaggaggatgtgggactgattatgattcccgtagtgagacttcatggaacgtacggctatgttacagccgacttcatcagtcagtctagcagcgcctcacctggaggagtggattatatccttcacggctccacagtgacatttcaacatgggcagaacctgtcttttatcaatattagtattattgatgataatgagtccgaatttgaagagcctatagaaatcctgttgacaggcgcaactggtggagctgtgctaggccggcacctcgtctccagaataatcattgccaaatccgactcccctttcggcgtgatacgattcctgaatcagtctaagatcagcatagctaatcccaactccaccatgatcctcagcctggtccttgagagaacagggggtcttcttggggaaatccaggtgaattgggaaacagtcggacccaactcccaggaggccctcctcccacagaatcgggacatcgcagaccccgtgagcggtttattctatttcggagaaggggaaggtggcgtgcgcactattatcctcacaatttaccctcatgaggaaatcgaggtggaagaaacctttatcatcaaattgcacctcgtcaaaggggaagctaagcttgactcacgtgcaaaggacgtgactcttaccattcaagagttcggagatcctaacggggtagtgcagttcgcacccgagacactgtccaagaaaacctactcagagccactggccctggaaggccctcttctcattacatttttcgtcaggagagtaaagggtacctttggggaaattatggtttattgggaactatcgtccgagtttgatatcactgaggatttcttgagtacatctgggttctttaccatagctgacggggaaagcgaagctagtttcgacgtgcacctcctgcctgacgaggtcccagaaatcgaggaggactatgttatccagctggtctcggtggaggggggcgccgagcttgacctggagaagtccatcacctggttttcagtatacgccaatgacgaccctcacggtgtctttgccttgtacagcgatcgtcaatctattctgatcggccagaacctgattagatcaatacaaatcaacataactagactggctggaacctttggagacgtggcagtgggcctgcggattagctctgatcataaagagcagcccatcgtcacggagaacgccgaacggcagctagtggtgaaagacggcgcaacatataaagtagacgttgtgcctatcaaaaaccaggtgttcctgtcacttggcagtaatttcacgctccagttggttaccgtcatgcttgtgggtggacgtttctatggcatgcctaccattctgcaggaagccaaatctgccgtgctgcccgtatcagagaaggccgcaaactcacaggtgggattcgaatccactgcctttcagttgatgaacattaccgctggaacgagtcacgtgatgattagtcgcagaggcacatacggggccctcagtgtcgcttggacaaccgggtacgcccctggcttggagattcccgaatttatcgttgtggggaacatgacgcctacattgggctctctcagcttttcccacggcgaacaacggaaaggtgtgttcctttggacattccctagcccagggtggccagaagcttttgtactgcatctatcgggggtacagtccagcgctccagggggagcccagttgcggagtgggttcatcgtcgccgaaattgagcccatgggtgtattccaattcagcacgtcctccaggaatatcatcgtatccgaggatactcagatgattagactgcacgtgcagcgcctgtttggatttcactccgacctgatcaaagtctcataccagactactgctggcagtgccaaaccgttagaggatttcgaaccagtgcagaacggtgagctgttttttcagaagttccagacggaagtggacttcgagatcactatcatcaatgaccaactgagcgagatagaggaattcttttacatcaacctgacaagcgtggagattcggggcctccagaaattcgacgtaaattggtcaccccgcttgaacctggactttagcgtcgccgtgattaccatccttgacaatgatgacctagccggaatggatattagcttccccgaaacaactgttgccgtggccgttgataccacactaattcccgtcgaaactgagagcacaacttacctgtctactagtaaaactaccaccatcctgcaaccgaccaatgttgtcgctatcgtgaccgaggccacaggcgtgtcagcaatcccggaaaaactggtgactctgcatggaacacctgctgtaagtgaaaagcccgacgtggccacagtcacggcgaatgtgtctatccatggcactttttccctcgggccttccatcgtgtacattgaagaggagatgaaaaatggcacctttaacaccgccgaagtcctgatccggcggactggcgggtttacagggaacgtgagcataaccgtcaagacctttggagaaagatgcgcgcagatggagccaaatgccttgccatttcgagggatctacggtatctctaaccttacatgggcagtggaagaggaggatttcgaggaacagaccctaacactcatctttctggacggggagagggaacgcaaggtcagcgtccaaatcctagacgacgacgaacccgaaggacaagaatttttctatgtgttccttacaaatccacagggtggagcccagattgttgaggaaaaggacgacactgggttcgcggcctttgcaatggtcatcattacaggcagcgacctgcataacggtattatcggtttctccgaagaaagtcagagtggcttagaactgcgggagggcgctgtgatgagacggttacacctaatcgttacccggcaaccaaacagggcttttgaagatgtgaaggttttttggagggtcacattaaataagacagtggtggttctgcagaaagacggagtgaacctggttgaagagctgcagagcgtgagcggaacaaccacatgcactatgggccagaccaagtgtttcatctcaatagaacttaaacccgagaaggttccgcaggtagaggtctattttttcgtggagctctatgaagccaccgccggtgcagctattaataactcagctcggttcgcgcagatcaaaatactggagtccgacgaaagccagtccctggtgtactttagcgtcggttccaggctcgctgtcgcccacaagaaggctacattgatcagtctccaggtggctcgtgattccggaactggtttaatgatgtcagtgaacttcagcactcaggaactgcgatccgccgaaaccattggaagaaccatcatttcacccgcaatctccggaaaagattttgttataacggaaggcactctggtgttcgaacccggacagagatccactgtgctcgacgtgatcctgaccccagagactggctccctgaactcattccctaaaagatttcagatcgtgctcttcgacccaaagggcggggcgcggatcgacaaggtgtatggtaccgcaaacattactcttgtttctgacgcagattcccaggcgatttgggggctagcagatcagcttcaccagccagtcaatgacgatatcctaaatagggtgcttcatacaatcagtatgaaggtggccaccgaaaatacagatgagcagctctctgccatgatgcatctcattgagaagattaccactgagggcaaaatccaggccttttctgtggcatctcgcaccctattttatgagatactgtgctcactgatcaatcctaagaggaaagatactaggggcttttcgcactttgctgaggtgactgagaactttgcattttctctcttaacgaatgttacatgtggatctcctggcgagaaatcaaagaccatacttgatagctgcccatacctgagcatattagccctccattggtatccgcagcaaatcaatggccacaagttcgagggtaaagaaggtgattatatccggatcccagaacgtctgctggatgtgcaggacgctgagatcatggccggcaagagcacgtgcaaactcgtgcagttcaccgagtattcgagccagcaatggtttatttctgggaacaacctgccaactctgaaaaataaagtcctgtcattgagtgtgaaaggtcaatcttctcagctactgacgaacgacaatgaggttctgtaccggatctacgccgccgagccccgcatcatcccgcagacatcgctttgtctgttgtggaatcaagccgcagcttcctggctgtcggattcccagttctgcaaggtcgtggaggagactgctgattacgtcgagtgtgcctgttcacacatgtcggtatatgctgtctacgcaagaacagataatctaagcagttacaacgaggctttcttcacctccgggtttatctgcatctcagggctgtgcttagccgtgctatcccacatattctgtgctaggtacagtatgtttgccgccaaactcctcacccatatgatggccgcgagtctggggacccagatcctctttctggcgtccgcctatgctagccctcaactggctgaggaatcttgttcggcgatggccgctgtgacacactatctttacctgtgccagttctcgtggatgctcatacagtcagtcaacttctggtatgttctggtgatgaacgacgaacatactgagagacggtacttactgttctttctgctctcctggggcctcccggctttcgttgtgatcctgttgatcgtgatactaaaaggaatctaccaccaatccatgtcgcaaatttacggcctcatacacggcgatctgtgttttattccgaatgtgtacgcggcgctctttaccgcggcattggtccccctcacgtgcttggtagtcgtatttgtggttttcatacatgcctaccaggtcaagccacaatggaaggcctacgacgacgtatttcgcggaaggactaacgccgccgaaattccgctcatcttgtatctttttgctctgatatcagtaacctggctatggggcggccttcacatggcatatcggcatttctggatgcttgtcttgtttgtcatttttaactcccttcagggactctatgtgttcatggtctattttattctccacaaccaaatgtgttgccccatgaaggcttcctacacggttgagatgaacggccatccggggccgtctaccgcatttttcacgcctggcagtggaatgccccctgccggtggcgaaatttctaaaagtacacagaacctgataggggccatggaggaagtcccccctgattgggagagggcttcctttcagcaaggctctcaagcctcacccgacctcaagcccagcccacagaacggggcgacatttccatcaagcggaggatatggacagggctccctcatcgcggatgaggaatcgcaggagtttgatgacttaatctttgcgctgaagacgggagcaggcctcagtgtaagcgacaacgaatccggccaaggcagccaggaagggggcacactgaccgacagtcagatcgtcgaactgaggaggattcctatcgcggatacacatctctag

SEQ ID NO: 188710 - DNA, 4188 bp, synthetic construct
  misc_feature 1..4188: note = Description of Artificial Sequence: Synthetic coding sequence
  source 1..4188: mol_type = other DNA
atgaccggcgccgagatcgagagcggcgcccaggtgaagcccgagaagaagccaggagaggaggtcgtcggcggcgccgagatcgaaaatgacgtaccactggttgtgcgccccaaagtccggactcaagcacagattatgccaggcgctaggccgaagaacaagtcaaaggtgatgcctggcgctagcactaaagtagagaccagcgccgtgggtggggcacggccgaagtccaaggcgaaagcaattccagtgtctaggtttaaggaggaggcccagatgtgggctcagcctaggttcggggccgaaagactttctaagacagagagaaacagccagaccaatatcatagcctcccctcttgtctcgacagacagcgtgctggtggcgaagacaaagtacttgagtgaggatagggagttggtcaacactgatacagaatccttccctagaaggaaagcccattaccaggccggctttcagccttcctttagatctaaggaggagacgaacatgggaagctggtgctgcccccgacccacctccaagcaggaagcgagtccgaattctgatttcaaatgggtcgataaatcggttagcagcctgttttggtcaggcgatgaagtcacagctaaattccaccctggaaacagagtaaaagattccaatcggagtatgcatatggctaatcaggaagccaacacaatgtccaggtctcagaccaatcaggaactgtatattgcatcttctagcggcagcgaggatgaatcagtgaagacaccgtggttctgggctagggacaaaacgaatacctggagtgggcctcgcgaagacccaaacagtcggtctcggttcagatccaagaaggaggtttacgtggagtccagctcagggtccgaacatgaggatcacctagagtcctggttcggcgctgggaaagaggccaaatttaggagtaagatgcgagccggcaaagaggcgaataacagggcgaggcacagggccaagagagaggcctgtattgacttcatgcccggatctatcgacgtgatcaaaaaagagtcatgcttttggcccgaagagaatgctaacaccttttccagacctatgataaagaaagaggcgcgagctcgcgctatgacaaaggaggaggctaaaaccaaagcaagagctagggccaaacaggaagcccgatctgaagaagaagcattgatcggcacatggttttgggctacagacgaatcatctatggccgatgaggcttccattgaaagcagtttacaggttgaggacgagagtatcataggctcctggttctggactgaggaagaagccagcatgggtactggcgcgtcttctaagagcagacccaggaccgacggggagaggataggggatagcctcttcggcgcccgggaaaaaacgtctatgaaaacaggagcagaggctacatcagaatccatccttgcagctgatgatgagcaagtaattataggctcctggttctgggccggcgaagaggtgaaccaggaagctgaagaagaaactatttttggatcttggttctgggttatcgatgctgcatcggtggagagtggcgttggcgtatcatgtgagagtcggactcgcagtgaagaagaggaggttataggaccctggttttggtctggcgaacaggtggacatcgaggcgggaattggcgaggaggctaggcctggagcggaggaagagactatctttggctcttggttttgggcagagaaccaaacctacatggattgcagagcggaaacatcctgcgacacaatgcagggggccgaggaggaggagcccattatcggcagttggttctggacacgagtggaggcctgtgtcgagggcgacgtgaattcaaaatcttctctggaggataaagaggaagccatgataccttgctttggggcgaaagaagaggtgtcgatgaaacatggcaccggggtcagatgcagattcatggcaggcgcagaagaaacaaacaataagtcctgcttttgggccgagaaagaaccatgcatgtaccccgccggcgggggctcctggaagtctagacctgaggaggaagaagatatcgttaactcctggttttggtcccggaaatacacaaagccagaggccatcatcggttcctggctgtgggctactgaggagtctaacattgacggcaccggggaaaaagctaagttgctgacagaagaagagacaataatcaacagctggttctggaaggaagacgaggctatatccgaagccaccgatagagaggagagccgtcccgaagccgaggagggagacataattggcagttggttctgggcaggggaagaggatagactcgagcccgcagcagagacaagagaggaggaccggctcgccgccgagaaagagggcatcgtggggtcctggttcggtgctcgcgaggagaccattcggcgagaagctggctcatgtagcaagtcctctccaaaggcggaggaagaagaggtcatcataggttcatggttttgggaagaggaagccagccccgaagccgttgctggagtaggattcgaaagcaagccagggactgaggaggaagagataactgttggtagttggttctggcctgaggaggaggctagtatccaggccgggtctcaggccgtcgaggaaatggaatcggaaacagaggaggagacaatatttggctcctggttctgggacggaaaggaagtttcagaagaggccggcccctgttgcgtaagcaaaccggaagacgatgaggaaatgattgtggaatcctggttctggtcacgtgacaaagccattaaagagactggcaccgtggccacatgcgagtccaagccagagaatgaggagggagctatagtcggctcctggttcgaggccgaggacgaggtcgacaaccggactgacaatggaagcaattgcggctctaggaccctcgctgacgaggacgaggcaattgtcgggagctggttttgggcaggcgacgaggctcactttgagtccaatcctagtcctgtcttccgagcaatatgccgtagcacgtgctccgtggaacaggagcccgacccctcccgcagaccccaatcatgggaagaagtgactgtacaattcaaacctgggccatggggacgagtggggttcccgagcatttcccccttcaggttccctaaggaagctgcgagcctgttctgtgagatgttcggaggaaagccgcggaacatggtcctgagcccagagggagaggatcaggagtccctcctacagcctgaccagcctagtcccgaatttccattccaatacgaccctagttatagatccgttcaagaaattcgtgagcatctcagagcgaaagagtcaactgagccagagtccagcagttgtaactgtatccaatgcgagctaaagatcggcagtgaggagtttgaagagcttctcctcctgatggaaaagattcgggacccattcatccacgagatttctaaaattgccatgggtatgagatctgcttctcagttcacacgtgatttcatcagggattctggtgttgtatcgcttattgaaaccctcctcaattacccttcatccagggtccgtacttcattcctggagaacatgatccgcatggcgcccccatacccaaatctcaatatcattcagacatatatctgcaaagtgtgcgaggaaaccctagcctatagcgtggatagtccagaacagctgtccggcatacgcatgattaggcacctgacaactaccacagattatcacactttggtcgctaattacatgagtgggttcctgagtctgctagcaactgggaatgcgaaaacaagattccacgtgctcaaaatgctcttgaaccttagcgagaatttgtttatgacaaaagagctgctcagcgctgaggccgtgtctgaattcatcgggctgtttaaccgggaggagacgaatgacaatatacagatcgttcttgcaatctttgagaacattggaaacaatattaagaaagaaacagtcttttcggacgacgacttcaatatcgagcctttgatctctgcctttcacaaggtggaaaaattcgccaaggaactgcagggcaaaaccgataatcaaaatgaccccgaaggggaccaagaaaactag

SEQ ID NO: 188711 - DNA, 4188 bp, synthetic construct
  misc_feature 1..4188: note = Description of Artificial Sequence: Synthetic coding sequence
  source 1..4188: mol_type = other DNA
atgaccggcgccgagatcgagagcggcgcccaggtgaagcccgagaagaagccaggtgaggaggttgtcggtggcgccgaaattgagaacgacgtgcctttggtcgtaaggcccaaggtacggacgcaagctcaaattatgcctggagccagacctaaaaacaagtctaaggtgatgcctggtgctagtactaaggtggagacatccgctgtggggggggcacgcccaaagtctaaagccaaggcaatccccgtatcacgttttaaagaggaggctcagatgtgggcccaaccccgattcggagcagagagattatctaagaccgagaggaatagccagaccaatattattgctagtcctttggtgtccacggactcagtcctggtggctaaaactaaatacctttctgaagacagagagctggtgaacaccgataccgaaagtttcccccggaggaaagctcactatcaggccggtttccaaccctcctttaggtctaaggaggagaccaatatgggtagttggtgttgtccaagaccgacctctaagcaggaagccagtcctaattctgacttcaagtgggtagataaaagcgtatctagccttttttggtctggagacgaagtgaccgctaagttccatccaggaaacagggtgaaagactctaacagatcaatgcacatggcgaaccaagaggcgaacactatgagccgaagccagaccaaccaggaactctacatcgctagttccagtggtagcgaggacgaaagtgtcaagacaccatggttctgggctcgcgataagacgaatacttggtcaggcccccgggaggatcccaattccaggagcaggtttagatcaaagaaagaagtatacgttgagagtagtagtggatccgagcacgaggatcacctggagagctggttcggcgcaggcaaggaagccaagttccgctcaaaaatgcgggccggaaaggaagcaaataaccgggctaggcatcgcgcaaaacgggaagcctgtatagactttatgccaggaagtatagatgtcatcaaaaaggagagctgcttctggcctgaggaaaatgcaaacaccttcagccgccctatgatcaaaaaagaggccagagcaagagcgatgacgaaagaagaggccaagaccaaagctagggcaagggcaaagcaggaggcccgctctgaagaggaagcacttataggaacatggttctgggctaccgacgagtccagcatggccgatgaagcctctatcgagtcttcccttcaggtcgaggacgagtctatcattggctcctggttttggaccgaagaagaggcatcaatggggaccggggcctcatcaaagtcaagaccccgaacagatggtgaacgcatcggggactccctctttggggctagagaaaaaacctcgatgaagaccggcgcagaggctacatccgagtccatactggccgcagatgacgagcaggtaatcatcgggtcttggttctgggctggggaagaagtaaaccaggaagcagaagaggagacaatctttggatcatggttctgggtcattgacgcagcttctgtggaatctggcgtaggagtttcctgcgaatcaagaactcgcagtgaagaggaagaagtgatcggcccttggttttggagcggtgagcaggttgatatcgaagccggaatcggagaagaggcgaggcctggcgcagaggaagagacaatattcggcagctggttctgggccgagaaccagacatatatggattgccgcgccgaaacttcctgcgacactatgcaaggtgcagaagaagaggagccaataattggcagctggttctggacacgggttgaggcctgcgtcgagggagatgtcaacagtaagtccagcttagaggataaggaggaggccatgattccttgttttggggccaaggaagaagtctcaatgaagcacggcaccggcgttagatgccggtttatggctggagccgaggagactaacaataagtcttgcttctgggctgagaaagagccctgcatgtatccggccggcggtggatcttggaagtctaggcccgaagaagaggaggatatagttaatagctggttctggagtagaaagtacacaaagccagaggccatcatcggttcatggctgtgggctacggaagagtctaacattgatgggaccggcgagaaggcaaaattactaacggaggaggaaacaatcatcaactcgtggttctggaaagaggatgaggcaattagcgaggctacggaccgagaggagtccaggcccgaagccgaggagggggacatcatcggcagttggttctgggcgggggaagaagaccgtctggagccagccgcagagaccagagaggaagatagacttgctgctgagaaagaaggcatcgtgggttcctggttcggtgcacgtgaagaaaccatcagacgggaagcaggctcatgctctaagtctagtcccaaggcagaggaggaagaggtgataataggatcatggttttgggaggaagaagctagccctgaggccgtcgctggagtgggattcgagagcaaaccaggaactgaggaggaagagattactgtcggttcctggttctggcccgaggaggaggctagtatacaggcaggctcccaggcagttgaagaaatggagagcgagaccgaggaggagaccatttttggcagctggttctgggacggcaaagaggtctctgaagaagctgggccctgctgcgttagcaagcccgaggacgatgaggaaatgatagtcgagagctggttttggagccgggacaaggccatcaaggagacaggaactgtggccacctgcgagagcaagcccgagaacgaggagggggcaattgtcggttcctggttcgaggcagaagatgaagtggacaataggaccgataatgggagcaattgcggatctcgtacactcgccgacgaagatgaggcgattgtgggtagctggttctgggcaggggatgaagcccattttgagtccaacccttcaccagtattccgggcgatttgccggagcacatgctctgtcgagcaggagccagatccctcgcgacgcccacagagttgggaggaggtcactgtgcaattcaaaccaggaccatggggccgagtgggcttccccagcatttccccattccgatttccaaaagaggctgcatccctattttgcgagatgtttgggggcaagccacgaaacatggtgctgtcaccagagggtgaggaccaagagagcttattgcagcccgaccagccctcccccgaatttcccttccagtatgacccatcttaccgctctgtccaggaaatccgcgaacatcttagagccaaggagtccaccgagcctgagagctcaagttgcaattgcattcagtgcgagctgaaaattggatcagaggaatttgaggagctgctgctcctgatggagaagatcagggacccattcatccacgagatcagcaagatcgccatgggcatgagatctgcatcccagtttacaagagatttcatacgggactctggcgtggttagcttgatagaaacccttctgaactatcctagcagtagagtccgaacgtcctttctagagaatatgatccgaatggcccctccgtaccctaatctgaacatcatccagacctatatttgtaaggtgtgcgaggagaccctcgcatattctgtggattcccctgaacagcttagcggtatccggatgatcagacacctgaccaccaccaccgattaccacaccctggtcgcaaattacatgtccggattcctgtccctgctggctacaggcaacgccaaaacccggttccatgttttaaaaatgttgctgaatctgagcgagaacctcttcatgacgaaggagctgctgtcagcagaggccgtgtccgaatttatcggactcttcaatcgagaggaaacaaacgataacattcagatcgtccttgctatttttgagaatatagggaacaatatcaagaaggagaccgtgttttcagatgatgatttcaacattgaaccgttaattagcgcattccataaagtcgagaagtttgcgaaggaattacagggcaagaccgacaaccagaacgacccagagggcgatcaggagaactag

SEQ ID NO: 188712 - DNA, 4188 bp, synthetic construct
  misc_feature 1..4188: note = Description of Artificial Sequence: Synthetic coding sequence
  source 1..4188: mol_type = other DNA
atgaccggcgccgagatcgagagcggcgcccaggtgaagcccgagaaaaaacctggcgaggaggtagttgggggggccgaaattgagaacgatgtgcctttagttgtgaggcccaaagtgcgcactcaggcccagatcatgcccggcgctagacccaaaaacaagagcaaggtgatgccgggtgcctcaaccaaggttgaaacgtcagcagtcggaggggctcgccccaagtccaaggctaaagctatcccagtctctagattcaaagaggaggctcagatgtgggcacaaccacgcttcggtgcagagagattaagcaagacagaacgcaattcccaaactaacattatcgcctctcctttggtgagtactgacagcgttctagtcgccaagacaaaatatctatccgaggacagggagctggtgaatacagacacagagagtttcccccgacgcaaagcacactaccaggccgggttccagcccagcttcagaagcaaggaggagacgaacatgggctcatggtgttgtccccgaccaacaagtaaacaggaagcgtcacctaactcggattttaagtgggttgacaagtcggtgagttcattgttttggtccggcgacgaagtgacagccaagtttcatcccggcaatagggtgaaagactcaaacaggtcgatgcacatggccaatcaggaggcaaacacaatgagtcgatcacaaacgaatcaggagttgtacattgcttcatccagtggcagcgaggatgaatcggtgaagacaccatggttttgggcaagagacaagactaatacctggtctggccccagggaggaccccaactccagatcaaggtttcggagcaagaaggaagtgtacgtggaatcgtcttccggaagtgagcacgaggatcatttggaaagctggttcggtgcgggcaaagaggcaaaatttagatctaagatgagagctgggaaggaagcaaacaatagggctaggcatcgggccaaacgcgaggcttgtatcgactttatgcctggatccattgacgtgatcaaaaaagaaagctgcttctggccggaggagaacgctaatacatttagtcgtccaatgatcaagaaagaggctcgggctagggctatgacaaaagaggaggctaagacaaaggccagggcgagagctaagcaggaagccagaagtgaagaagaagctttgattggcacatggttttgggcgaccgacgaatcatctatggctgatgaagcctctattgaatcttccctgcaggtagaggatgaatccattatcggcagctggttctggacagaggaggaggcgagcatgggcaccggcgcttcttccaagtcacggcccaggaccgacggagagaggatcggagattccctgttcggggctagagagaaaactagtatgaaaaccggggctgaggcgacatccgaatccattttagccgcagatgacgaacaagtcattataggttcttggttctgggccggtgaggaggtaaaccaggaggctgaggaagagacgatctttggatcatggttttgggttattgacgcagcttcagttgaatccggtgtgggcgtatcgtgcgagagccgcacaagatctgaggaggaagaggtaatcggaccatggttttggtctggtgaacaagtagatatcgaagctggcataggcgaagaagcgcggcccggcgctgaggaagagaccatctttggctcatggttttgggcagagaaccaaacctatatggattgccgggcagaaacttcctgtgataccatgcaaggggccgaggaagaggaaccgattattgggagctggttttggacacgggttgaggcgtgcgttgagggggatgtgaatagcaagagcagtctggaggacaaggaggaggccatgattccttgcttcggtgcgaaagaggaagtttccatgaagcacggcaccggtgtgagatgtcggtttatggccggcgctgaggagaccaataataagtcttgtttctgggccgagaaagaaccctgcatgtatcccgccgggggggggagctggaagagtaggcccgaagaagaagaggacatagttaattcctggttttggagcagaaaatacaccaagcccgaagcgatcattggttcctggttatgggcaacggaggagtctaacattgacggcactggtgaaaaagccaaactgttaacggaagaagaaacaatcattaatagctggttctggaaggaagatgaggctatttcggaggcgacagatcgtgaggaatcgagaccagaagccgaagaaggcgacataatcggatcttggttttgggcgggcgaggaggatagacttgaaccagccgccgagaccagggaggaagacaggctggcagccgaaaaggagggcatcgtaggatcatggttcggcgcccgggaagaaactataaggcgtgaagccggtagctgcagtaaaagcagtcctaaagccgaagaagaggaggtcataatcggcagttggttttgggaggaggaggccagccccgaggcagtcgcaggagtaggctttgaatcaaagccaggaaccgaagaggaggagatcactgtcggatcctggttctggcctgaagaggaggccagcattcaggccggaagccaagctgtggaggaaatggagtcagaaaccgaggaagagacgatctttggctcttggttctgggatggtaaagaagtgagcgaagaggctggaccttgttgcgtctccaagcccgaagacgatgaggaaatgatcgttgaaagttggttctggtctcgggataaggcgatcaaggagacgggcaccgtggctacttgcgaatccaaacctgaaaatgaagagggcgccatcgttggctcctggtttgaagccgaagacgaggtcgacaatcggacagacaatggaagtaattgcggtagccgcacattggctgacgaggacgaggcgatcgtgggttcctggttttgggcaggagatgaggcacactttgaatctaatccaagccctgtatttcgcgcgatttgccgctccacttgctctgttgagcaggagcccgatccaagtcggaggccacagtcatgggaagaagtgaccgtacagttcaagcctgggccctggggcagagtgggatttccctccatctcccctttccgcttcccaaaggaggcagcatctctgttctgtgagatgtttggaggtaagccccgcaatatggtgctctcgccagagggagaggaccaggaaagcctgctgcagcctgaccagccaagtcctgaatttccttttcagtatgacccttcatataggagcgtgcaggaaatacgggagcatcttagggcaaaggagtcgactgaacccgagagcagctcctgtaactgtattcaatgtgagctgaaaattggctcggaagagttcgaagagcttctgctgctcatggaaaaaatccgggatccattcatccacgagatctctaagatcgccatgggcatgagatccgcatcacagtttacacgggacttcatccgtgatagtggagtggtgtccctcattgaaacactgctgaactacccatcttcccgagtcagaacctcctttttggagaacatgatacgaatggccccaccctacccaaacctgaacattattcaaacctatatctgcaaagtgtgcgaggagaccctcgcgtatagcgtggattcaccggagcagttgagtggtatcagaatgattagacacctgaccaccaccactgattatcacaccctcgttgcaaactatatgtctggattcctgtccttgttggccaccggcaatgcaaaaactaggttccacgtcctcaagatgttactgaatctctctgaaaacttattcatgactaaagaacttctttccgccgaggctgtgtcggagttcatcggtttatttaaccgtgaggagacaaacgacaatatccagatagtcctggccatatttgagaacatcgggaacaacatcaagaaggagacggtattttcggatgacgacttcaacatagaacctttgatttccgcatttcataaggttgaaaagtttgctaaagaattacaaggcaagacagacaaccagaacgaccctgagggggatcaggagaattag

SEQ ID NO: 188713 - DNA, 4188 bp, synthetic construct
  misc_feature 1..4188: note = Description of Artificial Sequence: Synthetic coding sequence
  source 1..4188: mol_type = other DNA
atgaccggcgccgagatcgagagcggcgcccaggtgaagcccgagaagaagcccggagaagaggttgtgggcggtgcagagattgagaacgacgtgcctctcgtggtccggcccaaggttaggacccaggcccagattatgcccggagcccgacccaagaacaaaagtaaggtgatgcctggggctagcacaaaagtggaaaccagcgctgtcgggggcgcccgccctaagtccaaggctaaggctataccagtttcacggtttaaagaggaggctcagatgtgggcacaacccagatttggggccgaaagactgtcaaaaaccgagagaaattcacagacaaatattatcgcttcacctttagtctccaccgattctgtgcttgtcgccaagacaaagtacctctccgaggaccgggaactggtgaacacagataccgaatccttcccccgcaggaaggcgcattaccaggccgggtttcagccttcctttcgatctaaagaggaaaccaacatgggcagctggtgttgcccaaggcctacaagcaaacaggaggcatcacctaactccgatttcaagtgggtggataagtctgttagctctctcttttggagcggagacgaagtcaccgccaagtttcatccaggaaatcgagtgaaggactccaaccgcagtatgcacatggccaaccaggaggcaaacaccatgtccaggagccagacaaaccaggagctgtacattgccagctcctcaggatcagaggatgagagcgtgaagacaccatggttctgggcccgggacaaaactaacacctggagcggcccccgagaagaccccaattctcgttcgaggtttcgttcaaaaaaagaggtgtatgtagaaagtagtagcgggagtgaacacgaggaccatttagaaagctggttcggcgccggaaaagaagccaaattcaggagtaaaatgagagccggtaaagaggccaataacagggcaagacatcgggcgaagagggaagcatgcatcgatttcatgccgggcagtatagacgtaatcaagaaggagtcttgcttttggccagaagagaatgctaatacctttagtaggcctatgataaaaaaggaggcaagagcccgcgctatgaccaaggaagaagcaaagacaaaggcccgagctcgggcgaaacaggaggcccggagtgaagaagaggcccttattgggacctggttctgggctaccgatgaaagtagcatggctgatgaggcctctatagagtcttctttgcaggttgaagacgaatctattatcggcagctggttctggactgaggaggaggcctctatgggcacgggcgctagctccaagtcacggcccagaacagacggcgaacggatcggagacagcctgtttggtgcgcgcgagaagacctctatgaagacgggcgcagaggccacaagcgagagcattctagccgcagacgatgaacaggtgatcatcggctcttggttctgggccggcgaggaagtaaatcaggaagctgaagaagaaactattttcggcagttggttttgggtcatagacgccgccagcgttgaaagcggcgtgggcgtcagctgcgagtccagaacgcgctctgaggaagaggaggtcattggaccatggttttggtctggagaacaagtggacatcgaggccggaatcggagaggaggcaagacctggcgccgaagaggagactatcttcgggtcttggttttgggccgagaaccagacttacatggactgcagggcggaaaccagctgtgacaccatgcaaggagccgaggaggaagaaccgatcattggatcttggttttggacccgcgttgaggcctgtgtggaaggtgatgtaaactccaaatcatcccttgaagacaaggaagaggccatgataccttgcttcggggcaaaagaggaagtgtcgatgaagcatggcacaggcgtgagatgccggttcatggccggcgctgaagaaactaacaataagtcttgcttttgggcagagaaagagccgtgtatgtatccagccggggggggctcttggaaatcacggcctgaggaggaggaggacatcgtcaattcttggttttggtccaggaagtacacaaagcccgaggcaataatagggtcatggctttgggctaccgaggagtcaaatatcgacggtaccggcgagaaagccaaactactgactgaggaggaaaccattatcaacagctggttctggaaagaggatgaggccatctctgaggccactgatcgggaagaatcgagacctgaggctgaggaaggggacatcattggctcctggttctgggctggagaggaggatagactggaaccagcagcagagactcgagaagaagatcgcctcgccgcagaaaaggaaggcatcgtggggtcatggtttggtgcgcgggaggaaacaatcagacgtgaagctggctcatgctcaaagtcgtctccaaaggcagaagaggaggaggtcataatcggctcctggttctgggaggaggaagcctccccagaggcagtggccggagtcggtttcgaaagcaagccaggcactgaggaagaagagatcacagtgggatcatggttctggccagaggaagaggcatccatccaagcagggtcacaggctgtcgaagagatggaatccgagactgaggaagagactatctttggaagttggttctgggatggcaaggaggtttctgaggaagctggcccatgctgcgtgtccaaacctgaggacgacgaagagatgatcgtggaatcatggttctggtctagagacaaggccattaaggagactggcaccgtagcgacctgtgaatcaaagccagaaaacgaggagggcgcgatcgtcggttcttggtttgaggctgaagatgaggtcgataacagaactgacaatggatccaactgcggcagtcgtaccctggccgacgaagacgaagccattgtgggttcatggttttgggctggagatgaggctcacttcgaatcgaatccgagcccggtcttccgcgctatttgtaggtccacgtgtagtgtggagcaagagccagacccttccagaaggcctcagtcatgggaggaggtgacagtgcagtttaaacccggtccctgggggcgcgtaggctttccatcgatttcccccttccgatttcccaaggaggctgccagcttgttctgtgaaatgttcggaggcaaaccccgcaatatggtgctttctcccgagggcgaggatcaggagtccctcttgcagcctgatcagccatcccccgagtttcctttccagtatgacccctcctataggtctgtccaagagatccgggaacaccttagggcgaaagagagcacagaacctgaaagtagctcttgtaactgtattcaatgcgagctaaagatagggagcgaagaattcgaggaactgctgctgctcatggagaaaatccgggatccgttcattcacgagatctccaaaatcgcaatgggtatgcggagtgcctcacagtttactcgcgatttcatcagagattctggcgtcgtgtcactcatagaaactcttctaaattatccgtcaagtagggtcagaacgtctttcctagagaatatgatacgcatggcaccaccctatcccaatttaaacatcatccaaacatacatctgcaaggtatgtgaagagactcttgcctactcagttgatagccccgagcagctatccgggatcagaatgatccggcatctgacaaccacaactgactatcatacattagttgccaattacatgagcggattcctttccttactggcaacaggcaacgctaaaacacgattccatgtactgaaaatgctgctcaacctgtccgaaaatttatttatgacgaaagaactgttgagtgccgaggctgtctccgagtttatcggactattcaaccgggaggagactaacgacaacatccagatcgtgctggctattttcgagaatattggaaataatatcaagaaggagaccgttttctctgacgatgactttaatatagaaccgcttatctccgcttttcacaaggtggaaaagttcgcaaaggaattgcagggcaagacagacaaccagaacgacccagagggagatcaggaaaactag

SEQ ID NO: 188714 - DNA, 1692 bp, synthetic construct
  misc_feature 1..1692: note = Description of Artificial Sequence: Synthetic coding sequence
  source 1..1692: mol_type = other DNA
atggacttcggcagcctggagaccgtggtggccaacagcgccttcatcgctgcaagggggagtttcgacgggtcttcatcacaaccaagccgagataagaaatacctggctaagctgaagttgcccccgctgagcaagtgcgagtctctgagagacagcctttctctggagttcgagtccgtctgtctggaacaacccattgggaagaaattgtttcaacagtttctacagagcgctgaaaagcatctacctgctctagagctctggaaggatattgaagactatgataccgctgacaatgacctgcaaccgcagaaagctcaaaccattttggcccaataccttgatccacaggccaagctgttctgctctttcctggatgagggtatcgtcgcgaagttcaaagagggcccagtcgaaatccaggatggtctgttccagcccctgctgcaggccacgctcgcacatcttgggcaagcccccttccaagagtacctgggctccttatactttcttcgcttcctgcagtggaagtggctggaagcccagcctatgggagaggactggttccttgatttcagggtactcggaaaaggcgggtttggagaagtctccgcgtgccaaatgaaggcaactggaaaactttacgcctgcaaaaagttaaataaaaaacgactgaagaaacgcaagggataccaaggtgcgatggtggagaaaaagattctaatgaaggtacatagcaggtttatcgtttccctcgcctacgctttcgaaacaaaggcagatctctgtcttgtcatgacaattatgaacggcggagacatccggtaccacatctacaatgtaaacgaggagaatccggggtttcctgagccccgtgctctgttctatacggcacagatcatttgcggacttgaacacctgcaccagcgaagaatcgtttaccgtgaccttaaaccggagaacgtcttgttagataacgacggaaacgtgcggatttcagacctagggctggccgtcgagctgttagatggccagtctaaaaccaagggctacgccgggacccctggcttcatggcaccggaactgttgcagggtgaggagtatgatttctctgtcgactacttcgcacttggcgtgaccctatacgagatgatagcagcacgaggaccgtttcgggcacgcggcgagaaagtcgaaaataaggaactgaaacatcggatcatctcagagcccgttaagtaccctgataaattttcgcaggcaagtaaggatttctgcgaagcactgctggaaaaggacccagaaaaacgattgggcttcagggatgaaacctgcgataaattgagggcacacccactgttcaaagatctgaactggcgccagttggaagccggaatgctcatgcccccctttatcccggacagcaagacagtgtacgccaaggacattcaagatgtgggggcgtttagtacggtgaagggagttgcctttgacaagacagacactgagttctttcaggaattcgcgaccgggaactgccccatcccttggcaagaagagatgatcgagacaggcatcttcggagagctgaacgtctggcggagcgatggacaaatgcctgacgacatgaagggcatcagtggcgggtccagttcatcctccaagagtggcatgtgtctggtttcctag

SEQ ID NO: 188715 - DNA, 285 bp, synthetic construct
  misc_feature 1..285: note = Description of Artificial Sequence: Synthetic coding sequence
  source 1..285: mol_type = other DNA
atgatcgccgcccggggccccttccgggcccggggcgagaaggtggaaaacaaggagctgaaacatcgtattatctccgagcctgtgaagtatccagataagttctcccaggcttccaaggacttttgtgaggcgttgcttgagaaggaccctgagaagagattgggatttagggacgagacctgcgacaagttgcgcgcgcacccccttttcaaagacctcaattggcgccagcttgaagccggaatgttgatgccccccttcatcccagactctaaaacttag

SEQ ID NO: 188716 - DNA, 228 bp, synthetic construct
  misc_feature 1..228: note = Description of Artificial Sequence: Synthetic coding sequence
  source 1..228: mol_type = other DNA
atggagctggagaacatcgtggccaacaccgtgctgctgaaggccagggagggaggagggggtaaaagaaagggaaagtctaaaaaatggaaagagatattgaagttcccccacatatcacagtgcgaagacctccgtcgcacgatcggtgaactctcgggatcactcatctcttggtcaagtagcacaaaagaacatggacggccgacagagattaaaatgcgctag

SEQ ID NO: 188717 - DNA, 1458 bp, synthetic construct
  misc_feature 1..1458: note = Description of Artificial Sequence: Synthetic coding sequence
  source 1..1458: mol_type = other DNA
atgaccaagtacctgacccccaagagccccgtgttcatcgcccaggtgggccaggacctggtatctcagacggaggagaaacttttacagaaaccttgcaaagaactgttttctgcctgtgcccagagcgttcatgagtatctgcgcggagagccattccatgagtatctcgactcgatgttctttgaccggtttctccagtggaaatggttggagcgccagcccgtgacaaaaaatacttttcggcagtaccgcgtgcttgggaagggcggattcggtgaagtgtgtgcatgccaggttcgggcgactggaaaaatgtatgcctgtaagaggctggagaaaaagaggattaaaaagcgcaaaggcgagtcgatggcgttgaatgagaaacagatattagagaaagttaacagtcagttcgtcgttaacctcgcatacgcctatgagacgaaagacgcattatgtttggttctcacaatcatgaatggcggcgacctgaagttccatatatacaacatgggcaaccccgggtttgaagaggagagggccctgttttacgccgctgaaatactgtgtggcctcgaggatcttcatagggagaatacagtctatagggacttaaagcccgagaacatcctgctggacgactacggacatatccgcattagtgacctgggacttgctgtgaaaattccggaaggcgacctcatacggggacgagtgggcacggtgggctatatggctcctgaggtcttaaataatcaacgctacgggctctctccagactattggggcctaggctgcctaatttatgagatgatcgaggggcagtctcccttcagggggcgcaaagagaaggtcaaaagagaagaagttgataggcgagtactcgagacagaggaggtgtacagccacaagttcagtgaggaggcgaagagtatatgtaagatgctgctgaccaaggacgccaagcagcgtctgggctgccaggaggaaggcgccgcagaagttaagaggcatcccttctttagaaatatgaactttaagaggctggaggctggcatgctcgatcccccatttgttcccgacccccgtgccgtgtactgtaaggacgtattggacatcgagcaattcagtaccgtgaagggtgttaatctggaccacaccgatgatgatttctacagtaagtttagcaccggaagcgtgagcattccttggcaaaatgaaatgatcgagactgagtgtttcaaggagcttaatgtgttcggtccgaacggcacgctcccccccgatttgaacaggaaccatccaccagagccaccgaagaagggattgttgcaacgactgttcaaacgccagcatcaaaacaattcgaagagctcgccctcctccaaaacctcatttaatcaccatatcaacagcaaccacgtgagcagcaatagcacagggtctagctag

SEQ ID NO: 188718 - DNA, 1773 bp, synthetic construct
  misc_feature 1..1773: note = Description of Artificial Sequence: Synthetic coding sequence
  source 1..1773: mol_type = other DNA
atggagctggagaacatcgtggccaacaccgtgctgctgaaggccagagaaggcggaggaggtaagcgtaaagggaagtcgaagaagtggaaagaaatcctcaagttcccacatatttcacagtgcgaggacctccgaaggactattgaccgcgactactgctcactctgcgataaacagcctatcggtagactgctatttcggcagttttgtgagaccaggccaggattggagtgttacatacaattcctggactcagtggccgagtacgaggttacccccgacgagaaattgggtgaaaagggcaaagaaatcatgactaagtatcttacacccaaatcaccagtgtttattgcccaggtgggccaagacctagttagccaaaccgaagaaaagctgcttcagaaaccctgcaaagaactttttagtgcctgtgcgcagagcgttcatgagtacctccggggggagccattccatgagtacctggattccatgttctttgaccggttcctccagtggaagtggctggaaagacagccggttacaaagaacaccttccgtcagtatagggtcctgggtaagggcggctttggcgaagtctgcgcttgccaggttagagcaactggcaagatgtatgcctgcaagagactcgaaaaaaaacgtattaagaaacggaagggggagagtatggccttgaatgagaagcaaatcctcgaaaaggtcaactcacagttcgtggttaacctggcatacgcatacgagaccaaggacgccctctgcctcgtgctcacaataatgaatgggggcgacttaaaatttcatatctacaatatggggaacccaggctttgaggaagagagggctttgttctatgcggcagagattctttgtggcctcgaggaccttcatcgggagaataccgtgtatcgagacctcaagccagaaaacatacttttggacgactatgggcacatcagaatttcagacctgggcctcgctgttaaaattcctgaaggcgacttgatccggggcagagtgggtactgtcggatatatggctcctgaggtgctcaataatcaaagatacggcttgagccccgactattggggactgggttgcctaatctacgagatgatcgagggccagtctccatttaggggcaggaaggaaaaagttaaaagggaggaagtagacagaagagtactggagacagaggaggtgtattcccacaagttcagtgaagaagctaagtccatttgtaagatgctgctcacaaaggatgccaagcagcgcctggggtgccaggaggagggggcagcagaggtgaagcggcatccgttttttcgaaacatgaatttcaagcgcctggaagccggaatgctagacccgccgtttgtgcccgacccccgagcggtctactgcaaagatgtcctggatatcgaacaattctcaaccgtcaagggtgtgaatcttgaccataccgacgacgatttctatagtaagttcagtacaggcagcgtaagcattccctggcagaacgagatgatcgaaacagagtgcttcaaggaactgaacgtatttggtccgaacggtacactgccgcctgacttgaatcggaatcatcctcctgagcccccaaagaagggactcttacagcgcctctttaaacgacaacatcaaaacaatagtaagtcgagtccatcctcaaagactagcttcaaccaccacattaactccaaccacgtcagttccaattcgaccggcagctcctag

SEQ ID NO: 188719 - DNA, 1200 bp, synthetic construct
  misc_feature 1..1200: note = Description of Artificial Sequence: Synthetic coding sequence
  source 1..1200: mol_type = other DNA
atgaccaagtacctgacccccaagagccccgtgttcatcgcccaggttggccaagatttggttagtcagacagaagagaaactgctacagaaaccatgcaaagagctctttagtgcttgcgcgcaaagcgtgcatgagtatctgaggggcgaaccttttcatgagtacctcgattctatgttcttcgacagatttttacagtggaaatggctcgagaggcagccagttacgaagaacacattcaggcagtaccgtgtgctggggaagggcggatttggagaggtatgtgcctgtcaggttcgcgccaccggaaagatgtacgcttgtaagcgtcttgagaagaagcgaatcaaaaagagaaagggagagtctatggccttgaacgaaaagcagattttggagaaagttaacagccagtttgtggtgaatctggcatacgcttatgagaccaaggatgccctgtgcctggtgttgacgattatgaatggaggagacttgaaattccatatttacaacatggggaacccaggatttgaggagggggccgcagaggtaaagagacatcctttctttcggaacatgaactttaaaagattggaggccggtatgctggaccctccgttcgttccagacccaagagcggtctactgcaaagatgtactggatatagaacaattttctacagtcaagggtgtgaatcttgatcacacggatgatgacttttactctaagttcagtacaggctccgtgtctatcccttggcaaaatgagatgatcgagacagagtgctttaaagaattgaatgtcttcggaccaaacggaaccctcccccctgatctaaatcggaatcaccctcctgagccgcccaaaaagggcttactacagaggttgttcaaaaggcaacatcagaacaattcgaagtcctccccttccagcaagtccaccgtggaacccgcacaaacactgctgcttagatctgggtcatccggggcacctgcacttgtaggcctgcctggcgaaacgcctggagccggggagggaggccgaccgtctcgacggaggcggacatcaagatttcttaaggagatctccacccaggtgtgcttccccagacggcccaggccaggttggattggctttgtcttcggggagcactgtaatcgcaatcctataggttacgacaatctacatgtattttag

SEQ ID NO: 188720 - DNA, 1731 bp, synthetic construct
  misc_feature 1..1731: note = Description of Artificial Sequence: Synthetic coding sequence
  source 1..1731: mol_type = other DNA
atggagctggagaacatcgtggccaacaccgtgctgctgaaggcccgggaaggaggcggcggcaacaggaaaggcaagtccaagaagtggcgtcaaatgctgcaattccctcatatttctcaatgtgaggaactgaggctgagtctggaaagggattaccacagcctctgtgagcgccagcctatcggacgtctcctctttcgggagttctgtgctacaaggcctgagctaagcaggtgtgtcgcattcttagacggcgtcgccgagtacgaggtgacccctgacgacaaaaggaaagcatgtgggcgacagttaacccagaacttcctttcacacaccggacccgaccttataccagaagtgccccgacaactcgtaaccaattgtacacaacgcctggagcaggggccttgcaaggacctgtttcaggaactcactcgccttacccacgagtacctgtctgttgctcccttcgccgattacctagactctatttattttaacagattcctgcagtggaagtggcttgagcggcagccggtcactaaaaatacattccggcagtatagagttttagggaaaggtggtttcggggaagtttgcgcctgtcaggttcgcgccacaggcaagatgtacgcctgtaaaaagttagagaaaaaacggatcaaaaagcgaaaaggggaggctatggccctcaacgaaaagcagatcctagagaaagtcaactctcggtttgtggtcagccttgcctatgcgtacgagacaaaggacgctctctgtctggtactgactctgatgaacgggggtgacctcaaattccacatctaccatatggggcaggccggcttcccggaagctagagctgtgttctacgctgcagagatctgctgtggtctagaagatctgcaccgggaacgaattgtctaccgagatcttaagcctgaaaatattctgttggacgatcatgggcacataagaattagtgacttgggcctcgccgtgcacgtccctgaaggccagactatcaaaggcagagtgggaaccgtcgggtacatggctcctgaagtagtgaagaatgaacgatacacgttctcgccggactggtgggccctgggttgcttgctgtatgagatgatagctggacaatcacccttccagcagagaaagaagaaaatcaagcgcgaagaggttgagaggctagtgaaggaggtgccagaagaatacagcgagagattttcaccgcaggcaaggagcctgtgtagtcaactgctatgcaaagatccagcagaacgcctggggtgccgtggcggaagcgccagggaagtgaaagaacaccccttattcaagaagctcaacttcaaacggctaggggctggtatgctggaaccccctttcaaacctgatccacaggctatttactgcaaggatgtcctcgacatcgaacagttttcaactgtgaagggggtcgaattagaacccacggatcaggacttttaccaaaaattcgcaacagggtctgtacctattccctggcagaacgagatggtggagacggagtgtttccaggagctgaatgtgtttggcttggacggaagtgtaccgccggacctggactggaaaggccagcctccagctccgcccaagaagggactgttgcaaaggctctttagtcgacaggactgctgcggtaactgtagcgatagcgaggaggagctgccgacacggctgtag

SEQ ID NO: 188721 - DNA, 1683 bp, synthetic construct
  misc_feature 1..1683: note = Description of Artificial Sequence: Synthetic coding sequence
  source 1..1683: mol_type = other DNA
atggagctggagaacatcgtggccaacaccgtgctgctgaaggcccgtgagggcggggggggtaacagaaagggcaaatctaaaaagtggagacagatgttacagttcccccacatcagccagtgcgaagagctacggcttagtttggaacgggattatcatagcttatgtgagcgccagcctattggtaggcttttattcagagaattttgtgcgacacgtcctgaactgtctcgttgtgtggcctttttggatggagttgcagagtacgaggtcactccggacgataaacgcaaggcttgcggccggcagctcacacaaaacttcctatctcacacggggccggacctcatcccagaggtgcccagacaattggtcaccaattgcacccagcgccttgaacaaggaccctgcaaagatttattccaggaattgacgcggctgacccacgaatatctttctgtcgccccgtttgctgactacctggattccatctatttcaaccggtttctgcagtggaaatggctcgaacggcagcctgttaccaaaaatacctttcggcaatatcgagtgttagggaaggggggcttcggagaagtgtgtgcctgccaggttagagctaccggcaagatgtatgcctgcaaaaagctggagaagaagagaatcaagaagcggaagggtgaggcgatggcattgaatgagaaacagatcttggaaaaggttaactctaggttcgtggtgagcttggcgtacgcatacgagactaaggatgccttgtgtctggtgctcacactgatgaatggcggagatctgaaattccacatatatcacatgggccaagctggttttcccgaggccagagcggtcttctacgccgcagaaatatgttgtggcctcgaagacctacaccgtgagcgcatcgtgtatagggatctgaagccggagaatatactcctggacgatcatggacacattcggatttctgacctaggactcgccgtgcacgttcctgagggccagactataaaaggacgcgtgggcacagtgggctatatggctcccgaggtcgtaaaaaatgagcgatacacattctcccctgactggtgggcccttgggtgtctgctgtacgaaatgatagctggtcagagcccatttcagcaacgcaaaaagaaaatcaaacgtgaagaggtggaacgcctggtcaaggaggtccctgaagagtatagcgaacggttttccccgcaagccagaagtttgtgcagtcagctgctgtgcaaggaccctgctgaacggctgggatgtagaggcgggtccgcgcgggaagttaaagagcacccactgtttaaaaagctaaatttcaagagacttggcgcgggcatgttggagccaccattcaagcctgatccgcaggccatctattgtaaggatgtgctggacatcgagcagttctccactgtgaaaggcgtagaattggagccgactgaccaggacttttatcaaaagtttgcaaccggatcggttccaattccgtggcagaatgaaatggtcgagacagagtgcttccaggagttgaacgtatttggcttagacgggagtgtgcccccagacctcgattggaaggggcagcccccagctcctccaaagaaaggtcttctgcagcgtctgttcagcagacagcgctag

SEQ ID NO: 188722 - DNA, 1770 bp, synthetic construct
  misc_feature 1..1770: note = Description of Artificial Sequence: Synthetic coding sequence
  source 1..1770: mol_type = other DNA
atggagctggagaacatcgtggccaacaccgtgctgctgaaggcccgggagggcggtgggggaaaccgcaaaggcaagtcaaaaaagtggcgccaaatgctgcaattcccccacatcagccaatgcgaggaactcagactaagtttggaaagagattaccactcattatgcgaaagacaacctatcggccgcctgctgttccgcgagttctgcgccacaaggcctgaactgtcccggtgtgtggctttcctcgatggggtagccgaatatgaggtcacccccgatgacaagagaaaagcatgtggccgacagttgacgcagaacttcctgagtcacacaggcccagatctgatacccgaggtaccacgtcagctagtgacaaactgcacacaacggctggaacaggggccctgcaaggacttgtttcaggaactcacccgactcactcacgagtacctcagcgtcgctccatttgcagactacctggacagcatatacttcaaccgctttcttcaatggaagtggctggagcggcagcctgtaaccaaaaatactttcagacagtaccgggtgttgggtaaagggggtttcggggaggtgtgcgcatgccaggtgagggcgacgggaaagatgtacgcttgcaaaaaactcgaaaaaaagcgcattaagaaaagaaagggggaggctatggccctaaacgagaagcagatattagagaaagtgaatagccggttcgtcgtgtcccttgcttatgcctacgaaactaaggacgccttatgcttggtgctgaccctgatgaacggtggtgacttaaagtttcatatataccacatgggccaggccgggttccccgaggctagagcagtattctacgccgcggaaatctgttgcggccttgaggatctccaccgggaacggatcgtctaccgggatctcaagcctgaaaacatcctcctggacgaccatggacacattagaatttcagacctcggcctggcggtgcacgtcccggaagggcagaccattaaaggaagagtgggaacagtggggtacatggccccagaggtagtcaaaaacgagcgatacactttttccccggactggtgggccttagggtgtctcctatacgaaatgatcgcaggccagagtccctttcaacagcggaagaagaagatcaaaagagaggaagtagagcgattggtgaaagaagtgcctgaggaatattctgagcgtttctcaccccaggcacggtctctctgtagtcagctgctctgtaaggaccctgctgaacggctgggatgccggggagggtcagccagggaggtgaaggagcaccccttgtttaaaaaactgaacttcaagcggctgggggcgggaatgttagagccaccctttaagcctgatccacaggcaatctactgtaaggatgtgcttgatatagagcaatttagcacagtgaaaggtgtggagttggagcctacggatcaggatttttaccagaaatttgcaacaggctccgtacccatcccatggcagaatgagatggtggaaacagaatgcttccaagagttgaacgttttcggattagatggctccgttcctccagacctcgactggaaaggtcagccgccagccccacccaaaaagggcctgttgcagagacttttttcacgacagaggatagccgtggagaccgcagcaactgctagaaagtctagcccaccggccagctccccccaaccagaggcccccacctcatcctggagatag

SEQ ID NO: 188723 - DNA, 1662 bp, synthetic construct
  misc_feature 1..1662: note = Description of Artificial Sequence: Synthetic coding sequence
  source 1..1662: mol_type = other DNA
atggtggacatgggcgccctggacaacctgatcgccaacaccgcctatctccaggcaaggaaacctagtgactgcgatagtaaagagctacagagaaggcgaagatccctggcgctacccggacttcaggggtgtgccgaactgcgacagaaactctcactaaatttccactctctgtgtgagcagcagccaatcggacgcaggctttttagagatttcctggctacagtgccaactttcaggaaggctgcgacctttctggaggatgtgcagaactgggagctggcagaggaagggcctaccaaggacagcgctttgcagggattagtcgccacatgcgcgtcggcccccgcacccggtaacccccagccgttcctgtcacaagcggtcgctacaaagtgccaggccgcaacgactgaggaagagagagtggccgcagtgacgttggcgaaggctgaagccatggcctttttgcaggagcagcctttcaaagacttcgtaacctcggcattttacgataagttcctgcagtggaaattgttcgaaatgcaaccagtgtccgacaaatactttacagagtttcgcgttttgggaaagggcggctttggagaggtgtgtgcggtccaggttaagaataccgggaaaatgtacgcctgtaagaaattggacaaaaaaagattaaagaaaaaaggtggagaaaagatggcactgctggagaaggagatcctggagaaggtatcctctccatttatagtgtctctggcttatgcttttgaatctaagacgcatttgtgcttagtgatgtccctcatgaatgggggcgacctaaagttccacatctacaacgtcggtacccggggcttggacatgtcaagggtgattttctatagcgcacagatagcgtgtggaatgctgcacctgcacgaactgggcatagtgtacagagatatgaaacctgagaacgtgcttctggacgatcttggtaattgccggttgagtgacctcggtcttgcagtcgagatgaagggcggtaagcccataactcagagggccggcacgaacggatatatggctccagaaatcctgatggaaaaagtttcttattcttaccctgtggattggttcgccatgggttgcagcatttatgagatggtcgctgggcgcacccctttcaaggactacaaggagaaagttagcaaggaagacctcaagcagcgcaccctccaggatgaagtcaaatttcagcatgacaatttcaccgaggaggccaaggacatctgccggctcttcctggcaaaaaagcctgaacagcggcttggctcacgagaaaaaagtgatgacccaagaaaacaccacttcttcaaaacaatcaatttccctagactggaggcaggcctcattgaacctcctttcgttcctgatcctagcgtggtctacgccaaggacattgccgaaattgacgactttagtgaagtgcgaggggtcgaattcgatgataaggacaaacagttctttaaaaattttgccaccggggcggtgccaattgcatggcaagaggaaattatcgagaccggactctttgaggagctgaacgatccaaaccgaccgaccggctgtgaagaagggaacagctccaaaagtggggtatgccttctgctgtag

SEQ ID NO: 188724 - DNA, 2088 bp, synthetic construct
  misc_feature 1..2088: note = Description of Artificial Sequence: Synthetic coding sequence
  source 1..2088: mol_type = other DNA
atggaggagaagcccggccagccccagccccagcaccaccacagccaccatcacccacatcatcatccacagcaacaacagcagcagccacatcaccaccatcattattacttttacaatcacagccacaatcaccaccaccatcaccaccaccagcagccccaccagtacctccagcacggggcagagggctcacccaaagctcagcccaaacctctgaaacacgagcagaagcacactcttcagcaacaccaggagacaccaaagaaaaaaactggatatggggagctgaacggaaacgctggcgagagggaaattagtctcaagaatttgtcctccgacgaggccaccaaccccataagccgagtgctgaacgggaatcagcaggtggtggacaccagtttaaaacagaccgtgaaggccaatacattcggcaaagccgggataaagacaaagaattttattcagaaaaatagtatggataagaagaacgggaaatcttacgagaataagagcggcgagaaccaatctgtggacaagtccgataccatccctatccccaacggagtggtcacaaacaacagcggttatattaccaatggttacatgggtaagggcgccgataacgatggtagtggctcagagtctggctatacgactcccaagaaaaggaaggcccgacggaatagcgcgaaaggttgcgaaaacctgaatattgtccaggataaaatcatgcagcaggagacatctgtgcccacactgaaacaggggttggaaacatttaagccagattacagcgagcaaaaggggaacagggtcgatgggtctaaacctatttggaagtatgagacaggcccgggcggaaccagtcgcggtaagcccgcggtgggagacatgttacgcaaaagcagtgacagcaaacccggtgtctcaagtaaaaagtttgacgaccgaccaaaaggcaaacatgcttctgccgtcgccagtaaagaagactcctggaccctgttcaagccccctccagttttcccagtggacaatagtagcgccaagatagttccaaagattagctatgcaagcaaagtcaaggaaaacctgaataagacaatccagaattctagtgtgtcccctacttccagttcctcctcctccagttccaccggcgaaacacagacgcagagttcttcccgactttcccaggttcctatgagcgcgctaaaaagcgtaaccagtgccaatttttccaatgggcctgtactggctgggacagacggcaacgtgtatcctcccggtgggcagccactcttgactacagcggccaatactttgacgccaatctcctccggaaccgacagtgtgcttcaggacatgtctttaaccagtgctgcagtcgagcagattaagactagtctgttcatctatccttccaacatgcaaactatgttgctcagtactgctcaagtggacctaccatcacagactgatcagcaaaatctcggggatattttccagaatcaatgggggctatcctttattaatgaaccatccgcagggcctgagactgtgactggtaaatcctcagagcacaaagtcatggaagtcacgtttcagggtgaataccccgctacactcgtttcgcagggcgccgaaatcatcccaagtggtactgaacacccagtgttccccaaggcttacgaactcgagaaacgcacatccccacaagtgcttggttctattctaaaatccggaacaacgagtgaatccggagccttgtccctcgaacccagtcatatcggcgacttgcaaaaggcagataccagttcccagggagccctagtgtttctttctaaagactatgagatcgaaagccagaatcccctcgcttcacctaccaacacccttctgggatcggcgaaagaacagcgttatcaacgaggactggagcggaacgattcctgggggtcctttgacctcagggctgctatcgtgtaccacactaaagagatggagtccatctggaacctccagaagcaggatcctaagaggattataacatataatgaagccatggactctccagatcagtag

SEQ ID NO: 188725 - DNA, 534 bp, synthetic construct
  misc_feature 1..534: note = Description of Artificial Sequence: Synthetic coding sequence
  source 1..534: mol_type = other DNA
atgagccggaagggcccccgggccgaggtgtgcgccgactgcagcgctcctgatcccggctgggccagcatcagccgcggagtgctggtatgtgacgagtgttgctcggttcatcggtctctaggtagacatatcagcatcgtgaaacatctgcggcactcagcctggcctccaacccttcttcagatggtacacacccttgccagcaacggcgctaattctatctgggagcattccttgctcgatccagcacaggtccagagcggtagaagaaaagccaatccacaagataaagttcacccgataaagagcgaattcatccgcgccaaatatcagatgctggcatttgtgcacaaacttccatgtagggatgatgacggcgtcacagccaaagatgacctaacaggacacaggtcttgggccacacctgacattaaccctcacccgaaccgagccactgggacttcagctttgtccgcggcaacacttccgggttcgcaggtcccctggtgcccgccactgagttccccctag

SEQ ID NO: 188726 - DNA, 2313 bp, synthetic construct
  misc_feature 1..2313: note = Description of Artificial Sequence: Synthetic coding sequence
  source 1..2313: mol_type = other DNA
atgagccggaagggcccccgggccgaggtgtgcgccgactgcagcgcaccggatcccggctgggcgtctataagtaggggcgttctcgtatgcgatgagtgttgttctgtgcaccgatccctgggccgacatatctccatagtgaagcacctgcgccactcggcatggccgcccaccttgctgcagatggtgcatactcttgcctccaacggcgctaactctatttgggagcatagtctactcgatcctgcccaggtccagagtgggcgaagaaaggccaatccccaggataaggtgcaccctataaaaagcgaattcattagggctaaataccagatgttggcattcgttcacaaattaccttgtagagacgatgacggcgtcactgccaaagatctcagcaagcagttacacagcagcgtgcgtacagggaatctcgaaacttgcctgcgcctgctgtcgctgggcgctcaagccaacttctttcatccagagaagggtacgactccacttcatgtggcagctaaagctggccagacactgcaggcggagctcttagttgtttacggggctgatccaggtagtcccgacgtcaatggaaggacaccaatcgactacgcaaggcaggctggccaccacgagttggccgaacggctggtcgagtgtcagtacgagcttaccgaccgcctagcgttctacttatgcggacggaagcccgatcataagaacgggcattacatcatccctcagatggccgatcggtccaggcagaagtgcatgagccagagtctagatctcagcgagttggctaaggctgctaaaaagaaactacaggccctgagcaataggctgttcgaggaacttgcaatggatgtttacgacgaggttgaccggagggaaaacgatgccgtctggctcgccacccagaaccattcaacactagttacggaacgcagcgccgttccctttctgccggtgaacccggagtattccgccacccgaaaccaaggtcggcagaagctggcccggtttaatgcccgcgaatttgctacacttatcatcgacattctctccgaagccaagagaaggcagcagggaaagtctctgagctcaccaactgataatctcgagttatcattgcggtcacagagtgaccttgatgatcaacatgattacgactctgttgcaagcgatgaagatactgatcaggagcccctgcgatcaaccggagcgacccgctccaacagagctcgttcgatggatagctccgatctctccgatggggctgtgacattgcaggaatacctcgaattaaaaaaggcgctcgccacatcagaggctaaggtgcagcagttgatgaaagttaacagttctctgtcagacgagctacggcgactgcaaagagaaatccacaagctgcaggccgagaatctacaactgcggcaaccacccgggccggtccctacaccaccattgccctcggagcgcgctgaacacacaccgatggcgcccgggggttcaacgcaccggagagatagacaagctttctccatgtacgagcccggcagtgccctcaagccgtttggtggcccaccaggcgacgaactgaccactcggctgcaaccgtttcattcaacggagctggaagatgatgccatctacagtgtgcacgtcccggcgggtctgtaccgtataaggaagggagtgtctgcctcagctgtgccgttcacaccctcttctcccctcctcagctgttcccaagaagggagccgacatacatccaaacttagcaggcatggctccggcgcagactcggactatgagaatacccaatccggagatcccctcctgggccttgagggaaagagatttctggaactggggaaagaggaggatttccaccctgaactggaatccctggatggggatctcgacccaggacttccatcgacagaggacgttatcctgaaaacggagcaggtaacaaaaaacatccaggaattgttaagagctgcccaggagtttaaacatgattctttcgtgccttgttcggagaaaatccacctcgcagtcaccgaaatggcctctctgtttcctaagaggccagcactcgagcccgtccggtcgagccttagacttctgaacgcgtcagcatacagactacaaagtgagtgtagaaaaaccgtccctcctgagcctggtgcccctgtagatttccagctcctgacccagcaggtgatccagtgcgcatatgatattgcaaaggcagcgaaacagctggttaccattaccacgagagagaagaaacaatag

SEQ ID NO: 188727 - DNA, 1212 bp, synthetic construct
  misc_feature 1..1212: note = Description of Artificial Sequence: Synthetic coding sequence
  source 1..1212: mol_type = other DNA
atgttcgtggccagcgagcggaagatgcgggcccaccaggtgctgaccttcctgctattattcgtaatcacctccgtggcaagtgagaatgccagtaccagccggggctgcgggctggacctcctcccccagtacgttagcctctgtgatctggacgctatctggggaattgttgtggaagccgtcgcgggggcaggagccctaatcaccctgttgctgatgctgattcttttagtgcgactgcctttcattaaagaaaaggagaagaagagtccagtcgggctccactttttattcctgttaggaacgctcggactttttggccttaccttcgcttttataattcaggaagacgagactatatgctctgtccgacgtttcttgtggggcgttctcttcgcactttgcttctcttgtctgctgagccaagcttggcgggtgagacgtctcgtacgccacggcaccgggccggccgggtggcaactagtgggtctggccttgtgcctaatgctggtgcaggtgataattgccgtggagtggctcgtcctgactgttctccgtgatacccggcccgcttgcgcttatgaacctatggacttcgtaatggcactaatttatgatatggttttacttgtggttacacttggattggcactctttacgctgtgtggaaaatttaagcggtggaagctgaatggcgcattcttgttgatcacagctttcttaagcgtacttatttgggtcgcatggatgactatgtacctatttggcaatgtgaagctgcagcagggggatgcatggaacgaccctacactggccatcactctcgctgcaagtggctgggtgttcgtgatatttcatgctatacctgagattcattgtactctcctgccagctctccaggagaacacccctaattattttgacacctctcaaccacgaatgagagagacagcttttgaggaagatgtgcagctccctcgcgcctatatggaaaacaaagccttcagcatggacgagcataacgccgctctcagaaccgccggattcccaaatggctccctcggaaagagaccatctggatcgctcggaaagcgcccctcagcacccttcagatcgaacgtgtaccagcccacggaaatggcagtcgtgctgaacgggggtacaattcctacagccccaccgagccatacaggcaggcacctgtggtag

SEQ ID NO: 188728 - DNA, 1215 bp, synthetic construct
  misc_feature 1..1215: note = Description of Artificial Sequence: Synthetic coding sequence
  source 1..1215: mol_type = other DNA
atgttcgtggccagcgagcggaagatgcgggcccaccaggtgctgacatttcttctactcttcgtgattacatcagttgcaagtgagaacgcaagcacgagccgcgggtgtgggctcgatcttcttccacagtacgtcagcttgtgtgatctggatgctatctggggtattgttgtcgaagccgtggctggcgccggggctcttatcacacttttgctcatgttaattctcctagtgcggctgcctttcataaaagagaaagaaaaaaaaagccctgtggggttacactttttgtttctcctggggacattaggcttgttcgggctaacctttgccttcataatccaggaagacgaaacgatttgtagtgtccgccggtttctgtggggcgttcttttcgctctgtgttttagttgcttgctctcacaggcatggagggtcagacgtctggtgagacacggaactggcccagccggctggcagctggtaggcctggcactttgcctgatgctcgtccaggttataatagccgtggaatggttggtgctgaccgtgctacgggatactcgccccgcgtgcgcgtacgaaccaatggatttcgttatggccctaatctatgatatggttctgctggtcgtcactctcggccttgccctattcaccctctgcggaaaatttaagagatggaagttaaatggcgccttcctgctcattacggcctttctgtccgtactcatctgggtggcctggatgacaatgtatctctttggcaacgtcaagctccagcagggggatgcctggaacgatcctacactggccattaccctggcagccagtggctgggtctttgtgatatttcacgcaatcccagagattcattgcacgcttctgcccgccctgcaggagaacacgccaaactactttgataccagccagccgcgcatgagggaaacggctttcgaagaagatgtgcagctgcctagagcgtacatggagaacaaggctttctcaatggacgagcataatgctgccctcaggacggccggttttcccaacggttcactgggcaaaagaccctccggatcactgggaaaaagacccagtgctccatttcggtcaaacgtgtaccagccaacagagatggcggtggtcttgaacggcggcaccgaaatggtgactcatccgcgcagcctggagagtttcggcgctttctag

SEQ ID NO: 188729 - DNA, 1290 bp, synthetic construct
  misc_feature 1..1290: note = Description of Artificial Sequence: Synthetic coding sequence
  source 1..1290: mol_type = other DNA
atgaaccccccctggagcgtggcctggggccaggagggcttccgggctgggactccggggtctcgctacctgccgaggatgtttgtagcctcagagcggaaaatgagggcccaccaagttctaacttttttactgttgttcgtcatcacaagtgttgcatctgagaatgcatccacatccagggggtgtgggttggatctgctcccgcagtacgtgagtctctgtgatttggatgccatctgggggattgtggttgaggccgttgctggtgccggagctctcattacacttcttttgatgctaatcctgttggtgcgcctgcccttcatcaaggaaaaggaaaagaagtctcctgtggggctgcattttctcttcctgctggggactctcggcttattcggactgaccttcgccttcattattcaggaggatgaaacaatatgcagcgttagaagatttctgtggggagtgttgttcgccctgtgctttagctgtctcctgtcccaggcctggcgagtgcgcagattagtgagacatggcaccgggcccgccggatggcagcttgtgggccttgctctctgcctaatgttagtccaggtgatcatcgccgtggagtggcttgtcctgaccgttctgagggacactcgtcctgcatgtgcgtatgaacccatggactttgttatggctcttatttacgacatggtgctgctggtggtgactcttggactcgcattgttcacactatgcgggaaatttaaaagatggaagctcaatggtgccttcctgttgatcactgccttcctctccgtacttatctgggtcgcatggatgactatgtacctttttggcaacgtgaaactccagcagggagatgcatggaacgatcccaccttggccattacactggccgcctctgggtgggttttcgtgattttccacgcaattcctgagatccattgcactttgctgccagcactgcaagagaacacgcctaactactttgacacaagccaacctcggatgcgggaaactgcatttgaagaggacgtccagctcccccgagcttacatggagaataaggcattttctatggacgagcataatgcagctctgagaaccgccggctttcccaacggttcattgggcaaaagacctagcggcagcctcggcaaacggccttcagccccttttcggtcaaacgtgtatcagccaactgaaatggctgtcgtccttaacggagggactatccccacagcgccaccgtcacataccgggcgccatttgtggtag

SEQ ID NO: 188730 - DNA, 759 bp, synthetic construct
  misc_feature 1..759: note = Description of Artificial Sequence: Synthetic coding sequence
  source 1..759: mol_type = other DNA
atgttcgtggccagcgagcggaagatgcgggcccaccaggtgctgactttccttcttcttttcgtcatcaccagcgttgccagtgagaacgcctctacttcacggggctgcggtttggacctgctgccccagtacgtgtctctgtgtgacctagatgccatttgggggattgtggtggaggccgtggccggcgcgggggcactgataaccctgctcctcatgcttatactattggttcggttgccatttttcctgctcataactgcattcttatcagtcctgatctgggtggcttggatgacaatgtacctcttcgggaacgtcaagctccagcagggcgatgcttggaatgacccaacattagctattactttggctgcaagcggttgggtcttcgttatttttcatgctatcccagagatacactgcactttgcttcctgccttgcaggaaaacacacctaactattttgacactagtcagcctcggatgcgagaaactgcctttgaggaagatgtccagctgccgagagcctacatggagaataaggctttctcaatggacgagcacaatgccgccctgaggacagctggattccccaatgggtctctgggcaagagaccgtccgggtcactgggaaaaaggcccagtgcgccctttagaagcaatgtgtaccagccgacagaaatggccgtggtgctcaatggtggaactatccccaccgccccccccagccacaccgggagacacctgtggtag

SEQ ID NO: 188731 - DNA, 489 bp, synthetic construct
  misc_feature 1..489: note = Description of Artificial Sequence: Synthetic coding sequence
  source 1..489: mol_type = other DNA
atggccatccacaaggccctggtgatgtgcctgggcctgcccctgtttctgttccccgaacaaagctaccaaggcgatatgtatcccacccggggcgtgggttacgagaccattctcaaggagcagaagggtcagagcatgtttgtcgagaataaagcttttagtatggacgaaccagtggccgcgaagagaccggttagcccctacagtggctacaatggacagttattgacgtccgtgtatcaacccacagaaatggccctcatgcataaggtcccaagtgagggagcctacgatatcattttacctcgggctaccgcgaacagccaggtaatgggatccgctaatagcacactgcgtgccgaagatatgtattcagctcagagccatcaggccgccactccccccaaggatggtaagaactcacaggtgtctgagctgacacagaggggccaggccaacactaaccaggtgtttttaagactttag

SEQ ID NO: 188732 - DNA, 1461 bp, synthetic construct
  misc_feature 1..1461: note = Description of Artificial Sequence: Synthetic coding sequence
  source 1..1461: mol_type = other DNA
atgcggggccggggcagccagcagcagcagcccacccggcggcagggtcagaaactgccatcaccaagccctgcagggaaatacgagtctgcacagcccgggggcactcagccagaacccggactaggcgcccggatggctattcataaagccctggtgatgtgtctcggacttccgctgttcttgttcccaggtgcatgggcgcaaggacacgtgcctcccggttgtagccaggggttaaacccactgtactacaatctgtgcgacagatccggggcatggggcatcgtgctggaagcagtagccggagctggtatcgtcaccactttcgttctcaccatcattctggtggcttcactgccgtttgtgcaggatactaagaagcggtctttgttaggaacacaggttttttttctccttggcacactcggcctgttctgtctagtcttcgcctgtgtggtgaaacccgacttctctacttgtgcctcacgtaggttcctgtttggcgttctcttcgccatttgttttagttgcttggccgcccacgttttcgctctgaactttctggcgagaaaaaaccacggccccagggggtgggtgatttttactgtggccttactccttactttggtggaggttattatcaacaccgagtggcttatcatcacactggtgcgggggagcggcgagggcgggccacagggaaacagttctgccggctgggctgtggcatctccctgtgcaatagcaaacatggattttgtgatggccctgatttatgtgatgcttctgttattaggggctttcctaggcgcatggcctgcgctttgtgggagatataaacgctggcggaagcacggagtgtttgtgctgcttactaccgccacatccgtcgccatctgggtggtctggatcgtgatgtatacttacgggaataaacagcacaacagtccaacttgggacgaccctacccttgccattgcccttgctgctaacgcttgggcgttcgtactgttctacgtgattccagaagtgagtcaagtcactaagagcagcccggaacagagctatcagggcgacatgtacccaacacggggtgtcgggtacgagactatcctcaaggagcaaaagggtcagagcatgtttgttgaaaacaaggcctttagcatggacgagccagtggcagctaagcggccagtatccccatacagtggatataatggccagctcttgacctctgtgtaccagcccacagagatggctttaatgcataaagtcccttctgagggcgcatatgacatcatcctaccccgggccacagcaaattcacaagtgatgggaagtgccaatagcacactccgggcggaggatatgtattcggctcagagccaccaagccgcaacccctccaaaggacggcaagaactctcaggtcttcaggaatccatacgtctgggattag

SEQ ID NO: 188733 - DNA, 1326 bp, synthetic construct
  misc_feature 1..1326: note = Description of Artificial Sequence: Synthetic coding sequence
  source 1..1326: mol_type = other DNA
atggccatccacaaggccctggtgatgtgcctgggcctgcccctgtttctttttcccggagcttgggcccagggtcacgtaccccctggctgtagccagggactgaatccactgtactacaatctgtgtgaccgaagtggtgcttggggcatcgtcctcgaggcagtagccggtgccggaatcgtaaccactttcgtgttaacaatcattctcgtggccagcctcccattcgttcaggataccaagaagaggtctcttctggggacccaggtgttcttcctgctcggcaccttggggctcttttgcttggtcttcgcatgtgtcgtcaaacctgacttcagtacttgtgcatcaaggaggtttctgttcggtgttctctttgccatctgtttctcttgtttggcggcccatgtgtttgcattgaatttccttgccagaaaaaaccatggcccccggggatgggtgatcttcaccgtggctcttcttctgactctggtggaggtgataatcaataccgagtggctcatcattacactggtccgaggatctggagaaggtggacctcaaggtaattccagcgccgggtgggccgtcgcttccccttgtgcaatagccaatatggatttcgtcatggcactcatatacgtgatgctattgctgctcggagcattcctcggcgcctggcctgccctctgcggaagatacaaaaggtggagaaaacatggggtgttcgtcctgctgactacagccaccagcgtcgctatatgggtggtatggatcgtgatgtacacctatggtaataaacagcacaactcacctacatgggacgatccaaccttggccatcgccctggcagcgaatgcatgggcgtttgtgctcttttatgttatacctgaagttagccaagtgactaagtcttccccagaacagtcctaccagggggatatgtatcctacccgtggagtcgggtacgaaaccattcttaaagaacagaaggggcagtcaatgtttgtggaaaataaggcgttttcaatggacgaaccagtcgccgctaaacgccctgtgagcccctattctgggtataatggacaactgctgacatctgtttaccagcccacggagatggctctgatgcataaagtgcccagtgagggggcgtatgacatcatcctcccacgcgcaacagccaacagccaggtgatgggttccgccaattcgacattgagagcggaagacatgtattcagctcagagccatcaggccgctacccctccaaaagatgggaaaaattcacaggtatttcgcaacccctacgtgtgggattag

SEQ ID NO: 188734 - DNA, 1329 bp, synthetic construct
  misc_feature 1..1329: note = Description of Artificial Sequence: Synthetic coding sequence
  source 1..1329: mol_type = other DNA
atggccatccacaaggccctggtgatgtgcctgggcctgcccctgtttctgtttcctggagcctgggcacagggtcacgtccctccgggatgtagtcaggggctgaatcccctctattataacctctgtgacagaagtggtgcttggggaattgttctggaggcagttgccggagccggtatcgtgacaacatttgtgctcacaattatacttgttgcctctctccctttcgtgcaggacacaaagaaacggtcactgctggggacccaggtgtttttcctcctgggaacactgggacttttctgtcttgtcttcgcttgtgtcgtaaagcccgatttcagtacctgtgcgagtcgcagattcttatttggggttctgttcgctatatgcttttcctgtcttgccgcccatgtgtttgccctcaatttcctggcgcgcaagaaccacggccctcgagggtgggtgatatttactgttgcgctgctgctgactcttgtcgaggtgattatcaacacggagtggctcataatcaccctcgtgagggggagcggtgaggggggaccacagggaaacagctccgccggctgggcagtggcttcgccgtgcgccattgctaacatggattttgttatggctcttatatacgtcatgttactgctgctcggcgcctttctcggggcatggcccgccctttgcggccggtataaacggtggcgcaagcacggtgtctttgtgttactgactaccgcaacttcagtcgcaatttgggtggtttggattgtcatgtatacctacggaaacaagcagcataatagtccgacttgggatgaccctactctggcaattgccctcgctgcaaacgcatgggctttcgtccttttctatgtgattcctgaagttagccaggtcaccaagtccagccctgagcaatcctaccaaggtgatatgtacccaactaggggcgttggctacgagactattctgaaagaacagaagggacagtccatgtttgtagaaaataaggctttctccatggatgaacctgtggccgctaagcgtcctgtgagtccatatagcgggtacaacggccaacttttgacgagtgtctatcagccaaccgagatggctctgatgcacaaggtgccgagtgagggagcctacgacattatcttaccccgcgccacagccaacagtcaggtgatgggctcagcaaattccaccctgcgggctgaagatatgtactccgcacagtcacaccaggccgcaaccccaccaaaagatgggaagaatagtcaagctcagtcccctcagtctaaaacccgatggtag

SEQ ID NO: 188735 - DNA, 1362 bp, synthetic construct
  misc_feature 1..1362: note = Description of Artificial Sequence: Synthetic coding sequence
  source 1..1362: mol_type = other DNA
atgggcacccagcccgagcccggcctgggcgcccggatggccatccataaggctctggttatgtgcctcgggcttcctctctttctgtttccaggagcttgggcccagggacatgtgcccccggggtgctcacagggactaaaccctttgtactataatctgtgcgacagatccggggcctggggcatagttcttgaggccgtggcgggagcaggtatcgtgacaacttttgtgctcacgatcattctggttgccagcctgccttttgtgcaggacaccaagaaacgaagcctactcggaacgcaggtgttctttttgttaggcactctggggctattttgtctagtttttgcatgtgtggtgaagcctgactttagcacctgcgccagccggcggttcctgtttggagttctgttcgcaatctgcttttcttgtttggcagcgcacgtctttgcacttaattttctcgcccggaaaaaccatggaccccgcgggtgggtgattttcacagtagcactcctgttaactctcgtagaggtcataattaacactgagtggctgattattaccctggtgagaggctccggcgagggagggccacaaggaaacagcagcgcaggatgggccgtagctagcccctgtgccatcgccaacatggacttcgtcatggctctgatctatgtaatgctgcttctgctgggggcctttttgggtgcctggcccgctttatgtggacgttacaaacgctggcgcaagcacggtgtgtttgtccttctgacgaccgcgacttcagtggccatctgggttgtgtggattgtgatgtatacatacggcaacaaacagcacaattctccaacatgggatgaccccacacttgccatcgctctggcggcgaacgcatgggctttcgtcctgttctacgtgattcccgaagtctctcaagtgacaaagagtagcccagaacagtcatatcaaggggatatgtaccccacccggggggttggatacgaaaccattctcaaagagcagaaggggcaatccatgtttgtggaaaataaagccttttctatggatgagcctgtagctgctaagcggccagtttcgccgtactctggatacaacgggcagttgctgactagcgtgtaccaacctacggagatggcgctaatgcataaagtgccgtcagagggagcatatgatatcattttacctcgcgcgacagctaactcccaagttatgggcagcgcaaacagcacactgcgtgccgaggatatgtacagcgcacagagtcaccaagctgctacacccccaaaggatggtaaaaactcccaggtgttcagaaatccatatgtgtgggactag

SEQ ID NO: 188736 - DNA, 597 bp, synthetic construct
  misc_feature 1..597: note = Description of Artificial Sequence: Synthetic coding sequence
  source 1..597: mol_type = other DNA
atgagcaacgtgcgggtgagcaacggcagccccagcctggagcggatggatgctcgccaagctgagcatccaaagcccagcgcttgtcgaaacctcttcggccccgtcgaccacgaggagttgacccgcgatctggaaaagcattgtcgcgacatggaagaggcttcccagcgtaagtggaacttcgattttcagaatcacaaacccctggagggaaaatacgagtggcaggaagtcgagaagggcagcctgccagaattctactaccgccccccgaggccaccgaaaggcgcttgcaaagtgccggctcaggagtctcaggacgtgtctggctcgaggcccgcagctccgttgattggtgcacccgctaacagtgaagacacgcacctggtggatccaaagactgacccaagcgactcccagaccggcttggctgaacagtgtgccggcatccgaaaacgacctgcaactgatgatagttccacccaaaataaaagggccaatcggaccgaagagaatgtctcagacggatcccccaatgcgggcagcgtcgagcagactccaaagaagcctgggctaaggagaagacagacatag

SEQ ID NO: 188737 - DNA, 903 bp, synthetic construct
  misc_feature 1..903: note = Description of Artificial Sequence: Synthetic coding sequence
  source 1..903: mol_type = other DNA
atgtacaaggactgcatcgagagcaccggcgactacttcctgctgtgtgatgccgaggggccctgggggatcatactcgagtccttagcaatcttgggcattgttgttactatcctgctgctgctggcatttctgtttcttatgaggaagatccaggattgtagtcagtggaacgtactgcccactcagctcttgtttctcctatccgtcctcggattgtttggactcgcattcgccttcatcattgagctcaaccaacagacagctcccgtccgctacttcctgtttggagtcctgttcgcattgtgcttcagttgcctgcttgcccacgcaagtaacctcgtgaaactggttcgaggctgcgtgtccttctcctggacaaccatcctgtgtattgccattgggtgtagcttactgcagatcatcatagctacagaatacgtgacactgattatgacccgcggcatgatgtttgtgaacatgacgccgtgtcagctgaacgtggacttcgtggtgctgctcgtttatgtcctcttccttatggccttgacttttttcgtatcaaaagcaacgttttgtggcccttgcgagaattggaagcaacacggacggttgatattcattaccgtgctgttctcgatcattatctgggtggtgtggatcagcatgctcctgaggggcaatcctcagttccaaaggcagccacagtgggacgaccccgtcgtgtgtatcgccctcgtcaccaacgcctgggtattcctgctgctttatattgtgcccgaattgtgcatattgtataggtcctgtcgccaagaatgtccactccagggtaacgcctgtccagtgactgcttaccagcattcattccaggttgaaaatcaagaactgtcaagggattgctag

SEQ ID NO: 188738 - DNA, 363 bp, synthetic construct
  misc_feature 1..363: note = Description of Artificial Sequence: Synthetic coding sequence
  source 1..363: mol_type = other DNA
atgtacaaggactgcatcgagagcaccggcgactacttcctgctgtgcgacgcagagggaccctgggggatcattcttgagtctctggcgatcttgggtattgttgtgaccatactgctgttgctggcctttcttttcctaatgcgaaaaattcaggactgtagtcagtggaacgttcttccgacacagctgctgtttctgctctctgtgctgggcctgttcggactcgcctttgcctttatcatcgagcttaatcagcaaacggcaccagtccggtattttctatttggtgttctgtttgccctgtgctttagctgcctccttgcccacgccagtaacttagtcaaactggtgcgaggatag

SEQ ID NO: 188739 - DNA, 312 bp, synthetic construct
  misc_feature 1..312: note = Description of Artificial Sequence: Synthetic coding sequence
  source 1..312: mol_type = other DNA
atggagaccgtgcaggagctgatccccctggccaaggagatgatggcccagaaacgtaaaggaaagatggtgaagctgtatgtattaggcagcgtgctcgcactcttcggtgtggtgctcggcctgatggaaactgtttgttcaccctttacagccgctcgcagactgagagaccaagaggctgctgtggccgagttacaggccgccctggagcgccaggcactccaaaaacaagcgctccaggagaagggcaagcagcaggataccgtgctgggaggacgcgcactctccaacagacagcatgccagttag

SEQ ID NO: 188740 - DNA, 1500 bp, synthetic construct
  misc_feature 1..1500: note = Description of Artificial Sequence: Synthetic coding sequence
  source 1..1500: mol_type = other DNA
atggagctgagcgagcccatcgtggagaacggcgagaccgagatgtcccccgaggagtcttgggaacataaggaggagatttcagaggccgagccgggtggaggaagcctcggggatggcaggccacccgaggaatctgcgcacgaaatgatggaggaagaggaggaaatcccaaagcctaagtcagttgtggccccacctggcgcacctaaaaaggagcacgtgaatgtggtcttcattggccatgtggacgctggcaagtcaaccattgggggacagatcatgtatctcacgggtatggttgataaacggacacttgagaaatatgaaagagaggcgaaggaaaaaaatcgggaaacttggtatctatcatgggcattagacacaaatcaagaggagagagacaagggaaaaaccgtcgaggtagggcgggcatacttcgagacagaaaagaaacattttaccattttagatgccccgggccacaagtcctttgttcccaacatgataggtggcgccagtcaggccgacttggccgtgctcgtcatatccgcgaggaagggagagtttgagacgggcttcgagaaggggggacagaccagggagcatgcgatgttggccaaaaccgctggcgtaaagcatctgatcgtgctgatcaacaaaatggatgatcctacagtgaactggagcaacgagcgatacgaagagtgcaaagagaagctggtcccatttctcaagaaagtcgggttcaatcccaaaaaggatattcattttatgccctgttcagggctgaccggcgccaaccttaaagagcagtccgatttttgtccatggtatattggtctcccgttcataccctatcttgacaatctgcccaattttaatcggagtgttgacgggcctatacgtctgccaattgtcgataagtacaaagacatgggaaccgtggtgctggggaagcttgaatctggttctatctgtaaaggacagcagttggtgatgatgccaaataagcacaacgtggaagtgctgggtatcctgagtgacgatgtggaaaccgacaccgtagcccccggagagaacctcaagattagactgaagggtatcgaggaagaagagattctcccgggcttcatcctttgtgaccccaataacttatgtcatagcgggaggacattcgacgcccaaatcgtgatcatagagcacaagagtataatatgtcccggctataacgccgtcctgcacattcacacctgcatcgaggaggtggaaatcactgcgctgatttgcttggttgacaagaagagcggagagaagtctaagactagacctcgattcgttaagcaggaccaggtttgcatcgcacgcctgcggaccgccggaaccatctgtcttgagactttcaaggattttccccagatgggacggtttacacttagggacgaagggaagacgattgcaattggtaaggtgctgaagctggttccagagaaagattag

SEQ ID NO: 188741 - DNA, 1914 bp, synthetic construct
  misc_feature 1..1914: note = Description of Artificial Sequence: Synthetic coding sequence
  source 1..1914: mol_type = other DNA
atggaccccggcagcggcggcggcggcggcggcggcggcggcggcggaagcagcagcggctctagctcttctgactccgcaccagactgctgggatcaagccgacatggaggcccccgggccagggccatgtggcggtgggggaagtttggcagctgcggccgaagcacaacgcgagaacctcagcgccgctttctcacgacagctgaatgtgaatgccaaacctttcgtgccaaatgtgcacgctgctgagtttgtcccgtcgttcctgagggggccggcagctcctcctcctccagtggggggggccgctaataatcacggtgctggatctggagcaggaggaagagccgcgcctgtcgagagtagccaagaggagcaaagcctttgcgaaggttcaaattctgcagtcagcatggaactgagcgagcccattgtggaaaacggtgaaaccgaaatgtctcccgaggagtcctgggaacataaggaggagatctccgaagcggaaccaggtggcggaagcctaggggacgggcggccaccggaggaatctgcgcacgagatgatggaggaggaggaggaaataccaaaaccgaagagcgtggttgctcctccaggcgcacccaaaaaggaacatgtaaatgtcgtcttcatcgggcatgtggacgccggcaaaagcaccataggtgggcaaataatgtatctcacaggaatggtggacaaacgtactctggagaagtatgagagggaagcaaaagagaaaaatagagaaacctggtacttgtcatgggccctggacaccaaccaagaagagcgggacaaaggcaagaccgtggaggtcggaagagcctactttgagactgagaagaagcatttcactatccttgatgccccaggccacaaatcgttcgtgcctaacatgataggtggcgccagccaagctgacctggctgtacttgtgatcagtgctcggaaaggggagttcgaaaccgggtttgaaaaagggggacaaacaagagaacacgccatgctcgcaaagactgccggagtcaaacatctgattgtgctgattaataagatggatgatcccaccgttaattggtcgaacgaaaggtacgaggaatgcaaggagaagcttgttcctttcttaaaaaaggtaggtttcaacccaaagaaggacatccatttcatgccctgttcaggcttgacgggcgcgaacctcaaggaacagtcggatttctgcccctggtatattggacttccattcattccctatttagataatcttcctaattttaataggtccgtggacggcccaattagactgccaatcgtcgacaagtacaaggacatgggcacagtggtattgggaaagttggaatccggctctatttgcaagggtcagcaactggtgatgatgccaaataaacataatgtcgaggtactgggaatcctgagtgatgacgtcgagaccgacaccgtggcccctggagaaaacctcaagatacgcctgaagggcattgaggaggaggaaattctgcctggcttcatactctgtgacccaaacaatctctgccacagcggacgaacattcgacgctcagatcgtgattatcgagcataagtctattatttgccccgggtacaacgccgtgttgcacattcacacttgcatagaggaggtggaaataaccgcacttatctgcctggtggataaaaagagtggagaaaagagtaaaaccagacctcgttttgtaaagcaggaccaggtatgtatcgcacgtctgagaaccgccgggaccatctgtttggagaccttcaaggattttccacagatggggcgcttcactcttcgcgacgaggggaagacaattgctattgggaaagtccttaaactggtgcctgagaaggattag

SEQ ID NO: 188742 - DNA, 1911 bp, synthetic construct
  misc_feature 1..1911: note = Description of Artificial Sequence: Synthetic coding sequence
  source 1..1911: mol_type = other DNA
atggaccccggcagcggcggcggcggcggcggcggcggcggcggcggctctagctcaggctcatcaagtagcgatagcgcccccgactgctgggaccaggccgacatggaagctccgggtcccggaccctgcggaggcggtggttctctcgccgccgccgctgaagcacagagggagaacctgtctgctgcatttagtcgccagctcaatgtgaatgctaagccgttcgttcccaatgtacatgctgctgagtttgtccccagctttctgcggggacctgctgcaccccctcctccagttggcggcgctgctaacaaccacggagcgggctccggtgccggagggagagccgcgccagtggagtcatcacaagaagaacaatcactgtgcgagggatcaaattctgccgtctccatggagcttagcgagcccattgagaatggagagacagagatgagtcctgaagagagctgggagcacaaggaggagattagcgaagccgaacccggggggggctccctcggcgatggaagaccgcctgaggagtccgcccatgagatgatggaagaggaggaggaaataccaaagcccaaaagtgtggttgcaccacctggcgcgcctaaaaaggagcacgtcaacgtcgtcttcatcggacatgtggatgccgggaagtctacgatcggcgggcagattatgtaccttaccggcatggtggacaagcgaactctggagaaatacgagcgggaagctaaggagaagaaccgagaaacttggtatctgtcctgggctcttgacacgaatcaggaggagcgtgataagggaaagactgtggaagtcggtcgggcctatttcgaaaccgagaaaaaacacttcaccattctcgatgcacccggacacaagtccttcgtccctaatatgataggcggggcgtctcaggccgaccttgctgttttggtaatctcagccaggaagggcgagtttgagactggatttgaaaaaggtggacagacacgggagcacgcaatgctggccaaaactgccggagtgaagcatctgattgtgctcatcaataagatggacgaccctaccgtgaattggtctaacgagagatacgaagagtgtaaagaaaaactcgtcccctttctcaaaaaagtgggctttaatccgaaaaaggatatccattttatgccctgctcagggctgacgggggctaacctcaaggagcagtcagacttctgcccatggtatataggcctcccttttatcccttatcttgataacttaccaaacttcaacaggagtgtggatggccccattaggctgcccatcgtggataagtataaggatatgggcacagtggttctgggcaaactcgagagtggtagtatctgcaaaggccagcagcttgtcatgatgcctaataagcacaacgtagaagtccttggaatactcagcgacgacgtggaaaccgatactgtggcccccggagagaatttaaagatcaggctgaagggcattgaagaggaggagatactgcctggattcattctctgcgacccaaacaatttatgccacagtggaagaaccttcgacgcccaaatcgtaatcatagagcataagtcaataatatgccctggttataatgcagtgctccacattcacacttgcatagaagaggtggaaattacagctcttatctgcctcgttgataaaaaatctggtgagaagtctaaaacccggccccggttcgtaaagcaggaccaggtatgtatcgcccgcctacgcaccgccggcacaatctgtttggagaccttcaaggacttcccccagatgggccgtttcacactgcgagacgaaggaaaaaccatcgccatcggaaaggtgcttaagctggtgcctgagaaagactag

SEQ ID NO: 188743 - DNA, 1887 bp, synthetic construct
  misc_feature 1..1887: note = Description of Artificial Sequence: Synthetic coding sequence
  source 1..1887: mol_type = other DNA
atggacagcggcagcagcagcagcgacagcgcccccgactgctgggatcaagtggatatggagtcaccggggtctgccccgtccggcgacggcgtgtcaagcgcagtcgcggaagcccagcgcgagccattaagctctgctttcagccggaaattgaatgtcaatgctaaaccctttgtgcccaatgtccatgcagcagaattcgtgccctcttttttgaggggacccacccaaccgccaacattgccagcaggatccggtagtaatgatgaaacatgtacaggggcaggctatccacaggggaagcggatggggcgcggcgctccggtcgagccttcacgcgaggaaccactcgtgagcctagagggctcaaacagtgccgtaaccatggaactgagcgaacccgtggtggaaaatggggaagtggagatggcattggaggaatcttgggagcacagtaaggaggtttcggaagccgagcctggcggagggtccagcggggactctggcccgccagaggagagtggccaggagatgatggaagaaaaggaagagatccggaagtcaaagagcgtgattgtaccctccggcgccccgaagaaggagcatgtgaacgtcgtcttcatcggccacgtcgatgctgggaagagcaccatcggcggccagatcatgtttctcacaggcatggtagataagagaacactggagaaatatgagagggaagctaaagagaagaaccgtgaaacatggtacttgtcatgggcccttgatactaaccaggaggagagagacaaaggcaagacagttgaggtgggccgcgcctacttcgagacagagcgcaaacactttacaatcctcgatgctccaggccataaaagtttcgtacctaatatgataggaggagcatcccaggcagatctcgccgtgctggttattagtgcgagaaagggcgagttcgaaacaggctttgaaaagggcgggcagactcgcgagcacgccatgcttgccaaaacagctggagtcaaacatctgatcgtcctaataaataagatggatgacccaacagtgaattggtccattgagcgctacgaggaatgcaaagaaaagttagtcccctttctcaaaaaggtgggattctcgcctaaaaaggatatccattttatgccatgctccggacttacaggtgcgaatattaaagaacaaagcgatttttgcccatggtacacgggcctccctttcatcccctacctggataacctgcctaactttaacaggagcatcgacgggccaattcgactgcctattgtcgacaaatacaaggatatgggcaccgtagtgttggggaagctcgagtctgggtccatctttaaggggcagcagttggtgatgatgcctaacaaacataatgtcgaggtgctggggatactgtctgacgacacagaaaccgatttcgtcgcaccaggcgagaacctgaagattcggctgaaggggatagaggaagaggagatcctgcccggctttatcctttgcgaccccagcaacctgtgccatagcgggaggacgttcgatgttcagattgtcattatcgagcacaaatccattatttgccctggctacaatgcagttctgcacatccacacgtgcattgaagaggtggagattactgctctcatctccctcgtcgacaagaaaagtggagaaaagtccaaaacccggccacgcttcgtaaaacaagatcaggtctgcattgctcgattgcgcacagccggcacaatttgcctcgagactttcaaggatttccctcaaatgggcaggttcaccctgcgcgacgaaggcaagacaatcgctatagggaaggtcctcaagttggttcccgaaaaggactag

SEQ ID NO: 188744 - DNA, 1638 bp, synthetic construct
  misc_feature 1..1638: note = Description of Artificial Sequence: Synthetic coding sequence
  source 1..1638: mol_type = other DNA
atggacagcggcagcaacgacgagacctgcaccggcgccggctacccacaggggaagcgtatgggccggggcgccccagtggagccttctagagaggaacctctggtgagcttggaaggttccaattctgcagtgactatggagctgtctgagccagtagtggaaaacggtgaggtggaaatggcactggaggagtcttgggaacactctaaggaagtatcagaagcggaaccggggggcgggagcagcggtgatagcggcccccccgaagaaagcgggcaggagatgatggaagagaaggaagagattcgaaagtccaaatccgtgattgtgccatcaggtgccccgaaaaaggagcacgtgaatgtggtgtttattggacacgtggatgctgggaaatcaaccatcggaggacaaatcatgtttttgactgggatggtcgataagcggactttggagaaatacgaacgcgaagctaaagagaaaaatcgggaaacatggtatctttcgtgggcactggatactaaccaagaagaaagggataaaggcaagaccgtggaagtcggtagggcttatttcgagacagagagaaagcactttaccatcttggacgcacccgggcacaagtcttttgtgcccaacatgattggcggcgcctcacaggccgacctggctgttctggtgatttctgcacgaaagggagaatttgaaacaggatttgaaaaaggaggccaaacaagggaacacgccatgcttgccaaaacagccggagttaaacatctcatcgtgctgattaataagatggacgatcctactgtaaattggtccattgagcgttacgaagagtgcaaggaaaagctcgtgccgttcctgaaaaaagtcggcttcagtcccaaaaaggatattcatttcatgccgtgctctggcctgacgggcgccaatataaaagagcaaagcgatttttgtccatggtatacaggccttccctttatcccatatcttgataatctccccaatttcaacaggagtatcgacggccctattagattgcctatagtagacaagtataaagatatgggtaccgtggttctcggaaagcttgagtcaggaagcattttcaaaggccaacagttggtgatgatgccgaataagcataatgtcgaagtactcggcatcctaagtgacgacaccgaaaccgactttgttgctccaggggagaatcttaagatcaggttgaaaggcatcgaagaggaggaaatcctgcctggttttattctgtgtgatccttcaaacctgtgtcactccggtcgtacgtttgacgtgcagatagtgatcatagaacacaaatcaatcatatgtcccggctacaatgcagtactgcacatacacacatgcattgaggaggtggaaattaccgcgctgatttcactcgtggacaagaagagcggtgagaagtctaaaacacgccctcgcttcgtaaagcaggaccaggtatgtatagccaggctacgcactgccggaaccatctgtttagaaacatttaaagattttccccagatgggacgcttcaccctgagggatgaaggcaaaacaatcgccatcgggaaagtccttaaactggtgcccgaaaaagactag

SEQ ID NO: 188745 - DNA, 1365 bp, synthetic construct
  misc_feature 1..1365: note = Description of Artificial Sequence: Synthetic coding sequence
  source 1..1365: mol_type = other DNA
atgaccaagcgggaggccgaggagctgatcgagatcgagatcgacggcacggagaaggctgagtgtaccgaagaatccatcgtagaacaaacgtacgcccctgccgaatgtgtgagtcaggctatcgacattaatgagccgattggcaatctcaagaaacttctggaacctagactccagtgtagccttgacgcccatgagatatgtttgcaggatatccaactggatccagaacggtctctgtttgatcagggagtgaaaacagatgggacagttcaactctcggttcaggttatatcctatcagggcatcgaaccaaagctgaatattcttgaaatcgttaaacctgctgatacagttgaagtggtgattgacccggacgcacaccacgccgagtccgaggctcacctggtcgaggaggcacaggtgatcaccttggacggaacgaagcacattacgaccatctctgatgaaacatccgaacaggtgacgcggtgggcagctgcactagaagggtataggaaagagcaggagaggttaggtatcccctacgatcccattcagtggtctaccgatcaagtgcttcactgggtagtgtgggttatgaaagaattcagcatgacagatatcgacctgactacactgaacatctctggtagggagttatgcagtttaaaccaagaagacttttttcagagggtgccaaggggtgaaattttgtggtcccaccttgagctgctgcgtaaatacgtccttgcctctcaagaacagcagatgaatgagatcgtgaccattgaccagcctgtccagatcatccccgctagcgttcaatccgcaacccctactacaataaaagtgatcaacagcagtgcaaaggctgcaaaggttcagcgggcaccacgcatctctggcgaagataggtcgagtccgggaaacagaacaggaaacaatggccagatccagctgtggcagttcctgctagagctgttgaccgataaggatgctcgcgactgcatttcctgggtaggcgacgagggcgagttcaaattgaaccagcccgaactcgtggcccagaagtggggtcaaaggaagaacaaaccaacgatgaattatgaaaaattgagccgagccctccggtactattacgacggagatatgatatgcaaagtgcagggaaagagattcgtctataagtttgtttgcgatctcaagaccctgattggttattccgcagcagagctcaatagactcgtgacagagtgtgaacagaaaaagctggcaaagatgcaacttcatgggatcgcccagcccgtcaccgctgtagccctggctactgcatcactgcagacggagaaggataactag

SEQ ID NO: 188746 - DNA, 1365 bp, synthetic construct
  misc_feature 1..1365: note = Description of Artificial Sequence: Synthetic coding sequence
  source 1..1365: mol_type = other DNA
atgaccaagcgggaggccgaggagctgatcgagatcgagatcgacggtacagaaaaagccgagtgtacagaagagtctatagtggaacagacttatgcgccagccgagtgcgtgtcccaggctatcgatatcaacgagccgatcggcaatcttaaaaagctcttggagcctagactgcagtgctctttagatgcccacgaaatctgtctacaggatatccagctcgaccctgaacgtagtctctttgatcagggcgttaaaaccgacgggacagtgcaacttagcgtccaggtcatcagttaccagggcattgaacctaaactgaacatcctcgaaattgtgaagcccgccgacacagtagaggtggtcattgacccagacgcccaccatgcagagtctgaggctcacctcgtcgaagaggcacaagtcatcaccctggacggaactaagcacatcacgacaataagcgatgagacaagtgaacaggtcaccagatgggcggccgcactggagggctatcgcaaagagcaggagaggttggggatcccttatgatcccatacaatggagcaccgaccaggttctccactgggtagtttgggtaatgaaagaattcagcatgactgacatagacctgaccaccctgaatataagcggtcgcgaactctgcagcctgaatcaagaggatttcttccaacgggtgccacgtggtgaaattctgtggtcacacctcgaactattgaggaaatatgtccttgcctcccaagaacaacagatgaacgagatcgttacgattgaccagcctgtccagattatccccgcatcagtgcaaagtgctacgccaacaaccatcaaagtcataaattccagcgcaaaggccgcaaaggtgcagagggctccgcgtatttcaggcgaggaccggtccagcccaggaaaccgtaccggaaacaacggccagatccaactctggcagttccttcttgagctgctgacagacaaggatgctagagactgtatttcatgggtgggcgatgagggtgagtttaagctaaaccagccggagttagttgcacagaagtggggccaaaggaaaaataagccaactatgaattatgagaagctgtcacgtgccctgagatactattatgatggtgacatgatttgcaaggtgcagggcaagagatttgtttataaatttgtttgcgacctcaagacactaattggctatagcgctgccgaactgaataggctggttaccgaatgcgagcaaaagaagctcgcaaaaatgcaactgcacggaatcgcccagcctgtaactgctgtggcactggctaccgcttccctgcagaccgagaaagacaactag

SEQ ID NO: 188747 - DNA, 2163 bp, synthetic construct
  misc_feature 1..2163: note = Description of Artificial Sequence: Synthetic coding sequence
  source 1..2163: mol_type = other DNA
atggcccagggcctggaggtggccctgaccgacctgcagagcagcagaaacaatgtgcgccatcacaccgaggaaataacggtggatcatctgttagtgaggagaggccaggctttcaatttgaccctgtatttccgaaatagaagtttccagccaggtctcgacaacatcatattcgtggtcgagactggaccactgcctgatctggcgctgggtactagagccgtcttttctctagcaagacaccattccccgtctccctggattgcctggctggaaacgaatggagccacaagcacggaagtcagcctctgcgcgcccccaaccgctgcagtcgggcggtatctccttaagatccacattgattcatttcaagggagtgtcactgcataccagctgggggagttcattctgctattcaatccatggtgccctgaagacgcagtttaccttgacagtgaaccacagagacaagagtacgtgatgaatgactacggtttcatttaccagggatccaaaaactggatcaggccatgtccatggaattatggtcagtttgaggacaaaatcattgacatttgtcttaagttgcttgataaaagcctgcattttcagacggatccagccacagactgtgccctaagggggtctcccgtctacgtgagtagggttgtgtgtgccatgattaactctaacgacgacaatggggtgctaaatggtaactggtcagaaaactacaccgatggcgccaatcccgccgagtggaccggatccgttgctatcctcaaacaatggaatgcgactgggtgtcagccggtgcgctacgggcagtgttgggtattcgccgcagtaatgtgtaccgtaatgagatgtcttggcattccgactagagtgattaccaacttcgactcaggccacgacactgacggcaaccttatcatcgatgagtactacgacaatacaggacgcatcctgggaaataaaaaaaaggataccatttggaatttccatgtctggaacgaatgttggatggctaggaaggacttgcctcctgcctatgggggttggcaggtgctggatgccacacctcaagaaatgagtaacggcgtctattgttgtggtccggccagcgttcgcgccataaaagagggcgaagtggacctgaactatgatacaccttttgtgttcagcatggtgaatgcagactgcatgagctggctggtacaggggggaaaagaacagaagctgcaccaggatacctcctcagtgggtaactttatctcgacaaaatcaatccagagtgatgaacgcgacgacataacagagaattataaatacgaggagggttccttgcaggaacgccaggtgtttctgaaggctctgcaaaaacttaaggcaagatcctttcatggttctcaacgcggcgcagagctgcagcccagccgtcctaccagcctctcacaagacagtccgagatccttgcacaccccaagtcttagacctagcgatgtcgtgcaagtgagtctcaagttcaagttactcgatcctccaaatatgggacaagatatttgtttcgtgctgctagctctcaacatgtcatcgcagttcaaggatctgaaggtgaatctgtcagcacagagcttgctgcacgatggttcaccactgagtccattctggcaggacacggccttcataactttgagccccaaagaggctaagacctacccctgtaaaatatcttattctcagtactcccagtacttaagcaccgacaagctgatcagaatttccgccttgggcgaagagaaatcttcacctgaaaagatcctggttaacaaaattataaccctctcttatccttccatcaccatcaacgtgctgggcgccgccgtcgtcaaccagccactgagcatccaggtgatttttagcaaccccctgagtgaacaggtcgaggactgtgtccttacagtggaaggaagcgggctgttcaaaaagcagcagaaagtgtttctgggcgtgctgaaaccccagcaccaggcatccatcattttggaaacagtgccttttaagtctgggcaacgacaaattcaggccaacatgagatccaacaaattcaaggatatcaaaggctaccggaacgtatacgtcgactttgcactgtag

SEQ ID NO: 188748 - DNA, 1047 bp, synthetic construct
  misc_feature 1..1047: note = Description of Artificial Sequence: Synthetic coding sequence
  source 1..1047: mol_type = other DNA
atgagcctggtggacctgggcaagaagctgctggaggccgcccgggcagggcaggacgatgaggttcgcatcctcatggccaacggagccccctttacaacagattggctgggaacgagccctctgcacctggcagcacagtatggacactactccactaccgaagtcctgctccgcgccggagtttcccgagacgccagaactaaggtggaccggacccccctgcacatggcagcctctgagggccatgcatcgatcgtcgaagtgctgctaaaacacggtgctgatgttaatgccaaagacatgctcaaaatgaccgcactgcattgggctactgaacataatcaccaggaggtggttgagctgctgataaaatacggggccgacgtgcatacccaaagcaagttctgcaaaaccgctttcgacatttctattgataacggcaatgaagatttggcagagattctgcagatagctatgcagaaccagattaacaccaacccggaaagtcctgacacagtgacaatccacgccgctaccccccagtttattatcggccccggtggggtcgtcaacctgaccgacgaaacgggcgtgagcgctgtccagtttggcaactcgtcaacctccgtactagcgacacttgctgcacttgccgaggccagcgcccctttatctaacagctctgaaacaccagttgtcgcgaccgaagaggtagtgaccgccgagtcggtggacggggccatccagcaggttgtctcctccggggggcaacaggtgatcacaatagtcacagacgggatccagctcggcaatcttcatagtatccccaccagtggaatagggcaacctattatcgtgactatgccagatggccagcaagttctgactgtccccgccaccgatatcgccgaggagacggtcatcagcgaggagcctcccgccaaacgccagtgcattgagataatcgagaacagagttgagtctgcggaaattgaggtaaggtcccttctccccggagtactgtgccgcagtcatcccaagtag

SEQ ID NO: 188749 - DNA, 1152 bp, synthetic construct
  misc_feature 1..1152: note = Description of Artificial Sequence: Synthetic coding sequence
  source 1..1152: mol_type = other DNA
atgagcctggtggacctgggcaagaagctgctggaggccgcccgggcagggcaggacgatgaagtgagaattctgatggcaaacggtgcccccttcacaacggactggttgggcacttcacctctccaccttgccgctcagtacggccactactcaacgactgaggttctgctgcgcgcaggtgttagtcgcgacgcacggactaaagtggatagaacaccgcttcacatggcggcttctgagggccacgcctccattgtcgaggtgctgcttaaacacggtgcagacgtgaatgccaaggatatgctgaaaatgacagctttgcactgggccacggaacacaatcaccaggaggtggtcgagcttttgatcaaatacggcgcagatgttcatacccagtcaaaattttgtaagacagcgtttgacatctctatagacaatggcaacgaggatctggcagagatcctccaaatagccatgcagaatcaaatcaataccaaccccgagagccccgatactgttaccatccatgctgccaccccccaatttatcattggcccaggtggagtagttaacctgaccgacgagacgggtgtgtctgccgtccagttcgggaactctagcacatccgtgctagccaccctggccgctctagccgaggcgagtgcacccctgtctaacagctctgagaccccagtggtcgcaaccgaggaagtcgtaacagctgagagcgtagacggcgcgattcaacaagtggtgtcgtctggaggacagcaggtgattaccatcgttacggacggaattcagctgggaaaccttcactctattccaacctctggaatagggcagccgatcattgtgacgatgcccgatggtcagcaggtgctcacagtgccagctacggacatcgctgaggaaacagttataagcgaagagccaccagccaagagacagtgtatcgaaatcatcgagaacagggtcgagtctgcagagatcgaagagagagaagcacttcaaaagcagttagacgaggcaaatcgggaagcacagaagtaccggcagcaactgctaaaaaaggagcaggaagccgaggcctacagacaaaaactcgaagcgatgacgagactgcagacgaataaggaagccgtgtag

SEQ ID NO: 188750 - DNA, 1047 bp, synthetic construct
  misc_feature 1..1047: note = Description of Artificial Sequence: Synthetic coding sequence
  source 1..1047: mol_type = other DNA
atgagcctggtggacctgggcaagaagctgctggaggccgcccgggccggccaggatgacgaggtgagaattctgatggccaatggtgcgcccttcaccactgactggttgggcacaagtcccctgcacctggccgcacagtacgggcattattctacaaccgaagtactcttgcgtgctggggtctccagagacgccaggacgaaagttgatcgcaccccactgcacatggcggccagtgaaggtcacgccagcattgtggaagtgctgctgaaacatggtgcagatgtcaacgcaaaggatatgctcaagatgaccgccctgcactgggccacagagcataaccatcaggaggtcgtggagctgcttataaagtacggagcggacgtccacacgcagagcaagttttgtaagaccgcctttgacattagtattgacaatggcaatgaggatcttgctgagattctccagattgcaatgcagaatcagataaacaccaacccggaaagtcccgatactgtgactattcatgcggccacccctcagtttatcatcggaccaggcggagttgtgaacctgacggatgagaccggtgtatctgcggtgcagttcggaaacagcagtacatctgtgctcgccacactcgcagcacttgctgaagcgtctgcaccactgtctaattcaagcgaaactcctgtggtggcaacggaggaggttgtcaccgccgaaagcgtcgatggcgcaatacagcaggtagtatctagtggaggacagcaagtaatcaccatcgtgacggatgggatacagttgggaaacctgcattctatccctacctcgggaattggccagcctataatcgtgactatgcctgatgggcagcaagtgctcacggtccccgccacggatatagctgaagagaccgtgataagcgaagaacctcccgccaagcgacagtgcatcgagatcatcgagaatagggtggaatcagcagaaattgaagttaggtctttactgccgggggtgctgtgcaggtcccatcccaaatag

SEQ ID NO: 188751 - DNA, 1083 bp, synthetic construct
  misc_feature 1..1083: note = Description of Artificial Sequence: Synthetic coding sequence
  source 1..1083: mol_type = other DNA
atgagcctggtggacctgggcaagaagctgctggaggccgcccgggccggacaagatgatgaggtgagaatcctcatggccaatggggcgccattcaccacggactggcttggtaccagccctctgcatctggcagctcagtacggccactatagcacaactgaagtactcttgcgtgcaggcgtgtccagggacgcgaggactaaagttgacaggacgccgttacacatggccgcgagtgaggggcacgcttcgattgtagaggtcctcctgaaacacggcgcagacgtcaacgccaaggatatgctcaaaatgaccgcgctgcactgggccactgagcataatcaccaggaggtggtggagttactgattaagtatggagccgacgtccatacacagagtaaattctgtaagacagcattcgacatctctattgataacgggaacgaggacttagctgagattctgcagattgccatgcagaaccagatcaacaccaatccagaaagccccgatacagtaacaatccacgcagcgacaccccagtttatcataggccctggcggagtggttaatctcacagggctggttagttcggagaactctagcaaggccactgatgagaccggcgtctcagctgtccaattcggcaactcgagcacatcagttctggctacgttggccgcactggcggaggcgagcgcaccactgtccaattcaagtgaaacccctgtagtagccactgaagaagtggtcactgctgaatctgtggacggcgccatacaacaggtcgtgagctccggaggtcagcaggttattactattgtcaccgacgggatccagctgggcaacctgcactccattcccaccagcggcataggccaacccatcatcgtgacaatgcctgatggtcagcaagtcctcacggtgccagccacagacatcgccgaagagacggtgattagcgaggagccaccagccaagcgacagtgcatcgagataatagaaaatagagttgagtctgcggagattgaggttcgaagcctgctgcccggggtgctgtgccggagccaccccaagtag

SEQ ID NO: 188752 - DNA, 270 bp, synthetic construct
  misc_feature 1..270: note = Description of Artificial Sequence: Synthetic coding sequence
  source 1..270: mol_type = other DNA
atgagcctggtggacctgggcaagaagctgctggaggccgcccgggcagggcaggacgatgaggtccggatactcatggcgaatggagccccctttactacagattggctgggcacttcccccttgcatctggcagctcagtatgggcactattccaccaccgaggtgctgcttagggcaggtgtgtcccgagacgctagaacgaaggttgatcgcacgccacttcatatggcagctagtgaagggcacgcctcaatcgtggaagtgtag

SEQ ID NO: 188753 - DNA, 270 bp, synthetic construct
  misc_feature 1..270: note = Description of Artificial Sequence: Synthetic coding sequence
  source 1..270: mol_type = other DNA
atgagcctggtggacctgggcaagaagctgctggaggccgcccgggccggccaggatgatgaagtgcggatattgatggccaacggtgccccttttactactgactggctgggcacatcccccttgcaccttgcagctcagtatggccactactctaccactgaggtcctgctacgggcaggggtctcaagggacgcaagaacgaaggtagatagaactccactccacatggccgccagcgagggccacgcttcaatcgtcgaggtatag

SEQ ID NO: 188754 - DNA, 354 bp, synthetic construct
  misc_feature 1..354: note = Description of Artificial Sequence: Synthetic coding sequence
  source 1..354: mol_type = other DNA
atgaagttcgtgtacaaggaggagcaccccttcgagaagcggcggagcgagggggaaaagatacggaagaagtaccccgatagagtccctgttattgtggaaaaggcacccaaggcccggatcggagatctggataagaaaaagtacctggtcccttcagacctcaccgtcggacagttttattttttgattagaaaaagaattcatctgcgggcggaagacgccttgttcttcttcgtcaacaacgtaattccacccacctcagcgacgatggggcagctctaccaagaacaccacgaagaggattttttcctgtatatcgcctattccgacgaatcggtgtacggcctgtag

SEQ ID NO: 188755 - DNA, 354 bp, synthetic construct
  misc_feature 1..354: note = Description of Artificial Sequence: Synthetic coding sequence
  source 1..354: mol_type = other DNA
atgaagttccagtacaaggaggaccaccccttcgagtaccggaagaaagaaggggagaaaattcgtaaaaagtacccagaccgggtcccagtaatcgtggaaaaggctcccaaggctcgagtgcctgatttggacaaaagaaaatacttagtgccgtcggacttgaccgttgggcagttttattttttgatcaggaagaggattcatttgcggccagaggatgccctgtttttttttgtgaacaacacaataccaccgacttccgctacaatgggacagctttacgaagacaaccacgaggaagattatttcctttacgtcgcgtactccgatgaatctgtgtatggtaagtag

SEQ ID NO: 188756 - DNA, 441 bp, synthetic construct
  misc_feature 1..441: note = Description of Artificial Sequence: Synthetic coding sequence
  source 1..441: mol_type = other DNA
atgaagttccagtacaaggaggaccaccccttcgagtaccggaagaaagagggcgaaaagatcaggaaaaagtatcccgatcgggtgccggtgattgttgaaaaagctcccaaggcacgggttccagacctggacaaacgcaagtaccttgttccctctgatctgacggtgggacagttctatttcttgatacgcaaacgcattcacctgcgtcctgaggatgctctgttctttttcgtcaacaataccattccgccgacatccgctaccatggggcaactttacgaagtcatggtacttgtcgcccagtactggatgcctagttccgccgtgtggcatcctttggccttggtgctcgatgccctgattacccatttaaggtccggcgctgaaggcgtgatctaccccgacccattgacttacggctcggttaggctctag

SEQ ID NO: 188757 - DNA, 441 bp, synthetic construct
  misc_feature 1..441: note = Description of Artificial Sequence: Synthetic coding sequence
  source 1..441: mol_type = other DNA
atgaagttccagtacaaggaggaccaccccttcgagtaccggaagaaagagggagaaaagatccgcaagaaatacccagatcgggtcccggtcattgtggagaaggcccctaaggctagggtcccagacctggataaaaggaagtacttggtaccatcagatctgacagtggggcagttttatttcctgattaggaaacgcattcatttgcgccctgaagacgcactgttttttttcgtcaataatacgattccccctacaagcgctactatgggccagctgtacgaggtcatggtcctggtcgcccagtattggatgccctcatcagcggtgtggcatccacttgctctggttttggatgctttgatcactcacctgcgatccggggcagaaggtgtgatctatccagatccgttaacctacgggtccgtgagactgtag

SEQ ID NO: 188758 - DNA, 213 bp, synthetic construct
  misc_feature 1..213: note = Description of Artificial Sequence: Synthetic coding sequence
  source 1..213: mol_type = other DNA
atgaagttccagtacaaggaggaccaccccttcgagtaccggaagaaagagggggagaagatccgaaaaaaatatcccgacagggtgccggtgatagtcgagaaggctccaaaggcacgagtgccagacctcgataaaaggaaatatctggtcccctcggatcttacggtggggcagttctatttcttgatcagaaagcgaattcatctctag

SEQ ID NO: 188759 - DNA, 354 bp, synthetic construct
  misc_feature 1..354: note = Description of Artificial Sequence: Synthetic coding sequence
  source 1..354: mol_type = other DNA
atgaagttccagtacaaggaggaccaccccttcgagtaccggaagaaggagggcgagaagattcggaagaagtaccctgatagggtgcctgtgattgtggagaaggctcccaaagctcgggtaccagacctggataaacggaagtaccttgtacctagtgatctgacagtgggccagttttatttcttgatacgaaagcggattcacctacggcctgaggatgccctgtttttttttgttaacaatactatccctcccacctccgccactatgggccaactttacgaagacaaccacgaggaggattactttctttacgtggcctattctgacgaaagtgtgtacggtaagtag

SEQ ID NO: 188760 - DNA, 354 bp, synthetic construct
  misc_feature 1..354: note = Description of Artificial Sequence: Synthetic coding sequence
  source 1..354: mol_type = other DNA
atgaagtggatgttcaaggaggaccacagcctggagcaccggtgcgttgaatcagctaaaatcagggccaaatacccggaccgggtacccgttatcgtcgaaaaggtctctggttcccagatcgtcgatatcgacaaacgcaagtaccttgtgccctccgatatcacggtggcacagtttatgtggattattaggaaacgcattcagcttccttctgagaaagcgattttccttttcgtcgataaaaccgtgccacaatcttcactgaccatgggtcagctgtatgaaaaggagaaggacgaggacggctttctgtacgtggcctacagtggtgagaatacatttggcttctag

SEQ ID NO: 188761 - DNA, 1344 bp, synthetic construct
  misc_feature 1..1344: note = Description of Artificial Sequence: Synthetic coding sequence
  source 1..1344: mol_type = other DNA
atgcccgtgctgtacgaccggctgctgaagctgaaggagatgttcaactccaagttcggaagtattccaaagttctatgtccgcgcacctgggcgcgtgaacattattggggaacacatcgattactgcggatacagtgtcttgcccatggctgtggaacaagacgtgttgattgcggtggaaccggtgaagacctatgcactccagttggcgaacactaatccattgtatcccgactttagcacgagcgccaacaatattcagatcgacaagaccaaaccactatggcacaattattttctttgcgggttgaaaggaatccaggagcacttcggactgagcaacctcactggcatgaactgtctcgttgatggcaacatccctccgagtagtggtttgtctagctcttcagctttagtctgttgtgcagggctcgtgactctaacagtgctgggcaggaacttgtctaaggttgagctcgcggagatctgtgccaaatccgagcggtacattgggaccgaaggcgggggaatggatcagagcatttctttcctggcagaggaaggaactgctaagttgatagagttctctccgttacgggctaccgacgtgaagcttccttctggcgccgtctttgtcatcgctaactcatgtgtagaaatgaataaggccgcaacttctcactttaatattagagtgatggagtgtcgcctggccgccaagctccttgctaagtacaaatccctccagtgggataaggtccttcgactggaagaagtgcaggcaaaactgggaattagtctggaagaaatgctcctggtgactgaagacgcgctccaccctgagccttataatcctgaagagatatgccgttgcctcgggatctcgttagaagaactcaggacccagatccttagtcccaatacccaggatgttctcatcttcaaattatatcagcgggcgaagcatgtgtacagcgaggcggcgagagtactccagtttaagaaaatttgcgaagaagcccctgagaacatggtccagctgttgggagagctcatgaatcagtctcatatgtcttgccgcgatatgtatgaatgctcatgcccagagttagatcaactggtcgacatttgccggaagtttggcgcccagggatccagactcacaggcgccgggtggggtggttgcaccgtgtcaatggttcctgctgacaagctccctagcttcctcgctaatgtccacaaggcgtattaccagagaagtgacgggagcttggcacccgaaaagcagagtctattcgcaaccaaacccggcggaggggcccttgtgctgctggaggcatag

SEQ ID NO: 188762 - DNA, 1305 bp, synthetic construct
  misc_feature 1..1305: note = Description of Artificial Sequence: Synthetic coding sequence
  source 1..1305: mol_type = other DNA
atgttcaacagcaagttcggcagcatccccaagttctacgtgcgggcgccagggcgtgttaatattatcggtgaacatatcgattattgcgggtactcggtgctgcccatggctgtcgagcaggacgtgctaattgcagtagaacccgtcaaaacctatgcattgcagctcgccaacaccaacccgctgtatccggacttctctacctccgctaataacattcaaatcgacaagacgaagccgctttggcacaattattttctgtgtgggctgaagggtatccaggagcacttcggcctgtcaaatttaacagggatgaactgtctggtggatgggaacattccgcctagtagcggactgtcctcctccagcgccttagtttgttgtgcgggattggtgacgctcactgtgctcggccggaacctatcaaaggtagagctggctgaaatttgcgccaaaagcgagagatatattggcaccgaaggcggtggcatggaccagagtatctctttcctcgcggaggaggggaccgcgaagctgattgaattctcaccactgcgcgccaccgacgtcaagctgccttctggggccgtgttcgtgattgcgaacagttgcgtggaaatgaataaggccgcgaccagtcactttaacattcgagtgatggagtgtcgcctggctgccaaactccttgcgaagtacaaatctttgcagtgggacaaagtactgagactggaggaagtccaagccaaacttggtattagcctcgaggagatgcttcttgtgaccgaagacgcactgcaccctgaaccatacaaccccgaggagatttgtcggtgtctaggtatcagcctggaggagctccggactcagatactgagcccgaatacacaggacgtcctgatcttcaagctgtaccagagagctaagcacgtctactcagaagctgccagggtactgcagtttaaaaaaatttgtgaagaagccccagaaaatatggtgcagcttctgggagaactgatgaaccagtcacacatgtcctgtcgggacatgtatgagtgcagctgccctgagttggaccagctcgtggatatttgccgcaagtttggcgctcagggttctcgcctcaccggagccgggtggggcggatgcaccgtgagtatggttcctgcagacaaattgccatctttcctggctaacgtgcacaaggcctattaccagcggtcagatgggagccttgccccggagaagcaatctttattcgccacaaaacccggcggcggcgctttggtgctcctcgaggcctag

SEQ ID NO: 188763 - DNA, 624 bp, synthetic construct
  misc_feature 1..624: note = Description of Artificial Sequence: Synthetic coding sequence
  source 1..624: mol_type = other DNA
atgaactgcctggtggacggcaacatcccccccagcagcggcctgtcaagctctagcgccttagtgtgttgcgccgggttggtaactctgaccgttcttggacgcaacttgtctaaagtggagttggccgagatctgtgccaaatcagaacggtatatcggcacggagggcgggggtatggaccagagtatcagcttcctggctgaagagggaactgccaagctcatcgaattttcgccactgcgcgccaccgatgtgaagctgccctcaggagccgtttttgtcattgcaaactcctgtgtggagatgaataaagccgccacttcgcactttaatattagagtgatggagtgtcgcctggcagccaaactgctggctaaatacaagtctctacaatgggataaagttctgagactggaggaagtccaggctaagctaggcatcagcttagaggaaatgctactcgttactgaggacgcactccatccagagccatacaatccagaggaaatctgccgctgccttgggatttcactggaagaactgaggactcagatcctgagcccaaacacacaagatgacggggttgtcctttaccgccctgggtggagtgctactgcgtag

SEQ ID NO: 188764 - DNA, 1305 bp, synthetic construct
  misc_feature 1..1305: note = Description of Artificial Sequence: Synthetic coding sequence
  source 1..1305: mol_type = other DNA
atgttcaacagcaagttcggcagcatccccaagttctacgtgcgggctcccgggagagttaatatcattggtgaacacattgactattgtggctacagtgtccttccaatggcagttgaacaggacgtcttgattgcagtggaacccgtaaaaacttacgcattgcaactcgctaacaccaatcctctgtaccccgactttagcactagtgcgaacaatattcagattgacaagactaagcctctatggcataactatttcttgtgtggcctaaagggcatacaagagcacttcggtttgagcaatcttaccggaatgaactgcctcgtggacggaaacatcccaccctctagcgggctttcctctagtagcgccctggtgtgctgcgccggtcttgtgacacttacagtgctcggacgcaacctaagtaaggttgaacttgctgagatctgcgccaaaagcgagcgttatatcggaactgaggggggaggcatggatcagagcatctcttttctggccgaagaggggaccgccaaactaatagaattttcacctctgcgcgcaaccgatgtcaaactccccagcggagccgtcttcgttatcgccaattcctgcgtggaaatgaataaagccgctacatcacattttaacatccgggtcatggaatgtcgactggctgccaagttactggcgaagtataaaagtctccagtgggataaggtactacggctcgaagaggtccaggccaaattgggaatctccttggaggaaatgctgctcgtgaccgaggacgcattgcatccagagccatacaacccagaggagatttgtagatgtttggggatctctctagaggagctgagaacccagatattgtccccgaatacccaggacgtattgatttttaagctgtaccagcgcgccaagcacgtgtactctgaggctgccagggttcttcagttcaagaaaatctgcgaggaagctcctgaaaacatggtacagctacttggggaactgatgaaccagagccatatgtcgtgtagggatatgtacgagtgcagctgtccagagctggatcagttggtcgacatctgcagaaagtttggagcacagggtagtcggctgaccggtgctggctggggagggtgtaccgtgtctatggtcccagccgacaagctgccctcattcctagccaatgtgcacaaagcatattaccaacggtccgacgggtcattagctcctgagaagcagagcctgttcgcaaccaaaccaggcggcggggcactggtcttgcttgaagcctag

SEQ ID NO: 188765 - DNA, 1305 bp, synthetic construct
  misc_feature 1..1305: note = Description of Artificial Sequence: Synthetic coding sequence
  source 1..1305: mol_type = other DNA
atgttcaacagcaagttcggcagcatccccaagttctacgtgcgggcacctggacgcgtcaatatcattggggaacatatagactattgtgggtactctgtcctgccaatggccgtcgaacaagacgtgttgatcgcagtggaacctgtgaagacgtatgctctacaacttgcgaatacaaaccctttgtatcctgatttctcgaccagcgccaataatatccagatagacaaaaccaagcccctgtggcataattactttctatgcggacttaaaggtatccaggaacattttggacttagcaatctgactggaatgaattgcctggtcgacgggaacatcccacccagcagcgggctgagcagcagttctgccctcgtgtgctgcgctggcctcgtcacgctaactgtgcttggacgcaacctttcgaaggtggagctagctgagatttgtgctaaatcagagcgttatatcggaacggagggaggcggtatggaccaatctatcagttttctagctgaagaggggactgctaagctcatcgagttcagcccgctaagggctaccgacgtgaagctgccctccggagctgtttttgtgatcgccaacagctgcgtggaaatgaataaggccgctacatcacattttaatatcagagttatggaatgtcgcttggccgccaagctgttagctaagtacaagagtttgcagtgggacaaagtgcttcgcctcgaagaagtgcaggcaaagctgggaatctcacttgaggagatgctgcttgtcaccgaggacgctcttcacccagagccctataacccagaagagatatgtcgatgcctcggcattagtttagaggaactgcgaacgcaaatactatcccccaatactcaggacgtcttaatctttaagctgtatcagagagccaagcacgtttactctgaagctgctagggtgctccagttcaagaagatctgtgaagaggccccagagaacatggtgcagctgctcggcgaactgatgaaccaatcccacatgtcctgcagggatatgtatgagtgtagttgcccggaactcgaccaacttgtggacatttgccgtaaatttggcgcacaaggctccagactaactggcgcgggatggggaggctgtaccgttagtatggtccccgccgacaagctgcccagcttccttgcaaacgtgcataaagcctattatcaaagaagcgacggatcactggctcccgaaaagcagagcctatttgccactaagcccggcggaggagctctagtgctgctcgaggcctag

SEQ ID NO: 188766 - DNA, 1377 bp, synthetic construct
  misc_feature 1..1377: note = Description of Artificial Sequence: Synthetic coding sequence
  source 1..1377: mol_type = other DNA
atggccaccgagagccccgccacccggcgggtgcaggtggccgagcaccctcgcctcctgaagctgaaagagatgtttaattcaaagtttggttccatcccaaagttttacgttcgggcccctggtcgagtgaatatcatcggggagcacattgattattgtggatactccgttctgccaatggctgttgaacaggacgtgctgattgcagtggaacctgtgaaaacatatgccttgcagctcgctaatacaaatccactctatcccgattttagcacatccgctaataacatacagattgacaaaacaaagcccttgtggcacaactatttcttgtgtgggctgaagggaatccaggaacatttcggcctaagtaatctgaccgggatgaactgtttagtggacgggaacattccaccatcgtccgggctgagctcatcatcagctctggtgtgctgcgcaggattagtgacgttaaccgttctgggccgcaacctcagcaaagttgagctcgcagagatttgcgctaaatccgaaagatatataggtacggagggaggggggatggaccaatctatctcattcttggcagaggaagggaccgctaaattgatagagtttagccccctacgggccaccgacgtgaaactgccctcaggagccgtgttcgtgatcgcaaattcctgcgttgagatgaacaaggcagccacctcccactttaacatcagggtgatggagtgcaggctcgcggctaagctcctggccaagtacaaatcactgcagtgggacaaggtactgcgcctggaagaagtgcaggccaagttgggcatttctctagaggagatgctccttgtgacagaagacgctcttcatcccgagccatataaccccgaggaaatttgtagatgccttgggatttccttggaagagcttaggacccagatactgtcacccaatacccaggatgttctgatttttaaactctatcaaagggccaagcatgtgtattcggaggctgcacgggtgctccagttcaagaagatctgcgaagaagctcctgaaaatatggtgcagctcctgggggaactgatgaaccaatctcatatgtcctgccgcgatatgtatgaatgctcatgtcctgagttagaccaactggtggacatatgccgcaaatttggggctcagggaagtaggttaacaggagccggctggggcggatgtactgtttcgatggttccagctgacaagctgcccagcttcctggccaacgtgcataaggcctactaccagaggagtgatggaagtctcgcgcctgagaaacagtcattgttcgccaccaagcctggtggcggtgcccttgtcctcttagaagcgtag

SEQ ID NO: 188767 - DNA, 1272 bp, synthetic construct
  misc_feature 1..1272: note = Description of Artificial Sequence: Synthetic coding sequence
  source 1..1272: mol_type = other DNA
atgctgcccccccagaagaagccctgggagagcatggccaagggcctcgtgttaggggccctcttcactagcttcctgctgctggtctattcatatgctgttcctcctctgcatgcaggtctggcctcaacaacaccagaggccgcagcctcttgcagtccgccggccctggaacccgaggccgttataagagctaacggatccgcgggcgagtgccagcctagacgcaatatcgtgtttctaaaaacccacaaaactgccagctcgacactgctcaacatcctatttcggttcggacagaagcatagacttaaattcgcgtttccaaatgggaggaacgattttgactatccaacgttctttgcccggagccttgtgcaggactatagacccggcgcgtgtttcaatattatttgcaaccatatgagatttcactatgatgaggtgagagggctggtgccaactaacgccatattcataacagtacttagagaccctgctcgcctgtttgaatcctcattccactatttcgggccagtggtaccgctgacctggaaattgagcgctggcgacaagttgactgaatttcttcaggatccggatagatactacgatccaaatggtttcaacgcccactacttacgaaacctgctgttctttgatctcgggtatgacaactccctggatccatcatctccccaggttcaggaacacatcctggaagtggagcggcgttttcacctcgtgttgttgcaggagtatttcgacgaaagtcttgtgctactgaaggaccttctgtgttgggaactggaggacgtcctgtacttcaaattgaacgctagaagagattctcctgtgccacgactctctggcgaactgtacggacgggccaccgcttggaacatgctggactcccacttgtaccggcatttcaacgcctctttttggcgcaaagtggaagccttcgggcgggaacgcatggcacgcgaggtcgccgctctcagacacgctaacgagcggatgcggactatttgcatcgatggtggacacgctgttgacgccgccgccatccaggacgaagctatgcagccctggcagccattagggactaagtcaatcctagggtacaatctgaaaaagtcaatcggtcaacgccatgctcagctgtgccggcgcatgctaacacccgagattcagtaccttatggacctaggcgccaacctgtgggttaccaagttgtggaagttcatcagggatttcctgcggtggtag

SEQ ID NO: 188768 - DNA, 1272 bp, synthetic construct
  misc_feature 1..1272: note = Description of Artificial Sequence: Synthetic coding sequence
  source 1..1272: mol_type = other DNA
atgctgcccccccagaagaagccctgggagagcatggccaagggcctggtgttgggagctctcttcaccagcttcctgctgttggtctactcatatgcagttccgcctctgcatgctggtctggctagcaccaccccggaggctgccgccagttgctctcctcctgctctcgaaccagaggccgttattcgggctaatgggtccgcaggtgagtgtcagccaaggaggaacattgtttttcttaaaacccacaaaactgcgagttcaacgttactgaatattctcttccgctttggacagaagcatcgactgaaattcgcattccccaacggcaggaatgactttgattaccctaccttcttcgctagatccctggtgcaagattatagacctggagcatgtttcaacataatctgcaatcacatgaggtttcattatgatgaagtgaggggcctagttcccactaatgccatattcatcaccgtactgcgggacccagcccgtctattcgaaagtagcttccattacttcggaccagtcgtgccccttacttggaagctctcagctggggataaattgaccgagttcctgcaggatcccgataggtactacgatcctaacggctttaacgcccactatctccggaatctgttgttttttgatcttggctacgataactccctcgatccatcgtcaccacaagtgcaggaacacatcttggaagttgagaggcggtttcaccttgtccttctgcaagaatacttcgacgaaagtctggtgctactgaaggacctcctgtgctgggaactagaggatgtgctgtactttaagctgaacgccagacgggactcaccggtccccagactgtcgggcgaactatacggaagggccactgcctggaatatgctggattcacatttgtacagacacttcaatgcctctttttggagaaaagtggaggcattcggtagggaacggatggcccgtgaggtggccgcccttcggcatgctaatgagagaatgaggacaatttgtatcgatgggggacacgccgtggatgctgcagctatccaggatgaggcgatgcaaccctggcagcccctgggcaccaagtccatcctgggatacaacctgaagaagtctatcgggcagcgccacgcacagctgtgtcgtcgcatgctcaccccagaaattcagtatctgatggacctcggggcaaatctgtgggtgactaagctctggaaatttatccgggacttcctccggtggtag

SEQ ID NO: 188769 - DNA, 1272 bp, synthetic construct
  misc_feature 1..1272: note = Description of Artificial Sequence: Synthetic coding sequence
  source 1..1272: mol_type = other DNA
atgctgcccccccagaagaagccctgggagagcatggccaagggcctggtgctaggagcactctttacttcttttcttctgctcgtgtatagttacgctgtgccgccgttgcatgctggattagcctccacaacgcccgaagccgctgcaagctgctccccacctgccctggagccagaagcagtcatccgcgccaatggttctgcaggagagtgccagccgagacgaaacattgtgttcctgaagacgcataaaacagcatcatctacgcttctgaatatcctcttccgttttggccagaagcatagactcaagtttgcgttcccaaacggtagaaatgatttcgattatccgacgtttttcgccaggtccctcgtgcaggattatcgaccaggcgcctgctttaatatcatatgtaaccacatgagatttcactatgatgaagtcagaggactcgtcccaactaacgcgatctttatcactgtccttcgggatcccgccaggctgtttgagtcttcattccattactttgggccagtggtcccactcacatggaaactcagcgctggggataagctgacggagttccttcaggatcccgacaggtattacgaccctaatggatttaacgcccattacctgcggaacctcttgttcttcgaccttggttacgataatagcctggatcccagttcaccccaggtgcaggagcatatcctggaagtggaaaggcggttccacctggtgcttttgcaggagtattttgatgagtccttggtcctgttaaaggacctcctttgttgggagctcgaggacgtgttgtacttcaagctcaatgcacgccgggattcccctgttccaagactgagtggagaactttatggccgtgctacggcgtggaacatgcttgactcacacctctataggcacttcaacgcctccttttggagaaaagttgaagcattcgggagggagcgcatggccagagaggtcgcagctctacggcacgctaatgaaaggatgcgaacaatatgcatcgacggcggccacgcagtggacgcagctgccatacaggacgaggcgatgcaaccctggcagccactcggtaccaagagcatcctcggatacaacttaaagaagtcaatcggccagcggcacgctcagctgtgtcggcgaatgctaacccctgaaattcagtacctgatggatctgggagcaaacctgtgggtgaccaagctgtggaaatttattcgcgactttctgcggtggtag

SEQ ID NO: 188770 - DNA, 1272 bp, synthetic construct
  misc_feature 1..1272: note = Description of Artificial Sequence: Synthetic coding sequence
  source 1..1272: mol_type = other DNA
atgctgcccccccagaagaagccctgggagagcatggccaagggcttggttcttggcgccttatttaccagctttctgctcctcgtatatagctatgccgtgcctccactccacgcgggtctggcatcaaccacccccgaagcagccgcatcttgtagtccaccagcactggagcctgaagctgtcattagggcaaacggttcagccggcgagtgccagcctcgccgcaatatcgttttcttgaagacccacaaaactgcgagcagcaccttgctcaatatcctgtttagatttggtcagaaacatagattaaagttcgcttttcccaacggtcggaacgattttgactaccccacattctttgccagatcgctagtacaagactacagaccgggagcttgtttcaacattatctgcaatcacatgcgctttcactacgatgaggtccgaggccttgtgcccactaatgccatattcatcacggtcctgagggacccagctcgcttatttgagtcttctttccactactttgggcccgttgtcccactaacttggaagctgtccgccggcgataaattgacggaatttttacaagatcctgacaggtactatgacccaaacgggtttaacgctcactatctccgaaacttgctgttcttcgacttaggctacgacaattctctggacccgtctagtccgcaagtacaggagcacattctggaagttgaacggaggttccacctggtgctcctccaggagtatttcgatgaaagccttgtactattaaaagacctactttgttgggagcttgaggacgtgctttattttaagctcaatgcccggagggacagcccagtgcctaggttgtctggcgagttgtatggcagagctaccgcatggaatatgcttgactcacacctgtatcggcattttaacgccagcttttggagaaaggtggaagcattcggaagagagaggatggctcgcgaagtcgcagcactcaggcacgcaaatgagagaatgcgcaccatctgtatagacgggggacacgccgtagacgccgccgcaatccaagatgaggctatgcagccatggcaaccgctgggaactaaatctatccttggttataatctgaagaaaagtattggacaacgtcatgcccagctgtgcagacgcatgttgacacctgaaatccagtatctgatggacttgggtgccaacctttgggtgacaaagctgtggaaatttatccgagactttttgcgctggtag

SEQ ID NO: 188771 - DNA, 1272 bp, synthetic construct
  misc_feature 1..1272: note = Description of Artificial Sequence: Synthetic coding sequence
  source 1..1272: mol_type = other DNA
atgctgcccccccagaagaagccctgggagagcatggccaagggcctggtattaggtgcactcttcacatcctttctgctgctggtctattcttatgcagtgccccctctgcatgccggcttggcctctactacccccgaggccgcagctagctgctctccacccgctctggagccagaagcagtgatcagggcaaacggctccgcaggggagtgtcaaccaaggagaaatatagtttttctcaaaacacacaaaacagcctcatccaccctcctaaatatcttgtttaggtttggccagaagcatcgcctcaagtttgcgttcccgaatgggcgcaatgattttgactatcccactttctttgcacgcagtctggttcaggattataggcccggtgcctgcttcaatatcatctgcaatcatatgagattccactacgacgaggtccggggattggtgcccactaacgcgatcttcattactgtgctccgggatccggccagactgttcgagtcgagctttcactattttggaccagtagtgcccctgacctggaaactctctgctggcgataagcttaccgagttcttacaggaccctgaccgctactacgatccaaatggatttaatgcacactatctgcgtaatttactgttttttgatctgggctacgacaatagcttggaccccagttcgccacaggtgcaggagcacattttggaagttgagaggagatttcatttggtcctgctccaggagtattttgacgagtcactggtcctgctgaaggacttactctgctgggaactcgaagatgtcctctatttcaagttgaatgcacgcagagactcccctgtgcctcgactgagcggcgagctctacggaagggccacagcatggaatatgttagacagccatctttatagacacttcaatgcaagcttctggcggaaagtcgaggcctttgggcgtgagcgcatggcacgggaagtcgcggcgctgagacacgcaaatgaacggatgaggactatttgcattgacggagggcacgcagtggatgccgctgcaatccaggatgaggctatgcagccatggcagcccctggggacgaaatctatcctggggtataacctgaagaaaagcatcggccaaagacacgcacaactgtgcagacggatgctaacgccggaaattcagtatctaatggatctgggcgcgaatctatgggtgactaaactatggaaatttatccgcgacttcttaagatggtag

SEQ ID NO: 188772 - DNA, 1272 bp, synthetic construct
  misc_feature 1..1272: note = Description of Artificial Sequence: Synthetic coding sequence
  source 1..1272: mol_type = other DNA
atgctgcccccccagaagaagccctgggagagcatggccaagggcctggtcctcggcgccctgtttacgtcattcttgttactggtctatagctacgctgtccctcccctgcatgccggactcgcgtcaacaacaccagaggccgcagcaagctgcagcccccccgcactggaaccagaggccgtgattcgggctaatggtagcgccggggaatgccagcctcgccgaaatatcgtgttcttgaaaacacataaaactgcaagttccaccctgttgaatattttattccggttcgggcaaaaacatagactgaagtttgccttcccaaatggacgcaacgattttgactacccgacgttcttcgcccgcagcctggtgcaggactatagacccggtgcctgcttcaatatcatttgcaatcatatgcggtttcactatgatgaagttcgtggccttgtgccaaccaacgcgatatttatcacagtgttgcgggaccccgctaggcttttcgaaagtagctttcactacttcggaccagtggtgccactgacgtggaaattgtcagctggagacaagctgaccgagtttctgcaagatccggaccgctactacgaccccaacggctttaacgcacattacctacgcaatctgctcttttttgacctagggtatgacaacagtctggatcccagttcacctcaggttcaagagcacatcctagaggttgagaggcggttccaccttgttctattgcaagaatactttgacgaaagtctggtgctgttaaaagatttactgtgttgggagctggaagacgtcctatacttcaaactgaacgcaagacgcgactcaccagtgcccagacttagcggagaattgtatggtagagccaccgcctggaacatgctcgactcccacttgtacagacacttcaacgcatccttttggagaaaggttgaggcatttggccgagagcggatggccagagaggtcgcagcgctgcgacacgcaaatgagaggatgcgaactatttgtatcgatggcgggcatgcggttgatgccgcggcaattcaggacgaggccatgcaaccatggcaaccactgggcacgaagtccatcctcggctacaatctgaagaaatcgatcggccagagacacgcccagttgtgtcgcagaatgcttacacctgagatccagtatctgatggatcttggcgctaatttgtgggtaaccaagttatggaagttcattagggacttcctccggtggtag

SEQ ID NO: 188773 - DNA, 258 bp, synthetic construct
  misc_feature 1..258: note = Description of Artificial Sequence: Synthetic coding sequence
  source 1..258: mol_type = other DNA
atgctgcccccccagaagaagccctgggagagcatggccaagggcctagttttaggcgctctttttacttctttcttgctgctggtttactcctatgctgtcccacccctgcacgctggccttgccagcaccacccctgaagctgcagctagctgcagccccccggctctagagccggaggccgttatcagagctaatggtagtgccggcgagtgtcagcccagacgcaacatcgtttttctgaagacccataagtag

SEQ ID NO: 188774 - DNA, 513 bp, synthetic construct
  misc_feature 1..513: note = Description of Artificial Sequence: Synthetic coding sequence
  source 1..513: mol_type = other DNA
atgctgcccccccagaagaagccctgggagagcatggccaagggccttgtgctgggtgccctgttcacaagttttcttttgctggtctattcttacgcagttccgcccctgcacgccggtctagcctccaccacacccgaggcggcagcatcttgcagcccccctgcgctggagcccgaagccgttattcgagccaatggatccgctggagagtgtcagcctcgtcgaaacattgtgtttctgaaaactcataagactgcaagttctactctcctgaacatcttgtttagattcggccagaagcaccgactgaagtttgccttccccaatgggcggaatgacttcgactacccaacatttttcgctcgttccctggtgcaggattaccggcccggcgcctgtttcaatatcatttgtaaccacatgagattccactacgatgaggtgagggggctggttcccacgaacgccatctttatcactgtgctgagggatccagcccgcctattttag

SEQ ID NO: 188775 - DNA, 450 bp, synthetic construct
  misc_feature 1..450: note = Description of Artificial Sequence: Synthetic coding sequence
  source 1..450: mol_type = other DNA
atgctgcccccccagaagaagccctgggagagcatggccaagggcctcgtcctgggcgcgttattcacttcattcctgttgctggtgtatagttacgccgtccctccattacatgccggtttggcttcaacaacaccggaagccgcagccagctgttctccacctgcactggaacctgaggccgtgattcgagccaacggctccgccggcgagtgtcagcctcgcagaaacattgtctttctcaagacccacaagacagcctcgagcacacttttgaatatattattccgcttcggccaaaagcatagactgaaatttgcatttcccaatggccggaatgactttgactatcccacgttcttcgcccggtccctggttcaggattaccgccctggggcctgtttcaacattatctgcaaccatatgcgctttcattacgatgaggtgtag

SEQ ID NO: 188776 - DNA, 300 bp, synthetic construct
  misc_feature 1..300: note = Description of Artificial Sequence: Synthetic coding sequence
  source 1..300: mol_type = other DNA
atgctgcccccccagaagaagccctgggagagcatggccaagggcctggtacttggagccctcttcacatccttcttgttgctcgtctatagctacgcagtccccccactgcatgccggcctagcctctactactccagaggcagccgctagctgctcacccccagctctggagccagaggcagttatccgagctaacggaagtgccggcgagtgccagcctagacgaaacatcgtgtttctgaagacccataagaccgcgagctccactctgctgaatatcctgtttagattcgggtag

SEQ ID NO: 188777 - DNA, 312 bp, synthetic construct
  misc_feature 1..312: note = Description of Artificial Sequence: Synthetic coding sequence
  source 1..312: mol_type = other DNA
atgctgcccccccagaagaagccctgggagagcatggccaagggccttgtgttgggagctctgttcacctccttcctcctgcttgtgtattcctacgccgtgccgcccttgcacgcaggcctcgcatcaacaacccctgaggcagccgcgtcttgttctcctccagctctcgaacccgaggctgtcattagggccaatggtagcgcaggcgaatgccagcctcggcggaacatcgtattcctgaaaacacacaagaccgcgtcatccaccttactcaatattctcttccgcttcggccagaagcaccgctag

SEQ ID NO: 188778 - DNA, 600 bp, synthetic construct
  misc_feature 1..600: note = Description of Artificial Sequence: Synthetic coding sequence
  source 1..600: mol_type = other DNA
atgctgcccccccagaagaagccctgggagagcatggccaagggcctggtgttgggtgcactatttacttccttcctcctccttgtgtacagttatgcagtcccaccccttcacgcaggtctggcttcaactacccctgaggcagcggctagctgctcaccacccgccctggagccagaggcagtcattagggccaacggaagcgccggggagtgccaaccccgccgcaacatcgttttcttgaaaacgcacaaaacagcctcatctactttactgaacatcttgttccgctttggtcagaaacaccgtctgaaattcgccttcccaaacggacggaatgacttcgattaccctactttctttgcacggtctctggtgcaggattaccggcctggagcatgcttcaacattatctgcaatcacatgcgctttcattacgacgaagttcgcggcttggttcccacaaacgccatatttataaccgtgctgcgcgacccagccagacttttcgaatcctcctttcattactttggtcccgtcgtacctcttacatggaagctgagcgcaggcgacaaactgaccgagtttttacaggattag

SEQ ID NO: 188779 - DNA, 840 bp, synthetic construct
  misc_feature 1..840: note = Description of Artificial Sequence: Synthetic coding sequence
  source 1..840: mol_type = other DNA
atgctgcccccccagaagaagccctgggagagcatggccaagggcctggtgcttggcgccttgttcacatcctttcttctcttggtttacagttatgctgtgccgccgctccacgcaggtctggcctcgaccacacctgaggccgcagcctcttgttctccgcccgcactggaaccagaagcagtgattcgcgccaatgggtctgcgggggagtgccagcctaggcgaaacatcgtcttcctgaagacgcataaaaccgccagttccacactactgaacatcctattcagatttggccagaaacataggttgaagttcgccttcccgaatggccgtaatgactttgactatcctacatttttcgcccggtctctggtgcaggattacagacctggtgcctgtttcaatatcatatgtaaccacatgcgattccattatgacgaggtacgggggctggtccccaccaacgccatatttattaccgtgctgcgggatcctgccagactgttcgagagctctttccactactttggccccgtcgtgcccttaacatggaagctgtcagccggagacaaactaacagagtttctccaagaccctgatagatactacgatcccaacggattcaacgcccactacctgcggaaccttctcttctttgacctgggctacgataacagtctagatccctctagtcctcaggtgcaggaacacattctggaagttgagcgccgctttcacttggtgttactacaggaatactttgacgagagcctggtgttgttgaaggatctcctgtgctgggagctagaagatgtgctgtattttaaactcaattag

SEQ ID NO: 188780 - DNA, 1272 bp, synthetic construct
  misc_feature 1..1272: note = Description of Artificial Sequence: Synthetic coding sequence
  source 1..1272: mol_type = other DNA
atgctgcccccccagaagaagccctgggagagcatggccaagggcctggttcttggggccctttttacgagctttttgttgcttgtgtactcttatgcagtgccacccttacacgctgggttggcttccaccacaccagaagcggcagcctcttgttcaccccctgccttagagcctgaggctgtgatcagggctaatgggtcagctggggagtgccagcctaggagaaatattgtgttccttaaaacccataaaaccgctagctcgactctcctgaacattctgttccgcttcggccagaaacatcggttgaaattcgctttccccaatggtcgcaacgacttcgactaccccaccttcttcgcaaggtctcttgtgcaggattaccgaccaggggcctgcttcaatatcatctgcaatcacatgcgcttccactacgatgaagtacgaggattggtgcccacaaatgccatcttcattacggttctccgtgacccagctaggctgttcgagagcagtttccactatttcggacccgttgttccactcacgtggaaattgagcgcgggtgacaaactcacagagttcctgcaagaccccgacagatactatgatcccaatggatttaatgcccactatctgcgaaacttactgttcttcgatcttggctacgataattccctcgatccatcatctccacaagtgcaggaacacattttggaggtagaacgacggtttcacctcgtgttactccaggagtactttgatgaaagtctcgtgctactgaaggatctgctctgttgggaactcgaggatgtactctattttaaattgaacgcccgcagagatagtcccgttcctcggctctctggagagctgtacggcagggccactgcatggaatatgctcgactctcacctgtatcgacatttcaatgccagtttttggcgcaaggtggaggcttttgggagagaaagaatggcaagagaagtggctgccctgaggcacgcaaatgaacgaatgaggactatatgcattgacgggggacacgctgtggacgccgccgccatccaggatgaggccatgcagccctggcagcctctggggactaaatccatcctcggctacaatcttaaaaagtccatcgggcagcggcacgcccagctgtgccggcgcatgcttacaccagaaatccagtaccttatggatctgggcgctaatctatgggtgaccaaattgtggaaatttatcagggacttcctgaggtggtag

SEQ ID NO: 188781 - DNA, 432 bp, synthetic construct
  misc_feature 1..432: note = Description of Artificial Sequence: Synthetic coding sequence
  source 1..432: mol_type = other DNA
atgctgcccccccagaagaagccctgggagagcatggccaagggcctagtgctgggcgctctgttcacgagctttttgttattagtttactcgtacgccgttccaccactacacgcaggtctcgcatctaccactccagaagccgctgctagctgttcgcctccggctctggagcccgaggcggtcattcgagctaatggttccgctggagagtgccagccccgtcgtaacatagtgtttctcaagacccacaaaaccgcaagcagtacactgctgaatatcctattccggttcggacagaagcacaggcttaagttcgcctttccaaacggccgaaatgattttgactacccaacctttttcgcgaggtctcttgtgcaggattataggcctggggcatgtttcaacatcatctgcaaccatatgcgctag

SEQ ID NO: 188782 - DNA, 231 bp, synthetic construct
  misc_feature 1..231: note = Description of Artificial Sequence: Synthetic coding sequence
  source 1..231: mol_type = other DNA
atgctgcccccccagaagaagccctgggagagcatggccaagggcctggtgctgggagctctgttcacatcctttcttcttctcgtttattcatacgctgtacctccgctgcacgcgggactcgccagcacgactccagaggctgcagcatcctgtagtcctccagctctagaacctgaagccgtgatacgcgccaatggtagcgccggcgagtgtcagcccagacgctag

SEQ ID NO: 188783 - DNA, 288 bp, synthetic construct
  misc_feature 1..288: note = Description of Artificial Sequence: Synthetic coding sequence
  source 1..288: mol_type = other DNA
atgctgcccccccagaagaagccctgggagagcatggccaagggcttagtcttgggggccttgtttaccagcttcctgctcttagtgtattcctatgccgtacctcccctgcacgcgggattggcctcgaccactcccgaagcagccgcatcttgcagccctcccgcgctggagccagaggcggtgataagagctaatggctctgccggcgaatgccaaccgagaagaaacatagtcttcttgaaaacccacaagacagccagttctacgctactcaatattctgtag

SEQ ID NO: 188784 - DNA, 216 bp, synthetic construct
  misc_feature 1..216: note = Description of Artificial Sequence: Synthetic coding sequence
  source 1..216: mol_type = other DNA
atgctgcccccccagaagaagccctgggagagcatggccaagggcttggttcttggggctttgtttacgtcattcctactgctggtctacagttacgctgtaccaccactgcatgcaggacttgcctccaccacccctgaagccgccgcatcctgttctccgcccgcactcgagcctgaggcagtgatacgggccaatggttcagctggtgaatag

SEQ ID NO: 188785 - DNA, 729 bp, synthetic construct
  misc_feature 1..729: note = Description of Artificial Sequence: Synthetic coding sequence
  source 1..729: mol_type = other DNA
atgctgcccccccagaagaagccctgggagagcatggccaagggcctcgtgctaggagcgctctttaccagctttctcctccttgtctatagctacgctgtgccccccctgcacgccggtctcgctagcaccacaccggaagctgctgcctcttgctcgcctcccgccctcgagcccgaggccgtgatccgggccaacggatctgcaggagagtgccagcctagaaggaacatcgtgttcttgaaaactcataagaccgcttcaagtacactgttaaacatcctgtttcggttcgggcagaaacatagactcaagtttgcctttccgaatggtaggaatgatttcgactatcctacattctttgcccggtcgctggtgcaggactaccgacccggcgcttgcttcaacataatctgtaaccacatgcggttccattacgatgaggtaagggggctggtgcctaccaacgctatcttcattactgttttgcgtgatcccgcccgcttgttcgaatctagcttccactattttgggcccgttgttccacttacctggaaactctctgctggggataagcttacagaatttctgcaggaccccgatcggtattacgaccccaatgggttcaacgcccattacttgaggaaccttctgtttttcgacctggggtacgataacagcttggatccatcgtcaccccaggtccaggagcatattcttgaggtatag

SEQ ID NO: 188786 - DNA, 303 bp, synthetic construct
  misc_feature 1..303: note = Description of Artificial Sequence: Synthetic coding sequence
  source 1..303: mol_type = other DNA
atgctgcccccccagaagaagccctgggagagcatggccaagggccttgtgctcggagcactttttacttcttttctgttattggtttactcgtacgctgtgccgcctctccatgcgggcctcgcctcaactacccctgaggctgctgcgtcctgcagccctcctgccctggagcccgaagcagttattagagccaatggatccgccggcgagtgccagcccaggcgcaatatcgtgtttctcaagacacacaagacggcatcatcaactttgttgaacatcctcttcagattcggacaatag

SEQ ID NO: 188787 - DNA, 1197 bp, synthetic construct
  misc_feature 1..1197: note = Description of Artificial Sequence: Synthetic coding sequence
  source 1..1197: mol_type = other DNA
atgatgagcatgctgggcggcctgcagcggtacttccgggtgatcctgttactccttttggctctgaccctcctgcttttagcaggattcttgcacagtgaccttgaactggacactcctcttttcgggggccaggctgaaggtcctccggtaaccaacatcatgtttctgaagacgcacaaaacggcatccagtaccgttctgaacatcctgtatagattcgccgaaactcacaacctgagtgtggcgcttcccgccggctctcgagtccatctcggctatccctggctattcctcgctaggtacgttgagggtgtaggatcccagcagcgctttaacatcatgtgcaatcacttacgctttaatctgccccaggtgcaaaaggttatgccaaatgacactttctatttttcaatcctgcggaatccagtgttccagctggagagcagctttatctattacaaaacctacgcccctgcctttagaggcgctcccagcctggatgccttcctggcctccccaaggactttttacaacgactctcggcacctacggaacgtttacgctaagaacaatatgtggttcgatttcggatttgatcccaacgctcagtgtgaagaggggtacgtccgggcacgtattgctgaggtggaacgccgctttagactagtccttatcgccgaacaccttgacgagagcctggtgctgttacgaagacgcctcaggtgggcactggacgatgtggtggcatttaggctgaattcacggagcgctcggtccgtggctcgccttagccccgagacccgcgagagggcgaggagctggtgtgcattagactggaggctgtatgagcactttaacagaactctgtgggctcagcttcgcgctgaactcggtccaagaaggctgaggggagaagttgaacgcctaagggcacggaggagagaattggctagcctctgtctacaggacggaggtgcgttgaaaaaccatacacagattagggaccccagactccgcccttatcaatctgggaaggccgatattttagggtacaacctgcggcctggactggacaaccagacacttggcgtatgtcagagactggtgatgccagagctccaatatatggctcggttgtacgccttgcagtttccggaaaagccgttaaagaacatcccctttcttggcgcttag

SEQ ID NO: 188788 - DNA, 1296 bp, synthetic construct
  misc_feature 1..1296: note = Description of Artificial Sequence: Synthetic coding sequence
  source 1..1296: mol_type = other DNA
atgccccccatcctgcagcggctgcagcaggccaccaagatgatgagcagaagaaaaatcctcctactcgtgctcggctgttccaccgtgtcactgctcatccaccagggtgctcagctcagctggtatccaaaactgtttcccttgtcgtgcccaccgctgaggaattcccccccacgaccaaagcatatgactgtggcatttctcaaaacgcataaaacagccggtactaccgttcagaatatcctgtttaggtttgccgagagacataatttaacagtggcactccctcatccttcttgcgaacatcagttctgttatccgcggaacttctccgcccattttgtgcacccagcaacccgccctccacacgtactggccagtcacctacgctttgaccgcgctgagcttgagcgtctgatgcctccaagtaccgtgtatgtcactattctgagggagccggccgcaatgttcgagagtcttttttcatattataaccagtactgtccggcatttcggagggtccctaacgcctcacttgaggcattcttacgtgccccagaagcttattacagggctggcgagcacttcgctatgttcgcacataatactctggcctatgatctagggggcgataatgagaggtcgcctagggacgacgcagcctacctggcagggctgatccgccaggtggaggaagtgttcagcctagtcatgattgcagagtactttgatgagtcactggtattactgaggaggctgctggcgtgggacctcgatgatgtcctctatgccaagctcaatgcccgggcggcatccagcaggctcgctgcgattcccgccgcactcgccagggccgctcggacctggaacgcgctggacgccggtctgtatgaccacttcaatgccacgttctggcggcatgttgcgcgcgccggtagagcctgcgtggagcgagaagcacgggaattgagggaggcacggcagcgtctcctgaggcgctgtttcggggacgagcccttgctgaggccagctgcccagattcggacaaagcaattacagccctggcaaccaagccggaaggtggacatcatgggctatgatctaccagggggcggcgcaggaccagctacggaggcctgcctaaaactggccatgcccgaggtccagtattcaaattaccttctccgcaagcaaaagcggagaggcggcgctcgtgcacgtcctgagccagtcttagataatccccctcctcggcctattcgagtcctgccaagagggcctcagggaccatag

SEQ ID NO: 188789 - DNA, 1296 bp, synthetic construct
  misc_feature 1..1296: note = Description of Artificial Sequence: Synthetic coding sequence
  source 1..1296: mol_type = other DNA
atgccccccatcctgcagcggctgcagcaggccaccaagatgatgtctcggcgcaagatattgctacttgtgctcggatgtagtactgtgtctcttctgatccaccaaggcgcgcaactatcctggtatcccaagctgttccccctgagttgcccgccactccggaatagccctccgaggcccaagcatatgactgtcgcctttctgaaaacccataaaacggcggggacaactgttcagaatatcctctttcggttcgcagaacgccataacttaacggtcgctctgccccacccctcctgcgaacatcaattctgttatccacgcaacttctccgcgcacttcgttcatcccgccactcgccctccacacgtactggcatcccacctccgcttcgatagagccgagctcgagagactgatgccaccatctactgtgtacgtcacgatactcagagagcctgcagccatgttcgaaagccttttttcgtattacaatcagtactgtcccgcctttcgtagggtccccaatgcctctctcgaggcattcttgagggcccctgaggcctactacagagccggggaacactttgcaatgttcgcgcataatactctcgcttatgatctgggcggagataacgaaagaagcccgagagatgatgcagcttacctggcaggcctaattaggcaggttgaagaagtattctccctggtgatgattgccgagtacttcgacgagtcgcttgttctcctgaggaggctcctcgcttgggacctggacgacgtcctgtacgctaagctaaatgcccgagccgccagctctagattggctgcaatcccagctgccctcgcgagggccgccaggacctggaacgcgttagacgccggtctgtacgatcattttaatgcgacgttctggcgccatgtagctcgggccggccgagcctgtgtggagagggaggcccgcgagctacgggaagcgaggcagcgcctcctacgccggtgcttcggggatgagccccttctgcgccctgctgcccaaataagaacaaagcagctgcagccctggcagccttcaaggaaggttgacatcatgggctatgacttgcccgggggcggagctggccctgcaactgaggcctgcctgaaattggccatgcctgaggtccagtacagtaactatttgcttcggaagcagaaacgaaggggcggcgctagagcgcgacccgagcccgtgctggataacccaccaccgaggccaattagggtcttgccacggggtccccagggtccttag

SEQ ID NO: 188790 - DNA, 1461 bp, synthetic construct
  misc_feature 1..1461: note = Description of Artificial Sequence: Synthetic coding sequence
  source 1..1461: mol_type = other DNA
atgggccccctgagccccgcccggaccctgcggctgtggggcccccggagcctcggcgttgccttaggcgtgtttatgaccatcggctttgcactgcagttattaggaggaccttttcagcggcgcctaccaggattgcagctgcgccaaccaagcgctcctagtcttaggccagctttgccgtcatgccctcctcgtcaacggctggttttcctcaagactcacaagtccggcagctcgagcgtactctctttgctacacagatacggcgaccagcacggactaagatttgcgctacccgccaggtaccagttcgggtatccaaagctcttccaggcttcccgggtgaagggttaccgacctcagggaggggggacgcaactgccctttcacattctgtgtcatcacatgagattcaatttgaaggaggtactgcaggtcatgccttccgattctttttttttctccatagtaagagaccccgcagctctggccagaagtgctttttcttactacaaatccacttcgtccgctttcagaaagtctccatccctggcagcgtttctggccaatccgcgggggttctacagaccaggcgccaggggagaccactacgctcgcaatcttttgtggtttgactttgggttgcccttcccgccggagaaacgggccaagcgagggaacatccacccccctagggatccaaacccaccacaactgcaggtgcttccctccggggccgggcctcgggcacagaccttgaatcccaacgccttgatccaccccgtctctacggtcactgaccacaggagccagatttccagtcctgcgagtttcgaccttggtagcagcagctttatccaatggggtctggcctggctggactctgtgttcgacctagtgatggtcgctgaatacttcgacgaaagcctcgtgctcctggcggatgccctgtgttggggcctagatgacgtggttggtttcatgcacaacgcacaggcgggtcacaaacagggactgtctactgtatccaattctggattaactgctgaggatagacagctcacagcccgtgcacgcgcttggaacaacctagactgggcgttgtatgtgcattttaatcgaagtctctgggctaggatcgagaaatacgggcagggaaggctgcaaacagcggtggctgaactgcgcgcccgtcgcgaagccctggcgaagcattgcctcgtcggcggggaagcatccgaccctaagtacattaccgacaggcgatttcgtcccttccagtttggctctgcgaaggtgctgggatacatcctgcggagcgggctgtcacctcaggatcaggaggagtgtgagaggctggcaacacctgagctgcagtacaaagataaactggatgcaaaacagtttcctccgacagtctctctacccttaaaaaccagcaggcctctctctccttag

SEQ ID NO: 188791 - DNA, 1461 bp, synthetic construct
  misc_feature 1..1461: note = Description of Artificial Sequence: Synthetic coding sequence
  source 1..1461: mol_type = other DNA
atgggccccctgagccccgcccggaccctgcggctgtggggcccccgatctctgggtgtagcactgggggtctttatgactattggatttgccctgcagctcctagggggcccatttcagcgcagactccccggactgcagctgagacagccctctgcgccaagcctgagaccagctctgccttcttgtcctccacgtcagcggctggtctttcttaagacccataagagcggctcttcctcagttctcagtcttctgcaccggtatggtgaccagcacgggctccgctttgccctgccagcaagatatcagtttggatatcctaagctgttccaggcttctcgcgtgaagggctaccgccctcagggcgggggtacccagttacctttccacatcctgtgccaccatatgcgcttcaacctcaaagaggtgttacaagttatgccatccgactcattttttttctccatagtgcgcgatcccgctgctttggccaggtctgcattttcctactacaagtccactagttccgcttttaggaaatcaccaagtctcgcggccttcctagcaaacccccgcggtttttaccgaccgggcgcaagaggcgaccactacgcaagaaacctactctggtttgatttcggcttaccattcccacctgagaaacgggccaaaagaggtaacattcacccccctcgagatcccaatcccccacagttgcaggtacttccttctggcgcgggtcctcgcgcccagacactgaatccaaatgccctgatacacccagtgagcaccgtaacagatcaccgatcccagatttcctctcccgcatcgttcgacctgggcagctcaagcttcatccaatggggcctcgcttggctcgatagtgtgttcgacctcgtgatggtggctgaatacttcgacgaatcattggtgctgctggccgacgcactatgctggggactggacgatgtggttggctttatgcacaatgctcaggcaggacataagcaggggctgagcacggtcagtaattcaggtcttacggccgaggacagacagctcaccgcacgggcgagggcttggaacaatctggattgggcactctacgtacattttaaccgctcgctgtgggcgcgaatcgaaaaatacggccagggcaggctccagacagctgtcgccgaacttcgcgccaggcgagaggccttagccaaacactgccttgtgggaggggaagcctcggatcccaagtacatcaccgatcgtcgcttccgaccattccagttcgggagtgccaaagttctgggttatattctgcggtcaggcctgtccccccaggatcaagaagagtgcgaacgactcgctacacctgagctgcagtacaaggacaagctggatgccaagcagttcccccctactgtatctctccctctgaagacaagtagaccgctttcgccctag

SEQ ID NO: 188792 - DNA, 1275 bp, synthetic construct
  misc_feature 1..1275: note = Description of Artificial Sequence: Synthetic coding sequence
  source 1..1275: mol_type = other DNA
atgaccccccggagccccaccagcgccttccggagctgcaccgccgtatcgagctgcctctgcccctcgtcctggccctggctgcatctgagcgtgacatcacccttcccagttccccatggcccatctctcagctgtcaggatgcagcagctttggggaccagcgagccaggggggggatcaggctctctgcatgaccattggctgtgcaccccggcgctcggtagggcgcttcccgaagaggtcttgcaggtaatgccaagcgatagtttttttttctctattgttagggatcccgctgcacttgctcgttccgcgttcagctactataaatcaacatcttcggctttccgcaagagccctagtttagctgcattcctggcaaaccccaggggcttttataggcccggagccagaggagaccattatgcacgtaacctattatggtttgattttggactacccttccctcctgagaagcgcgctaagcggggaaacatacaccctccccgggatcctaatcccccacagctgcaagtcctgccctcgggggccggcccccgggcccagactctgaatccaaatgcactcatacatccagtatcaacagtgacagatcacagatcacagatttcatcaccagcatccttcgatctggggtccagtagctttattcagtggggcctagcttggctggactcagttttcgacttggtgatggtggctgagtactttgatgaaagtctggtcttactcgctgatgctttgtgttggggactggacgatgtcgttggcttcatgcacaatgcacaagccgggcacaaacaaggcctctcaacggtgtcaaactcgggcctgaccgcagaggatcgccagctcaccgccagggccagagcctggaataatttggattgggccctatatgtacattttaatagatccttgtgggctagaatcgagaagtacggacaggggaggctgcagacagcagtggccgagctacgagcccgccgcgaggccctggctaaacactgtctggttggaggcgaggccagtgacccaaagtatatcactgaccgaaggtttcgtccgttccaattcggtagcgctaaagtgttgggctacatactgaggtccggtctgagcccacaggaccaggaggagtgcgagcgcttagcaacaccagaattgcagtacaaggacaaactggatgccaagcagtttcctcccactgtctctttacccctgaagacctcgcgccccctctccccatag

SEQ ID NO: 188793 - DNA, 1641 bp, synthetic construct
  misc_feature 1..1641: note = Description of Artificial Sequence: Synthetic coding sequence
  source 1..1641: mol_type = other DNA
atgcccggcttcctggtgcggatcctgcccctgctgctggtgctgctcctcctcggtcccaccagaggtctgagaaacgccacgcagagaatgtttgagatagactactctagagactctttcctgaaggatggacaaccgtttcggtacatatcggggagcatacactattcccgcgtgccgaggttctactggaaagatcggctgctaaagatgaaaatggccggcctgaacgcaatccagactctcccgggctcctgtggacaagtggtgggctctccctcagcacaggacgaggcttcgcctctgtccgagtggagagcttcttacaattctgctggctcaaatatcacagacgcattcctgtcccagaggaaatgcgaacctaagggacccctcatcaactcagagttctacacaggctggcttgaccactgggggcaaccccattcaacaattaagacagaagcagtggccagtagtctttacgacattctcgcaagaggcgctagcgttaatctttatatgtttatcggtggcactaattttgcctattggaatggggcaaattctccctacgcagcccagcccacctcttacgattacgacgctcccttgtcagaagctggtgatctgaccgagaaatatttcgccctgcggaatatcatccagaagttcgagaaggtgcccgagggaccaatccctccttcaacccccaaattcgcctacgggaaagtgaccctggagaaactgaaaactgtaggggctgcactggacatactgtgtccctcaggtcccattaaaagcctttatccactgacttttattcaggtcaaacagcattacgggttcgtcctctaccgaactactctacctcaggactgttcgaatcctgcccccttaagcagccctctaaacggggttcatgaccgcgcctacgtggcggttgatggcattcctcagggcgtgctggaacggaataatgtcatcacactgaacatcacagggaaggccggcgctacacttgatctcctggtcgaaaacatgggacgggtcaattacggcgcatatatcaacgattttaagggtctcgtctccaacctaaccctgagctccaacattctcactgactggacaatcttcccattagacactgaagacgccgtctgcagccatctcggggggtggggacaccgagacagcggccatcacgatgaggcctgggctcacaactcaagcaactacaccctgccggccttttacatgggaaacttcagcataccatctggaatccctgacctgcctcaggatacatttatccagtttcccggatggaccaaggggcaggtgtggattaacggattcaatctgggccgttactggcccgctcgcggacctcagctgacactgttcgtgccacaacacatcctgatgacatccgcccctaatactatcactgtgcttgagctagagtgggcaccttgttcatctgacgaccctgaactttgtgctgtgacctttgttgatagacctgtcattgggtcatctgtaacgtatgaccatccctccaagcctgtggaaaagcgacttatgcctcctcctccacagaaaaacaaggattcctggctcgaccatgtttag

SEQ ID NO: 188794 - DNA, 1944 bp, synthetic construct
  misc_feature 1..1944: note = Description of Artificial Sequence: Synthetic coding sequence
  source 1..1944: mol_type = other DNA
atgttcgagatcgactacagccgggacagcttcctgaaggacggccagcccttccgctatatcagtggttccatccactatagtcgggtcccccggttttattggaaggatagacttcttaagatgaaaatggccggactcaatgctattcagacctacgttccctggaatttccatgaaccatggccaggacagtaccagttctcggaggaccacgacgtcgagtactttctgcggctggctcacgagcttggacttctcgtgatcttacgccccggcccatatatctgtgccgaatgggaaatgggcggcttacctgcgtggctcctggagaaggagtcaattctcctgcgctctagcgaccccgattaccttgcagcggtcgacaaatggctgggtgtcctgttaccaaaaatgaagcccctgctatatcagaacggcgggccagtaataaccgtccaagtcgagaacgagtacggcagctacttcgcttgcgactttgattaccttagattcctccagaagcgctttcgccaccaccttggggatgatgtggtcctcttcaccactgatggggcccacaagacattcctgaagtgcggggctttgcaaggactctataccacagtcgattttggaaccgggagtaatatcactgacgcgttcctgagtcagcggaaatgtgaacccaaggggccattaatcaatagtgagttttatactgggtggttggatcactggggacagccacactctacgattaagacggaagccgtagcctcctctctttacgacatcctggcgaggggagcttccgtgaatttgtacatgttcatcggtggcaccaatttcgcttactggaacggggccaattcaccatacgccgcacaaccaacgtcctacgactacgacgccccactttcagaagccggcgacttgaccgagaaatatttcgccctgcgtaatattattcagaagtttgagaaggttcctgagggtccaatcccacctagcacccctaagttcgcctatggaaaagtcaccctcgaaaagctcaaaacagtaggtgccgcgctggacatcctatgtccgagcggaccaatcaagtctttgtatccccttacctttatccaagtgaaacagcattacggctttgtgctgtaccgtacaactctgcctcaggactgctccaatccagcccctctgagcagcccactaaatggagtgcacgatcgggcgtatgtcgctgtcgatgggataccacagggagtccttgaacggaacaatgtgatcactctcaatatcaccggcaaggccggagccacactggatctgctggtggagaacatgggccgggtaaattacggggcttacatcaatgatttcaaagggttagtgtcaaacctaactctgagcagcaacatcctgactgactggactatttttccgcttgacacagaggacgccgtgtgcagccacctgggtggctggggccaccgcgatagtggtcaccacgacgaggcttgggcccataacagcagcaactatacgctgccagccttctacatgggcaacttttccattccaagtggaatccccgatctgcctcaggacacctttatccagtttccaggctggactaaaggccaggtctggatcaacggctttaatctgggccgatactggccagctcgcgggcctcagctcaccctattcgttccccaacacattttgatgacgtcggccccaaataccataacagttcttgaactcgaatgggctccctgtagttccgatgaccctgagctgtgcgccgtgacctttgtggatcgaccggtgatcggaagctccgttacctacgaccatccctccaaaccagtggagaagcgacttatgccaccaccaccccagaagaataaagattcctggcttgaccacgtctag

SEQ ID NO: 188795 - DNA, 2034 bp, synthetic construct
  misc_feature 1..2034: note = Description of Artificial Sequence: Synthetic coding sequence
  source 1..2034: mol_type = other DNA
atgcccggcttcctggtgcggatcctgcccctgctgctggtgctgttactcttgggaccaacccgcgggttgcggaatgccacccaaaggatgttcgagatcgattacagccgcgactcatttcttaaggacggccagcctttcagatacataagtggttcaatacattactccagggtgccaaggttctactggaaagacagactcctgaaaatgaagatggccggccttaatgctattcagacatatgtgccttggaattttcatgaaccttggcctggtcagtatcagttcagcgaagatcacgatgtcgagtactttctccgactggcacacgagttgggccttctggtgatcttaagacctgggccttacatctgcgccgagtgggaaatgggaggactgccggcctggctgctggagaaagagtcaatcctacttagaagctcagatccagattatctggcggctgtggacaagtggctgggggtgcttttgccaaagatgaaaccactgctatatcagaacggtgggcccgtcatcactgtccaagtagaaaatgagtatggatcatatttcgcctgcgatttcgattatctgagatttctccaaaagcgctttcgacaccaccttggggatgatgtcgtgctgtttactaccgacggggctcacaagacatttttaaagtgcggagccctgcaggggttgtacacgaccgttgattttggaaccggctcaaatataacggatgcgtttctgtctcaacggaaatgcgaacctaaaggcccacttatcaactctgagttttataccggatggctggaccactggggccagccccacagcacaattaagacggaggcagtagcctcaagcctttacgatatcttagccaggggagcttccgtcaacttgtatatgttcatagggggaactaattttgcatactggaacggggcaaactccccttatgccgcacaacctaccagctatgattatgatgcccctttgtcagaggccggtgacctcacggagaagtatttcgccttgcgaaatatcatacaaaagtttgaaaaggttcctgagggacctatccctccgtccacacccaagttcgcttacggcaaggtgaccctggaaaaactaaagaccgtcggcgctgcgctcgacattttatgtccatcaggcccgatcaagagcctttaccctctgacttttattcaggtgaagcagcactatgggtttgtcctgtataggacaacgctcccccaagactgctctaatcccgctcctttgagcagccccctgaacggcgtccacgatcgggcttatgtcgccgtggacgggataccgcagggtgttcttgagaggaacaatgtaattaccctgaatattaccggaaaggctggcgccaccctcgacctgctggtggagaacatgggcagagtgaactatggggcttacatcaacgattttaaaggactggtctccaacctgacattgagttccaatatcctgactgattggactatttttccattggacacggaagatgcggtgtgtagtcacctcggaggctggggacacagggatagtggacatcacgatgaagcttgggcccacaattctagcaactacaccctacccgccttctatatgggcaacttcagcatcccttcgggaatacctgatctccctcaggacacatttatccagttcccagggtggaccaaggggcaggtctggatcaacggcttcaatctcgggagatactggcccgcgcgtgggccacagctaactttgttcgtcccccagcacatcctgatgacaagcgctccgaatacgattaccgtgctcgagttggaatgggctccatgttccagtgacgatccggagctctgtgcggtcactttcgtggacagaccggttattggtagtagcgtcacatatgaccatcctagcaaacccgtagagaaacgtctgatgcctccacccccacaaaagaacaaggatagttggttagaccatgtctag

SEQ ID NO: 188796 - DNA, 2178 bp, synthetic construct
  misc_feature 1..2178: note = Description of Artificial Sequence: Synthetic coding sequence
  source 1..2178: mol_type = other DNA
atgcccggcttcctggtgcggatcctgcccctgctgctggtgctgcttctactcggaccaacaagaggcctgaggagtcggttcttgccatgggctttccacctacctcgtcaggccccaaagagccagcttcctttgcacaaacgcggaaccaaaacagcgcccaacgagcacgctagttccaaccgcagtgggcgcaggcgacgacggcagcagtggaatgctacacagaggatgttcgaaattgactacagccgcgactcttttctgaaagatgggcagccgtttcggtacatttccgggtccatacactatagccgcgtgcctcggttctactggaaagatcgcctcctcaaaatgaagatggctggcctaaacgccatccaaacatatgtgccctggaacttccacgaaccttggcccggccaataccagttcagcgaagaccatgacgtggagtatttcctgcgcctggctcacgagttgggcctgttagtaatcctccggcctgggccctacatctgtgctgagtgggaaatgggcgggctgcctgcgtggctactggagaaagagagcatactcttgcggagttctgatcctgattacttagctgccgtcgacaagtggctaggtgtgctgctcccaaaaatgaagccgcttttataccaaaacggcgggccagtgattacagttcaggttgagaatgaatatgggtcctatttcgcctgcgattttgattacctgcggttcttgcagaagcgtttcaggcaccacctgggtgatgatgttgtgttatttacaaccgatggagcccataaaacttttctgaagtgcggggctctccagggactgtacaccaccgttgacttcggcacagggagcaatatcaccgatgctttcctgtcgcaacgcaagtgcgaacctaagggtcccctcataaacagcgaattttataccggctggctggaccactggggtcagccccattccaccataaaaaccgaggcggtcgcctctagcttatacgacattctggcgagaggcgcaagcgtcaatttgtacatgtttattgggggtacgaattttgcgtactggaatggcgcaaattctccctatgctgcccagcccacctcatatgattatgacgcacccctttccgaggccggagacctgacagagaaatacttcgctctgcgcaatataattcaaaaatttgagaaggttcctgagggtcctattcctccaagcacaccgaaattcgcatatggaaaggtaacactcgaaaagctgaaaaccgtcggcgctgctctcgatatcctgtgtccttcaggcccaatcaaaagcctgtatccactgaccttcatacaggtgaagcagcactatggctttgttctctatcgtacgacgctgccacaggattgcagtaatccggcaccactcagttctcctcttaacggtgtacatgatcgtgcatacgtcgctgtggacggcattccccagggggtccttgagcgcaacaatgtgattaccttgaatatcacaggcaaagccggggcgaccttagacctcctggtggagaatatgggacgtgtgaattacggagcatatatcaacgacttcaaaggactggtctctaatctgacacttagctcaaatattctcacagattggacaatctttccccttgataccgaggacgctgtgtgcagccacctcgggggatgggggcaccgcgatagcggccaccatgacgaagcttgggcccataacagtagcaactatacgttgcctgcattttacatgggaaacttctcaattccaagcggcattccggatcttccgcaggataccttcatccagtttcccggctggactaaaggccaagtctggatcaacggattcaatttgggccgatattggccggccaggggccctcagcttactctttttgtcccacagcatatactgatgacttctgccccgaacacaatcaccgtccttgaactcgaatgggccccgtgtagctcggatgatccagagctctgcgctgtgacattcgtggatcggcccgtgattggctcttcagtcacctacgaccacccctctaagcccgtcgagaaacgactgatgcctccaccccctcagaaaaacaaggattcttggttagatcatgtttag

SEQ ID NO: 188797 - DNA, 2058 bp, synthetic construct
  misc_feature 1..2058: note = Description of Artificial Sequence: Synthetic coding sequence
  source 1..2058: mol_type = other DNA
atggccgagtggctgctgagcgccagctggcagcggcgggccaaggccatgaccgccgcggccgggagcgccggtcgagccgcagttcctctgctgctgtgcgcactcctggctcccggcggagcctacgttctggatgattctgacggtctaggaagggagtttgatgggatcggcgccgtgtccgggggtggagctacatcccgactgttggtcaactacccagagccatatagatctcagatactcgattacttgttcaagcccaatttcggagccagtctgcacatactgaaagtcgagattggcggggacggtcaaactacagatgggacagaaccgtctcacatgcactacgctctcgatgagaactatttccgaggctacgagtggtggctgatgaaggaggcaaagaaacggaaccctaatattacattgattggcctgccatggtcatttcctggttggcttgggaaaggttttgactggccatacgttaaccttcaactgaccgcatactacgtggtaacatggatcgtgggggctaagcgttaccacgacttggacattgactacattggcatctggaacgaacgcagttataatgccaattacatcaaaattctcagaaagatgttaaactatcagggactgcagcgggtcaagattattgcaagtgataatctgtgggaaagcataagtgcttccatgctacttgatgcggaattgttcaaggtggtggatgtgatcggcgcacactacccaggtactcatagcgcgaaggatgcgaagcttactggcaaaaaactgtggtccagtgaggacttttcgactctgaacagtgacatgggtgcgggctgttggggccgcatattaaaccagaactacataaacggatatatgacttctaccatcgcctggaatttggttgcctcctactacgagcagctgccatacggaagatgtggactgatgactgctcaggagccctggtccggacattatgtggtcgaatcacccgtttgggtgagtgctcacacgacacagttcactcagccagggtggtactatttaaagacagtaggacatctggaaaagggcggcagctacgtcgcgcttactgacggtctcggtaacttaaccatcatcatagaaaccatgagtcataaacattcgaagtgtatccggccattcttaccatattttaacgtcagccagcagttcgcaaccttcgtcctgaaggggagtttcagcgagattccggagctgcaggtctggtacaccaagctcggcaagacctctgagaggttcctgttcaagcagctagacagcctttggttacttgatagcgatggctcattcactctgagtctgcatgaggatgagcttttcacgctgactactctcaccacaggaagaaaaggatcctacccattgccacccaaatcccaaccttttccaagcacatacaaggacgacttcaacgtcgattaccctttttttagtgaggcgcctaattttgctgaccagaccggggtatttgaatactttactaacatcgaggaccccggcgaacatcattttaccctccgacaggtactgaatcagcggcccattacttgggcggcggatgcgagtaataccatatcaatcattggggattataactggacaaacctcactattaaatgtgacgtctatattgaaacacctgacaccggcggggttttcatcgcagggcgcgtgaacaaaggagggatcctcattcgatctgcaaggggcattttcttttggatatttgcaaatggatcttatcgcgtgaccggcgatctagctgggtggataatatatgccctcggtagagttgaggttacagcgaagaaatggtataccctgaccctcaccattaagggtcacttcacctctggtatgctgaacgacaagtctctctggactgacatccctgttaattttccaaagaatggctgggctgccattgggacgcattctttcgaattcgcccagttcgacaacttcttggttgaagccacacggtag

SEQ ID NO: 188798 - DNA, 1989 bp, synthetic construct
  misc_feature 1..1989: note = Description of Artificial Sequence: Synthetic coding sequence
  source 1..1989: mol_type = other DNA
atggccgagtggctgctgagcgccagctggcagcggcgggccaaggctatgaccgcagccgccggctcagcaggacgagctgcagttcccttactgctgtgcgcccttctcgctcccgggggagcatacgtgcttgatgacagtgacggtctggggcgggagttcgacggaattggcgccgtaagtggcggaggccctaatttcggcgcaagccttcacatactgaaagtggagatcgggggtgatggccagacaactgatggaacagagccaagtcatatgcattacgctttggacgaaaattatttcagagggtatgaatggtggctgatgaaggaagcaaaaaaacgaaacccaaatattacactgattggattaccttggagcttccccgggtggttgggaaagggatttgattggccttacgtcaatctgcagcttacagcttattacgtggtgacctggatcgtgggagctaaaaggtaccacgatctggatatcgattacatcgggatttggaatgagcggtcatacaacgccaactatatcaaaatactaagaaagatgctcaactatcaaggcttgcagagagtgaagattatagcgtctgataatctctgggaaagcatctccgccagtatgctgttagacgctgaactgtttaaagttgtcgacgtgattggtgctcactatcccgggacccacagcgctaaggatgctaaacttacagggaaaaaattgtggtccagcgaggattttagcactttgaattctgacatgggtgctggctgttgggggagaattctgaatcagaactatataaacggctatatgacgagcaccatcgcttggaatctcgtagcatcatactatgagcaactcccctatggccgctgcgggcttatgacagctcaggagccctggtccggccattatgttgtcgaaagcccagtgtgggtctctgcacatacaacccagttcacacagccaggatggtactatctcaagaccgtgggccacctggagaaagggggatcctatgtggccttaactgacggcctcggtaacctcacaataatcattgagaccatgtctcacaaacattcaaaatgtattcggcctttcctgccctactttaacgtatcgcaacaatttgccactttcgtgctgaaaggatcattctctgaaatccctgagctgcaagtatggtacacaaagctgggaaaaacgagcgaaaggttcctcttcaagcagctcgattctctgtggctgctagattcagacggtagctttacattgtcactgcatgaagacgaactgttcaccctgaccaccctcaccacaggacgaaagggatcctatcccttgccaccaaaatcgcagccattcccctccacctacaaggacgactttaacgtggactacccattcttctcagaagcaccaaactttgctgaccagacaggtgtgtttgaatattttaccaacatcgaggaccccggagagcaccacttcacacttcgccaggtgctgaatcagcgcccaataacctgggcagcagacgctagtaataccatatcaatcatcggagactacaactggacaaacttgacgatcaagtgtgatgtgtatattgaaactccagataccggtggcgtgtttatagcaggtagggtgaacaagggaggcattctgatccggtccgctcgaggcatatttttctggattttcgctaacgggagctatcgggtaaccggagacctggcaggctggatcatctatgcgctaggacgagtagaggtaactgccaaaaaatggtacactctcacactgacaatcaaggggcactttactagcggtatgctgaatgacaaatctctgtggacagatataccagttaatttccctaaaaatgggtgggcggccattggcacccattctttcgaatttgctcaatttgataatttcctcgtagaagcgactcgctag

SEQ ID NO: 188799 - DNA, 1980 bp, synthetic construct
  misc_feature 1..1980: note = Description of Artificial Sequence: Synthetic coding sequence
  source 1..1980: mol_type = other DNA
atgctgggcaagagccacggccgggccacccacggccccctgcccttggcggatctgggtatccacctgccctgcgtcaaagtgttacatcaggttactcccgaagaaaaaccagctgccacctcgcggctgctcgtgaactaccccgaaccttatcggagtcagattctggattacctctttaaacccaacttcggcgccagtttacacattctgaaagtggaaattggcggggatggacagacaactgatgggacagaaccgtctcacatgcactacgctctggacgagaactactttcgaggatatgagtggtggctgatgaaggaagcgaagaagagaaacccgaatatcactctcattggactgccatggagctttcctggatggctgggtaaaggattcgattggccgtacgtcaatctgcagctgactgcctattacgtggtgacatggatcgtcggcgccaagcggtatcacgatctggatatcgactacattgggatctggaacgaaaggagctataacgcaaactacataaagatcctgaggaagatgctaaactaccagggcctccaacgcgtgaagatcatcgcatcagacaacctctgggagagcatttcagcctccatgctgctcgatgccgagctgttcaaggtggtggacgtaattggtgcccattaccccggcactcacagcgccaaggacgcgaaactaactgggaaaaagctgtggtcctccgaagattttagtactctcaacagcgacatgggagccgggtgttggggtcgaatactgaaccagaactacattaatggctatatgacctctacaatcgcctggaacctcgtcgcttcttactacgagcagctcccatacggccgctgcggcctcatgacagcgcaagagccttggtcgggacattatgttgtggagtccccagtgtgggtgtctgcccacaccactcagttcacgcagccaggctggtactatttaaagacagtcggccacctcgagaagggagggtcttatgtcgcgctcacagatgggctcggtaatctaaccattataattgagactatgagtcataagcacagcaaatgcatacgtccttttctgccctattttaacgtttcccaacaattcgccacgttcgttcttaagggcagcttttccgaaattcccgaactgcaggtgtggtataccaagctgggcaaaacctccgagcggttcctttttaagcagttagacagcctttggttgcttgattccgatggctcttttacgctctctctgcacgaggatgagctgttcacgctgactactttgacaacgggcaggaagggcagttaccctctgccgcctaagtcacagccctttccttccacctataaggatgacttcaacgttgattatccattcttcagtgaagccccaaatttcgcagaccagactggcgtctttgaatatttcaccaacatcgaggatccaggtgaacatcacttcaccctccggcaggttttgaaccagaggcccatcacctgggctgctgacgcgagtaacacaatctctattatcggcgattataactggactaacttgaccatcaagtgtgatgtgtatattgagactccagataccggtggcgtcttcatagccggccgggtgaacaaaggtggcatcttgattcggagcgctcgcgggatctttttttggatttttgccaacgggtcatatagagtcaccggggatttggctggctggatcatctatgctctgggtagagtcgaggtgactgccaagaaatggtacactctgacattgactattaaaggccactttacaagcggtatgctgaatgacaaaagcctctggaccgacattccagtaaatttccccaagaacggttgggcggcaattgggacgcatagttttgagttcgcacagttcgataattttcttgtagaggctacgcgctag

SEQ ID NO: 188800 - DNA, 1425 bp, synthetic construct
  misc_feature 1..1425: note = Description of Artificial Sequence: Synthetic coding sequence
  source 1..1425: mol_type = other DNA
atgctgaactaccagggcctgcagcgggtgaagatcatcgccagcgacaacctttgggaaagtattagcgcatccatgctgttggacgcggagctgtttaaggtcgtcgacgtgattggagcccattatcccggtacacattctgccaaggacgcaaaactgacaggaaagaaattgtggtccagcgaggatttctctaccctgaatagtgatatgggcgctggttgctggggaaggatcctgaatcaaaattatatcaatggctacatgaccagcaccatcgcctggaatctggtcgcaagttattacgagcaactgccttatggccgctgtgggctcatgactgctcaggagccctggtctgggcattacgtggtagaatcacccgtctgggtttctgcacacacaacccagttcacccagccaggctggtactatttaaaaaccgttgggcatctcgaaaagggtggatcgtatgtagctttgaccgatggccttggtaacttgacaataatcatcgagaccatgtctcacaaacattccaagtgcatccgaccttttcttccctatttcaacgtcagccagcagtttgccacatttgtcctgaagggcagcttctccgaaattcccgagttacaggtgtggtacacgaaactgggcaagacgtcggaaaggttcctctttaaacaacttgactccctctggctgctggatagcgacggaagtttcacattatcactgcatgaagacgagctgttcactttaaccacattgaccaccggccggaagggaagctaccccctaccgcctaagtctcaaccattccccagcacatataaggatgattttaacgtagattatccctttttctcggaggccccaaacttcgcagatcagacaggtgtgttcgaatattttacaaacatcgaagatcctggagagcatcatttcaccctgcgacaggtcctgaaccagcgacccatcacctgggccgcagacgcatcaaacactattagtatcattggtgattataattggaccaatctcaccattaaatgtgacgtgtacatcgagacaccagacactggaggggtctttatcgccggccgcgtgaataaaggggggattcttatacgttccgcccgcggtatttttttctggatatttgctaacggctcatacagggtcacgggcgacctcgctggttggatcatctatgctctaggacgggtggaggtgacggctaaaaagtggtacacgctcacactcacaattaaaggccatttcacgtctggtatgttgaacgacaaatcactttggacagacatccccgtcaactttcctaagaacgggtgggccgctatcggcactcattccttcgagtttgcccaatttgataactttctggttgaagccactagatag

SEQ ID NO: 188801 - DNA, 1770 bp, synthetic construct
  misc_feature 1..1770: note = Description of Artificial Sequence: Synthetic coding sequence
  source 1..1770: mol_type = other DNA
atgggcttcatggtggccgacctgtgggccaccagccggctgctggtcaattacccggagccgtacagatcgcagatcctggactacctgtttaagcctaacttcggggcgagcctgcatatcctgaaggtggagatcgggggagatggccaaactaccgatggaaccgagcccagtcatatgcattacgcgctggatgagaactatttccgcggatatgagtggtggctgatgaaggaggccaaaaagcggaatccgaacattactctcatcggcctgccctggtcctttccaggttggctaggcaaaggttttgattggccttacgttaacctccaactcaccgcctattatgtcgtgacatggattgtcggagccaagagatatcatgatttagatatcgactacatagggatttggaacgaacgaagctataacgctaactacatcaagatcctgcgaaagatgttaaattatcaaggtcttcaacgggtaaaaattatcgcgagtgataatttatgggagtccattagcgcctcaatgttgctcgatgctgaactgttcaaagtcgtggacgtgataggggcccattacccgggcacacatagcgccaaggatgcaaagctcacaggaaagaagctgtggtcttccgaagattttagtaccctgaattctgacatgggagctggatgctggggacggattttgaaccagaactacattaatggatacatgacttcaactatcgcatggaacctcgtggccagctactacgaacagctgccctacggccggtgtggcctgatgaccgcccaagaaccctggagtggacactatgtggtggagtcccccgtgtgggttagcgctcatactacacagttcacacagcctgggtggtactacttaaagacagtgggccacctggagaaggggggctcttatgtggctctgaccgatggactgggaaatctgaccatcattatcgaaaccatgagccataagcacagtaagtgcatacgaccatttttgccatacttcaacgtaagtcagcagtttgctacatttgtcctcaaaggttctttcagcgaaattccagaactccaggtgtggtacacaaaactgggaaagacgtctgagaggttcctcttcaagcagctcgacagcctctggttgctggactccgatggcagttttaccctgtcgctccatgaggacgagctgttcacgctgactactctaactaccggcagaaagggatcctaccccttgcccccaaaatctcaaccctttcccagcacatataaggatgactttaacgtggactacccattcttcagcgaggcccctaacttcgcggaccagaccggagtgttcgaatacttcacgaacatagaagacccgggcgagcaccacttcaccttaaggcaggtactgaatcagagaccaattacatgggccgctgacgcctcaaacactatttcaattatcggcgactataattggaccaatttgacgattaagtgcgacgtgtacattgaaactcccgacaccggcggcgtctttatcgctggacgcgtcaataaggggggtatactgattcgttcagcacggggcatcttcttctggatttttgctaatgggtcatacagagtgacaggcgacttagcagggtggattatctatgcccttgggcgggtggaggtaaccgccaagaagtggtacacgcttaccctcaccatcaaagtggccggccggaggaaaaaaacctag

SEQ ID NO: 188802 - DNA, 372 bp, synthetic construct
  misc_feature 1..372: note = Description of Artificial Sequence: Synthetic coding sequence
  source 1..372: mol_type = other DNA
atggcccggggcagcgccctgctgctggccagcctgctgctggccgcggccctaagcgccagcgccggactgtggtcccctgccaaggaaaaaagagggtggaccctgaactctgctggctatttactggggccccatgcagtaggaaaccaccgtagctttagtgataaaaacggtctgacaagcaagagagaactacgcccggaggacgacatgaaacccggatcattcgatagaagcatccctgagaacaacatcatgcgcacaataattgagtttctgtctttcttacatcttaaagaagccggagccctggataggctgcttgatttgcctgccgcggcgtcaagtgaggacattgaacgtagttag

SEQ ID NO: 188803 - DNA, 1050 bp, synthetic construct
  misc_feature 1..1050: note = Description of Artificial Sequence: Synthetic coding sequence
  source 1..1050: mol_type = other DNA
atggagctggccgtgggcaacctgagcgagggcaacgccagctggccagagcctcctgcgccagagccgggacccttattcggcattggtgttgagaactttgttaccctggtcgtatttggactaatttttgctttaggagttttgggcaattccctcgtgatcaccgtattagcccgcagcaaacctgggaagccaagatctactacaaacttgttcatcctaaatctttcgatcgccgatttggcgtatctgctcttctgcattccgtttcaggcgaccgtatacgctctgcctacctgggtcttaggagctttcatttgtaagtttatccattactttttcaccgtgtccatgctcgttagtatcttcaccttggccgccatgtccgtggacaggtatgttgcgatcgtgcactccaggagaagttcttccctgcgggtgtcccgaaatgcactgctaggtgtcggatgcatttgggcgctgtctattgcaatggcctcacctgtcgcctatcaccaaggcctttttcaccctcgcgcttccaatcagaccttttgctgggagcagtggcccgacccaaggcacaaaaaggcttatgtagtctgcaccttcgttttcggctatctgctgccactcctcctgatttgcttctgctacgctaaagtcctgaaccatttacataagaaactcaaaaatatgtccaagaaatcagaggcctccaaaaagaaaactgcgcaaaccgtgctagtcgtcgtagtcgttttcggcatttcttggttgccccatcatatcattcatttgtgggccgagtttggggtgtttcccttgacccctgcgtcctttctgtttaggataactgctcactgccttgcgtacagcaactcttccgttaacccaattatatatgctttcctaagtgagaacttccgaaaagcttacaagcaggtgtttaaatgtcatatccgtaaggactcccatctgtctgatacaaaagaaagcaaatctagaatcgatactccaccctcaaccaactgcacccacgtttag

SEQ ID NO: 188804 - DNA, 1164 bp, synthetic construct
  misc_feature 1..1164: note = Description of Artificial Sequence: Synthetic coding sequence
  source 1..1164: mol_type = other DNA
atgaacgtgagcggctgccccggcgccggcaacgccagccaggccggggggggaggaggctggcaccctgaggccgtgatcgtgcccctgttatttgcgctaatttttctcgtcggtaccgtaggcaatactctggtcctggccgtattgttgaggggcggacaggccgtgtcaactacaaacttgttcatactgaacctcggcgtggccgatctgtgtttcattctgtgctgtgtaccttttcaggccacaatctataccctggatggatgggtgtttggatccctgctgtgcaaagcagtccattttctcatcttcctgacaatgcatgcttcgagcttcaccctggccgcggtatcactagatcgttatctggccattcgctatcccctgcactctcgcgaacttcgcacaccccgaaacgcgcttgcggcaatagggctaatttggggtttgagcctcctttttagtggcccatacctgagttactatcggcagtcccaactggctaaccttacagtctgtcaccctgcttggtcggccccacgtagaagagccatggatatttgtaccttcgtgttcagctatctcttgcctgtgttggtcctcgggctgacctacgccagaacactcaggtatctctggagagccgttgacccagtagccgcggggtctggagctcgacgagccaagcgcaaagttacacgcatgatcctgatcgttgctgctctattttgtctgtgttggatgcctcatcatgccctgattctttgcgtctggttcggtcagtttccattaactagagctacttacgccctgaggatcctgtcccatctggttagttatgccaatagttgcgtaaacccaattgtttacgcactcgtttccaaacacttcagaaagggatttagaaccatttgcgccgggctacttggaagagctccggggcgggcaagtgggagagtctgcgccgcagccagggggacgcacagcggtagtgtactggagcgagagagcagcgacctcttacatatgtccgaagccgcaggcgctcttaggccgtgccctggggccagccaaccctgtattctggaaccttgcccggggccatcttggcagggtcccaaggcaggcgactcgattcttaccgtggacgtcgcttag

SEQ ID NO: 188805 - DNA, 1107 bp, synthetic construct
  misc_feature 1..1107: note = Description of Artificial Sequence: Synthetic coding sequence
  source 1..1107: mol_type = other DNA
atggccgacgcccagaacatcagcctggacagccccggcagcgtgggcgctgtcgcagtgccagtggtctttgctctcatttttctgctcggtacagtaggtaatgggctggtcctcgctgtactgttgcagcccgggccttccgcttggcaggagcccggaagcaccaccgatttgttcatcttaaacctggcagtggcggacctatgcttcatattgtgctgcgtccccttccaggccacgatctacactctggatgcctggcttttcggagcgcttgtttgcaaagccgtacatttgttaatttatctgaccatgtacgcttcaagcttcaccctggccgccgttagtgtggacaggtatctggcagtacggcatcccctcagaagcagagcacttcgcacaccacgcaacgcaagagccgctgtagggctggtgtggttacttgcggccttgttcagtgccccttaccttagttattacggaacggtgcgctacggagcattagagttgtgtgttcccgcctgggaggacgcccggcgccgggcacttgacgttgctacatttgcggcgggctatttgctgcccgtggctgtcgtctctctggcctatggacgtacactaagatttctgtgggctgctgtaggacctgctggtgccgccgccgccgaggctcgaaggcgcgcgaccggtagggcaggtcgggctatgctggcagtcgctgcactatacgctttgtgctgggggcctcaccatgccctcatattatgcttctggtacggcagattcgccttcagcccggctacttacgcttgtaggctggcatctcattgtttggcctatgccaatagctgcctgaatcctctcgtttacgctctggcctccagacatttccgtgcaagattcaggagactgtggccttgcggtcgcaggaggaggcatcgcgccaggcgcgccctcagacgggtacgacccgcttcatcaggtcccccaggctgtcccggtgatgctaggccgtctggcaggctgctggctgggggcggccaggggcctgagccacgggagggccccgtgcacggcggggaggcagccagaggcccagagtag

SEQ ID NO: 188806 - DNA, 1959 bp, synthetic construct
  misc_feature 1..1959: note = Description of Artificial Sequence: Synthetic coding sequence
  source 1..1959: mol_type = other DNA
atgggcaacctgcagagcgagcccagcgccggcggcggcagccggaaggtacagccatccgatcgagcccctgacagtcgacgtaccagcctggttgaaccagagatgacaagccaggctatgcgtctgaccaggggactgggcgtgtggtttccgggcagtgctacgccgccgggcctgatggtgccgcgggaacctcaggcctccccttccacactcccgctcacactggagcgaccaagccccgtaatgccccctccagaggaggccgctgcggtgtctgcaccccctcccgctcctgccgggacgctgctccccgggccttccaagtggcagaaacctgcaggaactcctgtcccacgcattagacggttgctcgaagcctctcataggggacaaggcgaccccccttcgctgaggcccttaaagccgcctccccccccacgacagctgtcagtcaaagatacagtacctagggctccttcacaattccccccccctcttgaaacatggaagcccccacctcccttacccagcgagcgccagccagccgaccgacgaattaccccagccttggcaactccagcttctccccctacagagtcccaggcggggccaaggaatcagggccaaaccgccggacgcgcacggggcggagcacccccccatgccggcgagggggaaatggcccagcccgccgattccgaaagtggcctctcattactctgcaaaattactttcaaaagccgacctagcctggctccccccgccgctagctcctcattggctgccaaggcatcactgggaggcggaggaggtggcggactgtttgccgcttctggagctatctcctacgccgaggtcctgaaacagggccccctgccgcccggagccgccagacctttaggcgaggtatctcgtggagctcaggaagccgagggcggcgacggcgacggagagggctgcagtgggcctcccagcgcccccgcatcgcaagctagagcgcttccgccacctccttataccacgtttccgggttccaagcctaagtttgattgggtgtccgctccagacggccctgaacgtcatttccgcttcaatggggccggaggcggcatcggggctcctcgacgcagggcggcggctctgtccggaccctggggcagtcctcccccaccgcctgagcagattcacagcgcacccggacccagacggcctgcccccgctctgctggcgccccccaccttcatctttcccgcccctacaaacggcgagcctatgcgcccaggcccccccgggctgcaggaactgccaccgttgccgcctcctaccccacctcccaccctccagcctccggctcttcaacccactccactccctgtcgccccccccctaacccctggtctgggacacaaagaatctgccctggctccaaccgccgcacctgccctccctccagctctggccgcggaccaggccccagcaccgagccctgctccagcacctaccgtggctgaacccagccccccagtgtccgcgccggccccagctgccgctcccataaaaacccggacccgtcgcaataaaggatcaagagccgcaaggggcgcgacacgaaaggacggactgcacggagatggcccacgtgagcgtgcgaccgctaccgttcctgactctagcgggggaggcgggggaggttcgggtgcctcccaaacaggtgctgccaatacacgggcggcgcgccactggctgccattccaagtactgaacagctgcccttgcaaatgctattgccatcaccaacccagacaccgccggctgcctcgcaatgtgtccgcctggttgtctacctcgactaatcacctcggcgagccaccatgggtggcaactatcaagctgtcagggtctcttgtggccaaactggagcactatgatctccaggccacacactccaattag

SEQ ID NO: 188807 - DNA, 675 bp, synthetic construct
  misc_feature 1..675: note = Description of Artificial Sequence: Synthetic coding sequence
  source 1..675: mol_type = other DNA
atgggcaacctgcagagcgagcccagcgccggcggcggcagccggaaggtccaaccttctgacagagctcccgactcccgtcggacttcactcgtagaacccgaaatgactagccaggccatgcgcttgacgaggggtctcggcgtgtggtttccaggaagcgcaacccctcctggattgatggtgccccgtgagcctcaggccagcccttccacattgcccctgaccctcgagcggcctagccccgttatgcccccaccagaggaagccgccgccgttagtgctccccctccggcaccagctggtacccttctgcctgggcctagcaagtggcaaaagcctgcagggacacctgtgcccaggatcaggcggttgcttgaagcaagccaccgcggacagggtgaccctccatcgttacgtcctctgaaaccacctcctccgcctaggcagctcagcgtgaaagacaccgtcccacgtgcgccaagccaattccctcctcccttggaaacatggaagcccccacctcccctgccaagcgagcggcagcctgccgatcggaggattacacccgccctcgcgacccctgcttgcgttagggcaaggacacggggctgtgcccaccaagacccccatgcccaggaacagggtttcccctgttctcccggcagggactag

SEQ ID NO: 188808 - DNA, 2094 bp, synthetic construct
  misc_feature 1..2094: note = Description of Artificial Sequence: Synthetic coding sequence
  source 1..2094: mol_type = other DNA
atggcccggctggtggccgtgtgccgggacggcgaggaggagttcccgttcgagcgcaggcagatccccctatacatcgacgacacgctaaccatggtgatggagtttcctgacaatgtgctgaacctggacggtcatcaaaataacggcgcgcaactaaagcaatttattcaacgccacgggatgctgaagcagcaagacctttctattgcaatggtggtcacttctcgggaggtgctgtcggctctgagccagctggtcccatgcgtcgggtgtcggagatccgtggagaggcttttttcacagttagttgagagtggcaaccctgctcttgagcccctgaccgtgggccctaagggcgtgctgagcgttacgagatcttgtatgactgatgcaaagaagctttacaccctgttctatgtccacgggtccaaactgaacgatatgatcgatgcaattccaaagagcaaaaaaaacaagcgctgtcagctgcatagcctggatactcacaagcctaaaccactgggcggttgctggatggacgtctgggagttgatgtctcaggagtgcagagatgaagttgttctgatcgattccagttgtctgttggagacgttggagacctatctgcgaaagcaccggttttgtacagactgcaaaaataaggtgctgagagcttacaatatcttaattggagaactggactgcagcaaagaaaagggatactgtgctgccctgtacgaggggctgcgttgttgcccccacgaacgccatatccatgtttgctgcgagactgattttatcgcccacttattggggagagccgagccagagtttgctggaggacgcagggaacggcacgccaagacgatagatattgcacaggaggaggttctgacgtgcctgggaatacacctgtacgaacggctgcaccggatctggcagaagttgagagcagaagaacagacatggcagatgttattctatttaggcgtggacgctctaagaaaatcatttgaaatgacagtcgagaaagtgcagggtatttctagactagagcaattgtgcgaagaattttcagaagaagagagggttagggaattgaagcaagagaagaagcgacagaagcggaagaatagaagaaagaataagtgtgtttgtgatattcccactcccttgcaaaccgctgatgagaaagaggtgagtcaggagaaagaaaccgacttcatcgagaactccagctgtaaggcatgcggctccactgaagacgggaacacgtgtgttgaggtaatcgtgacgaacgaaaacaccagctgtacctgtccctcatccggaaatctcctcggctctccgaagataaagaaaggccttagccctcattgcaacggctcggactgcgggtacagttcgtctatggaaggctcagagacaggaagtcgtgaggggtccgatgtggcctgtacagagggtatctgcaaccacgacgaacacggggacgactcgtgcgttcaccactgtgaggataaagaagacgacggtgactcgtgcgtggaatgttgggctaatagcgaggagaacgacacgaagggcaaaaacaagaagaaaaaaaagaaatccaagatcctgaaatgtgacgaacacattcagaagctcggatcatgtatcacagatcctggaaatcgggaaacgtcaggaaataccatgcacaccgtgttccatcgggacaagactaaagacactcatcctgagtcttgctgctctagcgagaagggaggacaacccctgccgtggttcgagcaccgaaagaatgtgccgcagtttgctgaaccaaccgagaccctgtttggtcctgactcaggaaaaggggctaagtccttggtggaacttctggacgagagtgagtgcacctccgatgaggaaattttcatctcacaggacgagattcagagtttcatggccaataatcagagcttctacagtaaccgagagcagtacagacagcacctgaaggagaaatttaataagtactgccgactgaacgaccacaaaagaccaatttgcagtggttggctgaccacagctggcgcaaattag

SEQ ID NO: 188809 - DNA, 1548 bp, synthetic construct
  misc_feature 1..1548: note = Description of Artificial Sequence: Synthetic coding sequence
  source 1..1548: mol_type = other DNA
atgagcagccccaacatctggagcaccggcagcagcgtgtacagcactccagtttttagccagaagatgacagtatggattttactccttttgtccctgtacccaggatttacttcacagaaatctgacgatgattatgaggattacgcgtctaacaagacatgggtgctgacacccaaagttccggagggcgatgtgaccgtgatccttaataacctgttagaggggtatgacaataaattaagacctgacatcggggttaaacctacactcatccacacagacatgtacgtcaacagtattggcccggtgaacgccatcaatatggagtacacaattgacatcttcttcgcccaaacctggtacgatagaaggctaaagttcaatagcaccatcaaagtattgcgccttaattctaatatggttggtaagatttggattcccgacaccttcttccgcaattcaaagaaggccgatgcacattggatcaccaccccgaatcgtatgctccgtatctggaacgacgggagggttctatatacgctgcgactcacgatcgacgcggaatgtcagctccagttgcataacttccccatggatgagcactcctgtccgctggagttctcatcatggtcccggtcaatcgcccaggcaggaatgtgtagcggcgtaatcagtgctcactacagtctgcgcttttggggctcgaccgatccacccactctggctagccgtgtggccggcatatccgacggctatccacgcgaggaaatcgtgtaccaatggaaacgttccagcgttgaggtcggcgacaccagatcttggaggctgtaccaattcagtttcgtggggctaagaaatacaaccgaagttgtcaagactacgtcaggtgattacgtagtgatgtctgtgtatttcgatctctcaagaaggatgggttacttcacaattcaaacttatattccctgcaccctgatagtcgtcctatcttgggtgtccttttggataaacaaagacgccgtccccgcccgtacctctttggggattactaccgttctcaccatgaccacgctgtctacgattgccagaaaatctcttcctaaggtgtcttacgtgaccgcaatggacctctttgtctccgtctgcttcatctttgttttctctgccttggtggagtacggaaccctacattatttcgtgtctaataggaagccctctaaggataaagacaaaaaaaaaaagaatccactccttcggatgttctcattcaaggctccaacaatcgacatcaggcctcgctccgccaccattcaaatgaacaatgcaacgcatctccaggaacgggacgaggagtatggatatgagtgccttgacggaaaagactgtgcctcgtttttttgttgcttcgaagattgccggacgggcgcatggcggcacggaaggatccatatcaggatcgctaagatggactcctatgcaagaattttttttccgactgcgttttgtttgtttaacttagtctattgggtgagttacctgtatctatag

SEQ ID NO: 188810 - DNA, 762 bp, synthetic construct
  misc_feature 1..762: note = Description of Artificial Sequence: Synthetic coding sequence
  source 1..762: mol_type = other DNA
atggcccccaagctgctgctgctgctgtgcctgttcagcggcctgcatgcaaggagtcgcaaggtcgaggaagatgaatatgaagatagcagttccaatcaaaaatgggttctcgcccccaagtctcaggacaccgacgttacgttgatcttgaataagctgctaagagagtatgacaagaaacttagacccgatatcggcattaaacctacagttattgacgtcgacatttacgtaaatagcatcggccccgtgtccagtatcaacatggagtaccaaattgacatctttttcgctcagacatggaccgactctaggcttaggtttaatagtaccatgaaaatactgacactcaatagtaatatggtggggctcatctggattccggataccatctttcgaaacagcaagactgccgaggctcattggattacgacaccaaatcagttgctgcgaatatggaatgatggcaaaattttatatacccttagactcaccatcaatgctgaatgccagctccagcttcacaacttccctatggatgagcactcctgcccgctgatcttctcaagctacggttaccctaaggaagagatgatatataggtggcgaaaaaattcagttgaggccgctgaccagaaaagctggcggttgtaccagttcgatttcatgggccttaggaatactactgaaattgtgactacatcagccggcaggaatctgcttaaggaggctcaactgtctaaagcacgggaagcttag

SEQ ID NO: 188811 - DNA, 1371 bp, synthetic construct
  misc_feature 1..1371: note = Description of Artificial Sequence: Synthetic coding sequence
  source 1..1371: mol_type = other DNA
atgcggaagagccccggcctgagcgactgcctgtgggcctggatcctcttgcttagcaccctgacagggcggtcgtatgggcagcctagcttacaggatgagctgaaggataataccacagtttttacgcggatccttgaccgcctccttgacggttatgataacagacttagaccgggcctaggagagcgcgtgaccgaagttaaaacggatatcttcgtaacttctttcggccctgtgtcagatcacgacatggagtataccatcgatgtgttctttcgacagtcttggaaggatgaacgcctgaaatttaagggtccaatgaccgtcctgcgtctcaacaaccttatggctagcaagatctggactccagacacattcttccacaatggaaagaagagcgtggcccacaacatgaccatgcctaacaaactcctgcggattactgaggacggaactctgctctacacaatgcggttgacagtccgcgccgaatgcccaatgcacttggaagactttcccatggacgcccacgcgtgtccactaaaattcggcagttatgcttatactagggcggaggtcgtgtacgagtggacaagggagcccgcaagatctgtggtggtggccgaagatggctcacgactgaatcaatatgacctgttggggcagactgtcgactctgggatcgtgcagtcctcaactggagaatatgtggtcatgacaacacacttccatcttaagcgaaagatcggttacttcgttatccaaacgtatcttccatgcatcatgactgttattctctcacaggtcagcttttggttgaaccgcgagtccgtccctgcccgcaccgtgttcggcgtaacaacagtcctgactatgacaactctgagtatatccgcccgaaactctttgccgaaggtggcgtatgctacagcaatggattggtttatagcggtctgctacgcctttgtgttttctgcactcatagaatttgctaccgtgaactactttacaaaacgtgggtacgcatgggatggaaagtcagtggtgccagagaagccaaagaaagtgaaggaccctcttattaagaaaaataatacctatgccccgaccgctacatcatacacgccaaatctggcgcgtggtgacccaggcctcgcaacaatcgcgaagagtgcgacaatcgagcccaaagaggtcaagcccgaaactaaacctcccgaaccgaagaaaacgttcaactccgtctctaagattgataggttgtctcgcatagcatttcccctgctgtttgggatatttaatctcgtctattgggccacttatttaaatcgggaaccacaattgaaagctccaaccccccatcagtag

SEQ ID NO: 188812 - DNA, 1371 bp, synthetic construct
  misc_feature 1..1371: note = Description of Artificial Sequence: Synthetic coding sequence
  source 1..1371: mol_type = other DNA
atgcggaagagccccggcctgagcgactgcctgtgggcctggatcttgttactgtcaacattaactgggcgcagctatgggcagccaagcctccaggacgaactgaaagataacaccaccgtcttcacacggatcctggaccgcctactggacggctacgacaatcgcctgcgacctggcttgggcgaaagagtgaccgaggttaaaaccgatatcttcgttacttctttcggtccagtctctgaccatgatatggaatacactattgacgtcttcttccgccagtcatggaaggatgagcgcctgaagtttaagggtccgatgacagtactaaggctgaacaatttgatggcgagcaagatttggacccccgatacatttttccacaacggcaaaaagtcagtggcacacaacatgaccatgcctaataagctgctgaggattacggaagacgggacacttctgtacactatgcggctaacagtgcgtgccgagtgtcctatgcatctggaagatttccccatggatgcccatgcctgccccctgaaattcggcagctacgcttacactcgggcagaagtggtgtacgagtggacaagggaaccggcacgatcagtcgtcgttgcagaagacggttcccggcttaaccaatacgacctcctagggcagacagtagattcagggatagtgcaatcatcaactggggagtatgtggtgatgacaacccattttcacctgaagagaaaaataggatatttcgtcattcagacctacctaccatgcattatgacagtcatcctttcacaggttagcttttggctgaaccgcgaatctgtccctgctcgcaccgtcttcggagtcacaactgtgctgaccatgactactttgtccatttcagctcgcaactctctgcctaaggtggcttacgcaacggccatggattggtttattgccgtatgttacgcctttgtcttcagtgctctgattgaatttgctactgtgaattacttcacaaagcgggggtacgcgtgggacggcaaatccgtggtgcctgaaaagcctaagaaggtgaaagacccccttatcaagaagaacaacacctatgcccccaccgctacgtcctatactcccaacctggctcggggcgatccaggactggcaaccattgcgaaatccgctactatcgagccaaaagaggttaaaccagagactaagcccccggaacctaaaaaaacattcaacagtgtatctaagatagatcgactgtccagaatcgccttcccactcttgttcggcatcttcaaccttgtgtactgggcaacctacttgaaccgggaaccccagctgaaagctccaaccccgcaccagtag

SEQ ID NO: 188813 - DNA, 1371 bp, synthetic construct
  misc_feature 1..1371: note = Description of Artificial Sequence: Synthetic coding sequence
  source 1..1371: mol_type = other DNA
atgcggaagagccccggcctgagcgactgcctgtgggcctggatcctgctcctgagcaccttgactggccgcagttacggtcagccttcgctgcaggatgaattaaaagataatactacagtcttcactaggattctggacaggctcttggacggctacgataacagactgcgacctgggctgggggagcgggttactgaggtcaaaacggatatttttgtgactagcttcggaccagtttcggaccatgatatggagtatacaatcgacgtgttctttagacagagctggaaagacgaaagattgaagttcaagggaccaatgaccgtgcttcggctgaacaacctgatggcttcaaagatttggacaccagatacatttttccacaacggtaagaagagcgttgctcacaacatgacgatgccaaataagctgttgcggataaccgaagacgggacactgctctataccatgagacttaccgtgagagccgagtgtccgatgcacctggaagattttccaatggacgctcacgcatgccctctgaagtttgggtcgtacgcatatacccgggccgaagtcgtgtacgagtggaccagggagcccgctcgtagcgtggttgtggctgaagatggtagccggctcaaccagtacgatctactgggtcagacggtggacagcggcatagtccaaagttcaaccggtgaatacgtggtaatgaccacacatttccatctcaagagaaagattggctacttcgtcattcagacctatctgccttgtattatgacggttattttgagccaggtgagtttctggcttaatagagagtctgttcccgctcgcacagttttcggggtgacaaccgtattgaccatgaccaccctgtccatctcagcccgcaattccctgcctaaggtagcgtatgcgaccgcgatggattggttcatagctgtttgttatgcctttgtgttctctgctttgattgagttcgcgaccgtcaactacttcacaaaacggggatatgcatgggacgggaaatccgtcgtaccagaaaagcctaagaaggttaaagatcctctgatcaagaagaataacacctacgccccgaccgctacatcgtacacgccaaatcttgcgaggggcgaccccgggctcgccacgatagccaagtccgctacaatcgaaccaaaagaggtgaagcctgagactaagcctccagaacccaagaaaaccttcaacagtgtgtccaaaattgacaggctgtccaggatagctttcccattgttgtttggaatcttcaacttggtctattgggcaacatatctgaatagagaaccccaacttaaggctccaacacctcatcaatag

SEQ ID NO: 188814 - DNA, 1371 bp, synthetic construct
  misc_feature 1..1371: note = Description of Artificial Sequence: Synthetic coding sequence
  source 1..1371: mol_type = other DNA
atgcggaagagccccggcctgagcgactgcctgtgggcctggatcctgcttctgtccacactgacaggccgctcttacggtcaaccctctctccaggatgagctgaaagacaacaccaccgtatttacacggatactcgaccgattgctggatggctacgacaatcggcttcggccgggcttgggcgaacgggtgacagaagtgaagactgacatttttgttacttcttttggccccgtgtctgaccacgatatggagtacactattgatgtgttcttccgacaatcttggaaggacgaacgattaaagtttaagggaccaatgacagttttgagacttaacaatctaatggcctctaagatctggactcctgacactttcttccacaacgggaagaaatcagtagcccataatatgacaatgccgaataagctgttgaggataaccgaggacgggacactgctgtatacaatgcgattgacagtgagggctgagtgcccaatgcatctggaagacttcccgatggacgcacacgcctgtccactcaagtttggctcttatgcctatactagggccgaggtcgtgtacgagtggacacgcgaacctgcacgctctgtcgtggtggcagaggatgggtctagactcaaccaatatgacctcctggggcagacagtggattccggcatcgtgcagtcaagcacaggggagtacgtcgtcatgaccactcacttccacctgaagcgaaagattggttattttgttatacagacatacttaccatgcatcatgactgtgattttaagccaggtttcgttctggttgaatcgggagagcgtgcccgcccggaccgtgttcggggtgaccaccgtcctaaccatgactacgctgtcaatctctgctcggaattctctacccaaggtcgcgtacgccacagcaatggactggtttattgcagtatgttacgctttcgtcttttccgcgctcatagaatttgcaacagtgaattattttacgaaacgagggtacgcatgggacggcaagtctgtcgtccccgagaaaccaaagaaggtgaaggatcccctgatcaagaaaaacaatacttatgccccaacagccacttcgtacacccctaacctcgccagaggcgaccctggtctggctacaattgccaaatctgccacaatcgagcctaaggaggtgaaacctgaaacgaaacccccagagccaaaaaaaacatttaactcagtgagcaagattgatcgcttgagcagaatcgctttccctttgcttttcggcattttcaatctggtgtactgggcaacatacctcaaccgggagccacaactcaaagccccaaccccgcaccaatag

SEQ ID NO: 188815 - DNA, 1371 bp, synthetic construct
  misc_feature 1..1371: note = Description of Artificial Sequence: Synthetic coding sequence
  source 1..1371: mol_type = other DNA
atgcggaagagccccggcctgagcgactgcctgtgggcctggatcctgcttttgagcaccctaaccgggaggtcatatggccagcccagcctccaggatgaattgaaggacaatactacggttttcacacgtatcttggaccggcttctcgacgggtatgacaaccgactgcgacctggactgggtgagcgcgtgaccgaggtgaaaactgacatcttcgtcacgagttttggccctgtgagcgatcatgatatggagtacacaatcgatgtatttttcaggcagtcttggaaagatgagcgactgaaattcaagggaccaatgacagtgctgcgcctgaacaatctcatggccagcaaaatttggacccctgatacctttttccacaacggaaagaagtccgtagcccataatatgactatgcccaataaactcctgaggattaccgaggatggcacattattgtacacaatgaggctgaccgtaagagctgagtgtcccatgcacctcgaggactttcctatggatgcccacgcttgccctctgaagtttggaagctatgcatacacccgcgcagaggtcgtctacgaatggacccgagagccagcgcgttccgtggtggtcgcggaagacgggagtcggcttaatcagtacgatctgctgggacagacagtcgactcggggattgtgcagagttcaaccggcgaatacgtggtgatgaccacacattttcatttaaagcgcaagatcggatactttgtgatccagacttacctaccttgtatcatgaccgtcatcttgtcacaggtctctttctggctgaatagggagtctgttcctgccagaacagtctttggcgtaaccactgtactgacgatgaccactctgagcatttccgccagaaactcactaccgaaggtggcctatgcgaccgcgatggattggtttattgcagtgtgttacgccttcgttttttcagctctcattgaattcgccacagtcaactattttactaagagaggctatgcctgggatggcaagagtgtcgtaccagagaaacccaagaaagttaaagaccctctgattaaaaaaaacaacacatacgcacctacagccacttcatacacccctaatctggctcgcggcgacccaggtctcgctacaatcgccaagtctgcaaccatcgagcccaaagaggtaaaacccgaaacaaaacctccagaacccaagaaaacattcaactctgtgtcaaagattgatagactgagtaggatcgcttttcccctgctgttcggcatttttaacctcgtgtactgggcaacgtacctgaaccgggaaccacaactgaaggcccccaccccacatcagtag

SEQ ID NO: 188816 - DNA, 1371 bp, synthetic construct
  misc_feature 1..1371: note = Description of Artificial Sequence: Synthetic coding sequence
  source 1..1371: mol_type = other DNA
atgcggaagagccccggcctgagcgactgcctgtgggcctggatcctcctgctctccaccctgacagggcgctcatatggtcaaccttccctgcaggatgagctcaaagacaacacaactgttttcacaagaattctcgataggctgttggatggatatgataatcgattgaggcccggtctgggagagcgtgttaccgaagtgaaaacggacattttcgtaacatctttcggaccagtgtcagaccacgacatggagtacacaatcgatgtattctttcgccaaagctggaaggacgaacgccttaaattcaaggggccaatgactgtgctaagactgaataatctaatggctagtaagatttggacccctgacacattctttcataatggcaaaaaaagcgtcgcccataatatgacaatgccgaacaagctgttaagaataaccgaagacggtaccctcttgtataccatgagactgacggtgcgtgccgaatgtccgatgcacctcgaagacttccctatggacgcccacgcatgtcccctcaagttcggatcttacgcctatacacgcgccgaagtagtgtatgagtggacgagggaaccggcccggtccgtggtggttgccgaggacggcagtagactgaaccaatacgatttgttgggacaaaccgtcgattcagggatagtgcagtcgtccactggagagtatgtggtgatgaccacccattttcatcttaaaagaaagattggatacttcgtgatccagacatacctcccttgtataatgaccgtgattctcagccaggtgagcttttggctgaacagagaatcagtaccagccaggacagtcttcggagtcacgacagtgttgacaatgactaccctgtcaatttcagccaggaatagtttaccaaaggtggcctatgcaaccgcaatggactggtttattgccgtttgttacgcatttgttttctctgcgttgatcgagtttgcaactgtgaactattttacgaagagggggtatgcttgggacgggaaaagcgtcgtccccgagaagccaaaaaaggttaaggacccactgatcaagaagaataatacgtatgcccctaccgctacctcctacacaccaaacttggcccgcggagatccgggtctggcaaccatcgctaagagcgctaccatcgaacctaaagaggtcaaaccagagacgaagccccctgaacctaagaaaacctttaattccgtttctaagatagacaggttgagtagaattgccttccccctcctttttgggatattcaatctcgtttattgggccacctaccttaatcgggaaccccaactcaaggcacctaccccgcaccaatag

SEQ ID NO: 188817 - DNA, 372 bp, synthetic construct
  misc_feature 1..372: note = Description of Artificial Sequence: Synthetic coding sequence
  source 1..372: mol_type = other DNA
atgcggaagagccccggcctgagcgactgcctgtgggcctggatcctgctcctgagcacgctaactggtagatcctatggacaaccttctctgcaagacgaattgaaggataacaccaccgtgtttactcggatcctcgatcgcttactcgatgggtacgataataggctaagacccggcctgggcgaaagagtgaccgaagtgaaaactgatatcttcgtcacatctttcggccccgtgagtgaccatgacatggagtatacaatagacgtgttcttccggcagtcctggaaagatgagaggctgaaattcaaggggccgatgaccgtcttgcgcctgaataatctcatggcctccaagatctggacttag

SEQ ID NO: 188818 - DNA, 1356 bp, synthetic construct
  misc_feature 1..1356: note = Description of Artificial Sequence: Synthetic coding sequence
  source 1..1356: mol_type = other DNA
atgaagaccaagctgaacatctacaacatgcagttcctgctgttcgtttttctcgtgtgggatccagccaggttagtcctggcaaacatccaagaggacgaagccaaaaataacataacgatttttacgcggatcctcgataggctgctggatggatatgataaccgcttgagacctggtctaggggacagtatcactgaggtgttcacaaacatatacgtgacgagttttggccctgtaagcgacactgatatggaatacaccatcgacgtttttttccggcagaaatggaaggacgaacggctgaaatttaaaggacccatgaatatacttaggcttaacaatttgatggccagcaaaatctggactcccgacaccttttttcacaatggaaaaaaaagtgtggcccataatatgacaatgcctaataagctcctgcgcattcaggacgacgggacactgctgtacactatgcgcctgactgtgcaggccgaatgcccgatgcaccttgaggactttcctatggacgcgcatagctgtccactgaaattcgggtcatacgcctacacgacgagtgaggttacttatatctggacctacaacgcgagcgacagcgtgcaagtggccccggacggaagccggctaaatcagtacgatctgttggggcagagcatcggcaaagaaaccattaagtctagtactggcgaatacaccgtcatgaccgcccattttcatctgaagcgcaaaattgggtatttcgtgattcagacatacctgccttgtattatgacagtcattttatcccaggtgtccttttggcttaaccgggaatctgttcctgcgcgaacggtgttcggcgtgacaaccgtattaactatgactaccttatctattagcgcacgtaatagcctgccaaaggtcgcttacgctaccgctatggattggttcattgccgtctgttatgccttcgtgttctctgccctcatcgagttcgctacggtgaattattttactaagaggggttgggcatgggatggcaaatccgttgttaacgataagaagaaagaaaaagcctctgtcatgattcaaaacaacgcctatgccgtggcagttgctaattatgctcctaatttgtccaaggacccagtgctctcgacgatctctaagtccgcgaccactccagagccgaataagaagccagaaaataagccagccgaagcgaagaagacattcaattcagtatcaaagattgacagaatgagcaggatagtgttcccagtgctattcgggacgttcaacctcgtgtactgggccacctatcttaaccgggagcccgttttaggggtatctccttag

SEQ ID NO: 188819 - DNA, 1356 bp, synthetic construct
  misc_feature 1..1356: note = Description of Artificial Sequence: Synthetic coding sequence
  source 1..1356: mol_type = other DNA
atgaagaccaagctgaacatctacaacatgcagttcctgctgttcgtttttctcgtttgggatccagcgcgcctagtgttggctaatattcaagaggacgaagctaaaaataacattacaatttttacacgaatcctcgaccggctcctggacggctacgataatcgcctcagacctggtttaggagactctataacagaagtgttcacaaatatatatgtgacatccttcgggcccgttagcgataccgacatggagtatactatcgacgtgtttttccggcagaagtggaaggatgagagacttaaatttaagggccctatgaatattctgcggttgaacaacctcatggcttccaaaatatggacaccagacacattttttcacaacggcaaaaaaagcgtggcgcataatatgactatgcccaataaactgctacgcatacaagacgacggtactctcctgtacacaatgcgcctgaccgtacaggctgagtgtccaatgcaccttgaagatttccctatggacgctcatagttgtccgttgaagtttggcagttacgcctacacaactagcgaagtgacctacatttggacatacaatgcctctgactcagtccaagtggctcctgacggttctcgcctgaaccagtacgacctgctggggcaatccattggtaaagaaacaataaaatcatctaccggagagtacactgtgatgacagcacactttcatctgaaacggaaaattgggtattttgtgatacaaacctatctgccgtgtattatgacagtgatcctatcccaagtgtcgttttggctgaacagggaaagtgttcccgctcgaacagtcttcggcgttaccacagtgctgacaatgacaacactgtctatctctgcccggaatagtctgccgaaagttgcttatgcaactgctatggattggtttatcgctgtgtgctacgcttttgtattcagcgccttgattgagtttgcaacagtgaactactttacaaaacgaggttgggcctgggatgggaagagtgtggtgaatgataaaaagaaggaaaaggctagcgtcatgatccagaacaatgcctacgctgtcgcggtcgcgaattacgcccccaatttgagcaaggacccagtgctctctactatatcaaaatctgcaacaacgccagagccaaataagaaacctgagaataagcccgcggaagcaaagaagaccttcaattccgtttccaagattgatcggatgtcacgcattgtgttcccggttctatttggaacattcaacctggtgtactgggctacatatctcaaccgcgagcccgtactcggggtgagcccctag

SEQ ID NO: 188820 - DNA, 459 bp, synthetic construct
  misc_feature 1..459: note = Description of Artificial Sequence: Synthetic coding sequence
  source 1..459: mol_type = other DNA
atgaagaccaagctgaacatctacaacatgcagttcctgctgttcgttttcctggtgtgggatccagcaagattggtcttagctaacattcaggaagatgaagcaaaaaacaatataaccatcttcacccggatcctcgacaggctgctcgacggttatgacaaccgcctgcgccccggcttgggcgattcaattacagaggtgttcactaatatctacgttacaagtttcgggccggtgtccgacaccgacatggagtataccatcgacgtgttttttcgccaaaagtggaaggacgagcgactgaagtttaaaggtcctatgaatattttgcggctgaataatttgatggcatcaaaaatctggaccccagatacctttttccacaacggtaaaaaaagtgtcgcgcataatatgacgatgcccaataaactactccgcatacaagatgatggatag

SEQ ID NO: 188821 - DNA, 414 bp, synthetic construct
  misc_feature 1..414: note = Description of Artificial Sequence: Synthetic coding sequence
  source 1..414: mol_type = other DNA
atgaagaccaagctgaacatctacaacatgcagttcctgctgttcgtgttccttgtgtgggatcctgctaggctcgtgttggcaaatattcaggaagacgaagcaaagaataacattaccattttcacaagaattttggaccgcctcctggatggttatgacaacaggttgcgcccaggtctgggggactctattactgaggtctttactaatatttacgtaaccagcttcggccctgtttcggacaccgacatggagtatactatagatgtcttcttccgccagaagtggaaagacgagcgactgaagttcaaggggcctatgaacatcctgcgtctgaataacctcatggcaagtaagatctggacaccagacacgttctttcacaacggcaaaaagtcggtggctcactag

SEQ ID NO: 188822 - DNA, 1536 bp, synthetic construct
  misc_feature 1..1536: note = Description of Artificial Sequence: Synthetic coding sequence
  source 1..1536: mol_type = other DNA
atgaagaccaagctgaacatctacaacatgcagttcctgctgttcgtgtttctggtctgggatcctgcaagattggttctagccaacattcaggaagatgaagccaagaataacatcacgatttttactagaatcctggatcgacttctggatggctatgataatcgtctcagaccggggctgggcgatagcatcacggaggtatttactaacatttatgttacaagcttcgggcccgttagcgacactgacatggagtacaccatagatgttttcttccggcagaagtggaaagatgagaggctcaaattcaaaggtcccatgaatatccttagactcaataatctgatggcctccaagatctggacccctgatacctttttccataacggtaagaagagtgttgctcacaacatgactatgcccaataaactcctcagaatccaggacgacggcactttgctttacaccatgcggctgacggtccaggccgagtgtcctatgcatctggaagactttcctatggatgcacacagctgtccgttaaagtttggcagctacgcttataccacttctgaggtgacttacatatggacatacaacgcctccgacagcgttcaggtggcccctgatgggtcccgtctcaaccagtatgatctgctgggtcagagtatcgggaaggagacaattaagagctctaccggagagtataccgtgatgacagcacattttcatctcaagcggaaaatcggatactttgtgatccagacgtacctgccatgcattatgacagtgatcctgtcccaggttagcttctggctcaacagggagagtgtgcccgcgaggacagtgtttggcgttactacagtgttgacaatgacaaccctctcaatctctgcacgcaactccctgccgaaggttgcttatgctactgctatggattggtttattgctgtttgttacgcgttcgtgttcagtgccctgattgaatttgccacggtcaattatttcaccaagcgagggtgggcatgggacggcaagagcgtcgttaatgacaagtccccatctattaaggcagagggcatcactcttacttacaatagtgtcaaggctattctgcagggggctaagctgatctggagcaaatatatagccttctcatggcccagcctgttccaggagaaaaccctagaatacctggaaaagtggatggattgcctcacctttaagcagagtagtaaaaaagagaaagccagcgtgatgatacagaacaacgcctacgctgtggccgtggcaaactacgctcccaatctgtcgaaagatcctgtcctgagtaccattagcaagtcagctactacacctgagcccaataaaaaacctgagaataagcctgctgaggcaaagaagactttcaattcggtctcgaagatcgaccgcatgagccgcatcgtgtttcccgtgcttttcggcacttttaatttggtgtactgggccacatacttgaatcgggagccagtcctgggggtgtctccttag

SEQ ID NO: 188823 - DNA, 1356 bp, synthetic construct
  misc_feature 1..1356: note = Description of Artificial Sequence: Synthetic coding sequence
  source 1..1356: mol_type = other DNA
atgaagaccaagctgaacatctacaacatgcagttcctgctgttcgtgttcctggtatgggacccagcaaggcttgtactggccaatatacaggaggacgaggccaagaacaacattaccatctttacaaggattctggatcggttattggacggttatgataaccgcctgcgacccggcctgggagatagtatcactgaagtcttcactaacatttacgtgacaagctttggaccagtgagcgataccgatatggaatatactatcgatgttttctttaggcaaaagtggaaggacgaaaggttgaagttcaagggtcccatgaacatacttagactaaacaatctgatggcaagcaagatctggacaccagatacattttttcataacggcaagaagtctgtagcacataatatgacgatgccgaataaacttttgcgcatacaggacgacggcactctgctgtacacgatgaggctcaccgttcaagcagagtgtccaatgcatctggaagattttcctatggatgcacatagctgtcctctgaagtttggctcctacgcatacactacatctgaagtgacttatatctggacgtataacgcctctgactccgtacaggtggcgccagacggttctcggctgaatcagtatgacctactgggacagtctattgggaaggagaccatcaagagctcaaccggagaatatacagtgatgacggctcactttcatctgaaaaggaagatcggatatttcgtgattcagacatacttgccttgcattatgaccgttatccttagccaagtgtccttttggcttaacagagagagcgtgccggctagaaccgtgttcggcgtgactacggtcctgacaatgaccaccctgtccatctctgcaagaaacagcctgcctaaggtggcatacgccacggccatggactggttcatagcagtgtgttatgcatttgtctttagcgcgctcatagagttcgctacagtcaactatttcaccaagagagggtgggcttgggacggcaagagcgtggtaaatgacaaaaagaaggagaaggccagcgtgatgatccaaaacaacgcttacgctgtcgccgtggccaactatgctcccaatctgtcaaaggaccccgtcctgtccactatctccaaatctgccaccacaccagaacccaataaaaagccagagaacaagccggccgaagccaaaaagacctttaattcagtgtcaaagatcgaccgaatgagccggatcgtgtttcccgtcctgttcggaacattcaacctggtgtactgggccacttacttgaatcgcgaaccggtgttaggcgtgtctccttag

SEQ ID NO: 188824 - DNA, 1356 bp, synthetic construct
  misc_feature 1..1356: note = Description of Artificial Sequence: Synthetic coding sequence
  source 1..1356: mol_type = other DNA
atgaagaccaagctgaacatctacaacatgcagttcctgctgttcgtattcctggtctgggacccagcccgtcttgtcctggccaacattcaggaggacgaggcaaagaacaatatcactatctttacacgtatacttgatagactcttggatggctatgacaatcggttacggcccgggctgggagatagcatcactgaagtttttaccaatatctacgtgacaagtttcggtccagtctctgacaccgacatggaatatactatcgatgtgttctttagacagaagtggaaggacgagaggctcaaatttaaaggccccatgaacatcctccggctgaacaacctcatggcctctaagatctggacccccgatacattttttcacaatggaaagaaaagcgtggctcacaatatgaccatgccaaacaagcttttacgcatccaggacgacggcacactgctgtacactatgcggctgaccgtgcaggctgagtgtcccatgcacctcgaggacttcccaatggacgcccacagctgccctcttaaatttggatcatatgcatacactaccagtgaagtgacatacatctggacctacaacgcttccgactcagtccaggttgccccagatggaagtcgcttaaaccagtacgacttactggggcagagcatcggcaaggagacaattaagtcaagcacaggtgaatatactgtgatgacagcgcattttcacctaaagcggaaaatcggctactttgtcatccagacgtacctgccctgtattatgacggtgattctgagccaggtcagcttctggctgaatagggaatcggtgcctgctaggactgtgtttggggttacaacagtgttgaccatgaccactctgtccatctcagccaggaatagtctacccaaggtggcatacgccacagccatggattggtttatcgccgtctgctacgccttcgtattcagcgccctgatcgaatttgctaccgtaaattattttaccaagcgcggttgggcctgggacggcaagtcagtagtgaatgataagaagaaagaaaaagcctctgtgatgatccaaaacaatgcttacgccgtcgctgttgctaactacgcacctaacctgtctaaggatcccgtgctgtccaccatctcaaaaagcgcgaccaccccagaacctaataagaagcctgagaataagccagcagaggctaaaaagactttcaatagcgttagtaagatcgaccggatgtctaggatcgtatttcccgtcttattcggtacttttaatctggtttactgggcaacttacctgaaccgggagccggtcttgggagtcagcccatag

SEQ ID NO: 188825 - DNA, 1104 bp, synthetic construct
  misc_feature 1..1104: note = Description of Artificial Sequence: Synthetic coding sequence
  source 1..1104: mol_type = other DNA
atgaagaccaagctgaacatctacaacatgcagttcctgctgttcgtctttctagtctgggaccctgcccggcttgtgctggccaatatccaggaagacgaggccaagaacaacattaccattttcactagaatcctcgatagattgttggacgggtatgacaacaggttgaggcccggactaggcgatagcataactgaggtgttcacgaacatctatgttacatcctttggacctgtcagcgatacggacatggagtacactatagatgtgttctttcgacagaaatggaaggatgagcgactgaaatttaaaggacctatgaatatcctcaggctgaataaccttatggcttcaaagatatggacacctgacacatttttccacaacggaaagaaatcggtggcacacaatatgacaatgcccaacaagctgttgagaattcaagacgatggcaccctcctgtataccatgcgcttaaccgtgcaggctgagtgtcctatgcacctggaagattttcctatggatgcccattcatgccctctgaagttcggaagttatgcttatacaacaagcgaggtgacatacatttggacttacaatgcttcagattcggtacaggtggcacccgatggatccagactgaaccaatatgatttgcttggccagtcaattggaaaggagaccattaagagttcaaccggagagtatacagtaatgacggcccacttccatctaaagcgcaagattggctatttcgtcattcaaacttacctgccatgcattatgacggtaattcttagccaagtgtctttctggctgaaccgcgagtcagtccctgctagaacagtcttcggtgttacaactgtgttaactatgaccacgctatctattagcgcaaggaattcccttcccaaagtcgcttatgctaccgcaatggattggtttatcgccgtgtgctacgccttcgtgttttccgccctcattgagttcgccaccgtgaactatttcacaaaaagaggatgggcttgggatggtaaatcagttgtcaatgataaggtgagtgagagcttccgtgtcatcataatcaaaaagattccatag

SEQ ID NO: 188826 - DNA, 1371 bp, synthetic construct
  misc_feature 1..1371: note = Description of Artificial Sequence: Synthetic coding sequence
  source 1..1371: mol_type = other DNA
atgcggctgaagatcaccctgcccagcctgcgggagttcctgaccgatttctggatggtgaccatcattgggcttgaccaggactgggaggaatacacaattgacgtcttctttcgccagaaatggaaggatgaacgcttaaagttcaaaggaccgatgaatattttacggctaaataacctcatggcaagtaaaatttggacgccagacaccttctttcacaatgggaagaaatccgtggcacacaacatgacaatgcccaataagctactgcgcatccaggatgatggcacattgctgtacactatgcggcttaccgtgcaggcagaatgtccaatgcacctggaagattttccaatggacgcccacagctgtcctttgaagtttggctcatatgcgtataccacctcagaagtgacatatatctggacgtacaacgcaagcgattcagttcaggtagcccccgatggctctaggctgaatcagtatgacctcttagggcagagtatcggtaaagagactatcaagtcttccaccggtgaatacacagtgatgacggcccactttcacctgaaacggaagattgggtacttcgtgatccagacgtatctgccttgcataatgaccgtgatcctgagtcaagtgtcattctggctgaaccgcgagagcgttccggcccgaaccgtctttggcgtcaccacagtactgacaatgaccaccctttctatttcagcgcgcaactctctgccgaaggtggcttatgccaccgcaatggattggttcattgctgtgtgctacgcattcgtcttctccgccctcatagagtttgcgacagtgaactatttcaccaaaaggggctgggcttgggatgggaaatccgtggttaacgataaaagccccagcattaaggccgagggcatcacgttgacctacaattccgtgaaagcaatcctgcagggtgctaagctcatttggtctaaatacatcgctttcagttggcccagcctgtttcaagagaagaccctggaatacctcgagaaatggatggattgcttaacattcaagcagtcttccaaaaaggagaaagcctccgttatgatccaaaacaacgcctatgctgtcgcagtggccaattacgcacctaatctgtccaaagatcccgtcctgtctacaatttccaagtctgcgacaaccccagagccaaacaagaagccagagaacaaacctgccgaagcaaagaaaacatttaacagtgttagcaagatcgaccgtatgtctcggatcgtgtttccagtccttttcggcacattcaacttggtgtactgggctacctatctgaatcgcgagcctgtccttggtgtgtctccctag

SEQ ID NO: 188827 - DNA, 1479 bp, synthetic construct
  misc_feature 1..1479: note = Description of Artificial Sequence: Synthetic coding sequence
  source 1..1479: mol_type = other DNA
atgatcatcacccagaccagccactgctacatgaccagcctgggcatcttgtttctaataaacatactgccaggaactacagggcagggagagagccgacgacaggaacctggagattttgtaaaacaggatataggggggctctccccaaagcatgcgccagacattccagatgatagcactgataatatcactatatttacccgaatcctggaccggttgctcgacggctatgacaaccgcctgagaccaggcctcggagatgcggtcacagaagtgaaaacagacatatatgtgacctcttttggtcccgtgagtgacaccgacatggagtacactatcgatgttttttttagacaaacttggcatgacgagaggttaaaatttgacggcccaatgaagatcctgcccctcaacaatctgctggccagcaagatctggacacctgataccttcttccacaatggcaagaagagtgtagcccataacatgaccacgccaaacaagctcttaagactcgtcgataacggcacccttctgtacacaatgaggttaaccattcacgcggagtgtccaatgcacctggaagacttccctatggatgtgcatgcctgtcctctgaaattcggtagttacgcctataccactgccgaagtggtgtacagctggaccctagggaagaacaagagcgttgaagtggctcaggacggctcgcggctgaaccagtacgacttactcggacacgtggtgggtacggagataattcggagttctactggcgaatatgtagtgatgacgacccactttcacctgaagcgaaagattggatattttgtgatccaaacgtatctcccttgtatcatgacagtcatcctttcgcaggtgagcttctggctgaacagagagagtgtgccagccagaaccgtattcggggtcacaaccgttctgactatgactactctatcaatttctgcccgcaactcgctgccgaaagtggcttacgccacagcaatggattggtttatcgcagtttgctacgcatttgtcttttctgctttgatcgagtttgcaacagtgaattactttacgaagagatcctgggcatgggagggaaaaaaggtgcctgaagctctagaaatgaagaaaaagaccccggccgcaccagccaaaaagacaagcaccacgtttaatattgtaggaacgacctacccaataaacctggcgaaggataccgaattttctactattagcaagggggccgccccatctgctagcagcacacccaccatcatcgcaagcccaaaagctacatacgtgcaggactctcctaccgagactaaaacttataattctgtgtctaaggttgacaagatctccaggatcatatttccagttctctttgccatcttcaatctggtgtactgggcaacctacgtgaacagggaatctgcaattaagggcatgatcagaaagcaatag

SEQ ID NO: 188828 - DNA, 1479 bp, synthetic construct
  misc_feature 1..1479: note = Description of Artificial Sequence: Synthetic coding sequence
  source 1..1479: mol_type = other DNA
atgatcatcacccagaccagccactgctacatgaccagcctgggcatactgtttcttatcaatattctgcctgggaccacgggccagggcgagagcagacgtcaagagcctggcgacttcgtcaagcaggacattggcggtctttcgccaaagcacgccccggatatccctgacgattccacagataacattacaatcttcacacggatactggacaggctgttggacggttatgacaataggctgcgccctggtctgggagacgctgtgactgaggtaaaaaccgacatttacgtgaccagcttcggtcctgtctcagacactgatatggaatacaccatcgacgtgtttttcaggcagacatggcacgatgaacgcttaaagtttgatggacctatgaagatcttaccactcaacaatctgttggccagtaaaatttggacgcctgacactttcttccacaatggaaaaaaaagtgtggctcacaatatgaccacacccaataaattactccggctggtggacaatggaaccctgctgtacactatgcgtctcacaattcacgctgaatgccccatgcacctcgaagactttcccatggatgtgcacgcttgcccgctcaagttcggttcttatgcttataccaccgctgaagtggtatacagttggaccctgggaaagaacaagtcagtcgaagtcgcgcaggacggttcccggttaaatcagtatgaccttctgggccatgttgttgggactgaaatcatccgttcctctacaggcgagtatgtagtgatgaccacccacttccaccttaagcggaagattgggtacttcgtgatccagacctaccttccttgcattatgacggtgatcctttcccaggtcagtttctggctgaacagggagtccgttccagcaaggacagtgtttggagtcacaactgttttgacaatgacgaccctatccatttctgcgcgcaactcactgcccaaagttgcctacgctacagctatggattggtttatcgccgtgtgttatgccttcgtgttctctgcccttattgagtttgcaacagtcaactattttaccaaacgcagctgggcttgggaagggaaaaaagtgcctgaggctctggaaatgaagaaaaaaacccctgcagcacctgccaagaagacaagcaccacgttcaatatcgtgggcacaacctaccccattaatctcgcaaaggacaccgaattctctacgatctcaaaaggtgccgccccctctgccagctccacaccaaccattattgctagtcccaaagccacctacgtgcaggactccccgacagagacaaagacctacaactctgtcagtaaggtcgacaagataagccggattatcttcccggtgctgtttgccatctttaacttagtgtattgggccacgtacgttaatagagaaagcgctattaaaggcatgatccggaaacagtag

SEQ ID NO: 188829 - DNA, 339 bp, synthetic construct
  misc_feature 1..339: note = Description of Artificial Sequence: Synthetic coding sequence
  source 1..339: mol_type = other DNA
gagtacaccatcgacgtgttcttccggcagacctggcacgacgagagactgaaattcgatggcccaatgaaaatactgcccctgaataatctcctggcgtctaaaatatggacccccgacacattctttcacaacggcaagaagtccgttgctcacaacatgaccacccccaacaagttacttcgacttgtagataatggtactctgctttacaccatgcgaatcgaggaggtgcagaaacaccgttccatgatgaagcctagtgtgagctacacggtggctccctggatccaagaggggggcccaggaggcaggcatcgcttgaaaatggagaagtag

SEQ ID NO: 188830 - DNA, 1479 bp, synthetic construct
  misc_feature 1..1479: note = Description of Artificial Sequence: Synthetic coding sequence
  source 1..1479: mol_type = other DNA
atgatcatcacccagaccagccactgctacatgaccagcctgggcatcctgttcctgatcaacattctgccggggaccaccggtcagggggagtcgcggcgacaggagcctggcgatttcgttaaacaagacatcggagggttgtccccaaagcatgccccggacatcccagatgattctactgataatataactatcttcacccggatcttggacagattgttagatggctacgataatagactccggcctggcctgggggatgcagtcaccgaggttaaaaccgacatctatgtgacaagctttggtccagtttctgacaccgacatggagtacactatcgatgtgttcttcaggcagacatggcacgacgagcggctgaaattcgacgggccaatgaaaattctgccactgaacaatctgctagctagtaaaatatggacccctgacacgttcttccacaatggcaagaaaagtgtcgcgcataacatgacaacccccaacaagttgctgaggctggtcgacaatgggaccctgctgtataccatgcgcctgaccattcatgccgagtgtccgatgcatctcgaagacttccccatggacgtccatgcttgtcccctgaaatttggatcttacgcttacactacagccgaggttgtgtacagttggacacttggcaaaaataagagcgtagaggtcgcgcaggacggctctcgcttgaaccagtatgatctgctgggtcatgtggtgggcactgagataatcagatcctccactggagagtatgtcgtgatgactactcactttcatcttaaacggaagataggatacttcgtgatccagacttatttaccttgcattatgacagtcattcttagtcaggtgagtttctggcttaacagggaaagcgtcccagcaagaacagtattcggagtgacaactgtgcttacaatgacgaccctgagtatttcagctcggaattccctgccgaaggtagcttacgccaccgcgatggactggttcattgcagtttgttatgcatttgtattcagcgccctgatcgagtttgcaactgtgaactacttcacgaaacgctcttgggcatgggagggaaagaaagtcccagaagcactggaaatgaagaaaaagacacccgccgcgccggccaaaaagacctcgacaaccttcaacattgtcggaaccacctatcccattaacctcgccaaagacaccgaattcagtaccatatccaaaggagccgctcccagcgctagctcaactcccacaattatcgcatctccaaaggccacatatgtacaggacagtcctaccgagactaagacttataattcggtgtctaaagtggataaaattagccgcataatcttccccgtgcttttcgcaatctttaatctggtgtattgggcaacctatgtgaatcgagagagtgccatcaagggcatgattagaaagcagtag

SEQ ID NO: 188831 - DNA, 1665 bp, synthetic construct
  misc_feature 1..1665: note = Description of Artificial Sequence: Synthetic coding sequence
  source 1..1665: mol_type = other DNA
atggtgagcgccaagaaggtgcccgccatcgccctgagcgccggcgtctcttttgctctgctgaggtttctctgcctcgcggtatgcctgaatgagtcccccggccagaaccaaaaagaagaaaaactgtgtacagaaaatttcaccaggatcctggattctttactggacggttatgataaccggctgcgcccgggtttcggcgggcccgtaaccgaagtgaagaccgatatttacgtgacaagtttcggaccggtttccgacgtggagatggagtacaccatggacgtttttttccggcagacatggatagataagagactgaaatacgatgggcccatcgagattctgcgcctcaacaacatgatggtgaccaaggtttggacacctgacaccttcttcaggaacggtaaaaaatctgtgtcacataatatgaccgcacccaataagctatttcggattatgcggaatggcaccattctttacaccatgagacttaccatctccgctgaatgcccgatgcgcctggtcgattttccaatggacgggcacgcctgtccactcaagtttggcagctatgcttacccgaaaagcgagatgatctacacctggacaaagggccccgagaagtccgtcgaagtgccaaaggagtcttcctctctggttcagtacgacctgataggacaaacggtgtcaagcgagacaatcaagtcaattaccggggagtatatcgtgatgacagtctacttccatcttagacgcaagatgggatattttatgatccagacatatatcccttgtattatgaccgtgatcctcagccaggtcagcttctggatcaataaagagtcagtccccgcgagaactgtttttggtattactactgtgttaaccatgaccacactgtccatcagtgccagacactccttgcctaaggtgtcttacgccactgccatggattggtttatcgccgtttgctttgcgttcgtgttctctgcgttgatcgagttcgccgccgtgaactacttcaccaatattcaaatggaaaaggcgaagaggaagacctcaaaaccaccccaggaagtccccgctgctcccgtgcaacgcgaaaagcatcccgaagctcccctgcagaacactaatgctaatctgaatatgcggaagcggaccaatgctctggtccactccgagagcgatgtgggcaaccgtaccgaggttggcaaccactcttccaagagttccacggttgtgcaagagtccagcaaaggaacaccaagatcctatctggctagtagcccaaaccccttttccagagcaaacgccgctgaaaccatttctgccgcccgagcactaccaagcgcatctcctacaagcatccggactggctatatgccgcgaaaggcgtccgtgggctctgcttcgaccagacacgtattcggctcgcggctacaacgcatcaaaacgacagtcaataccatcggcgccaccggaaagctgtcggccacccccccgccatcggccccccctccatcaggtagcggcactagtaagatcgacaaatacgcacgtattctgttcccggttacttttggggccttcaatatggtgtattgggtagtgtacctctctaaggatacaatggagaagtccgaatcactgatgtag

SEQ ID NO: 188832 - DNA, 1389 bp, synthetic construct
  misc_feature 1..1389: note = Description of Artificial Sequence: Synthetic coding sequence
  source 1..1389: mol_type = other DNA
atggacaacggcatgttcagcggcttcatcatgatcaagaacctgctgctcttttgtatctccatgaacctgtcaagccacttcggattctctcaaatgccaaccagcagcgtcaaggacgagacgaatgataacattacaattttcactcgaattctagatgggctgctagacgggtatgataacagattgagacctgggctcggagagcgtatcacgcaggtccgtacagatatctatgtgactagttttggccccgtgagtgacaccgagatggagtacactatagatgtgttcttccggcagagctggaaagacgagaggcttaggtttaagggccccatgcaaagactgcccttaaataacctgctcgcttcaaaaatttggacgcctgatacctttttccacaatgggaaaaagtccatcgcacacaatatgaccaccccgaacaaattgcttcggttggaggacgacgggactcttctgtacactatgcgactgaccatatctgccgaatgtcctatgcagttggaagatttcccaatggacgcccatgcgtgtcctctcaagttcggatcttatgcctaccccaacagtgaggtcgtctatgtgtggactaacggatccacgaagtctgttgtggtggccgaggacggatcacgtctgaaccagtaccacctgatggggcaaaccgtaggtactgaaaacatttcaacctccacgggggagtacaccattatgacggcccacttccatctcaagcgcaagatcgggtatttcgtgatacagacatacctcccgtgtattatgacagtcatcctgtcgcaagtatctttctggcttaacagagaatcagtaccggccagaaccgtattcggagtgacaacggttctgaccatgactaccctaagcatctctgccaggaactccttgccgaaagttgcctacgccactgcgatggactggttcattgcagtttgctatgcatttgttttctcggcacttatagagttcgctacagtcaattacttcactaagcgcgggtgggcttgggacgggaaaaaggctctcgaagccgccaaaataaaaaaaaaaagagaagtaatccttaacaaaagcaccaacgcttttactacgggaaaaatgagtcacccgcccaacatccctaaagagcagacacctgccggcaccagcaacaccacgtccgtatcagtcaagcctagcgaggagaagacctcggagagtaaaaagacctacaattctatttctaaaattgataagatgtcacgcatcgtgttcccggtcttgttcggcaccttcaacctcgtatactgggctacctatctgaatcgagagccggtgatcaagggggccgctagccccaaatag

SEQ ID NO: 188833 - DNA, 1389 bp, synthetic construct
  misc_feature 1..1389: note = Description of Artificial Sequence: Synthetic coding sequence
  source 1..1389: mol_type = other DNA
atggacaacggcatgttcagcggcttcatcatgatcaagaacctgctgctgttttgtataagtatgaatctgtcaagccactttggcttcagccagatgccaaccagtagtgtcaaagacgagaccaatgataacattaccatctttacccgcattttagatggactgttggacggttacgataaccgcctaaggccaggactaggggagcgtattacgcaggttagaactgacatttacgttaccagttttggccccgtgagcgacaccgagatggagtacacgatcgacgtgttcttcaggcagtcctggaaggacgaacggctacggttcaaaggtccaatgcagcgactgccattgaacaacctcttagcctccaagatctggactccggacacattttttcacaacgggaaaaaatctattgctcataacatgacgacccctaacaagcttctgagactggaagacgatgggacccttctctacaccatgagactgaccatcagcgctgaatgtccaatgcagctggaggattttcccatggacgcccacgcttgtccgctgaaatttggatcctatgcataccctaactcagaagtagtgtacgtctggactaacggctctaccaagtctgttgtggtcgctgaggatggctctagactgaatcagtatcatcttatgggacagacggtcggcaccgaaaatatatctacgtcaactggcgagtataccatcatgactgcccacttccacctgaagcgcaaaattggctatttcgtcattcagacataccttccctgcatcatgacggtgatcctcagccaggtgagtttttggctgaaccgcgagagcgttcccgcacggactgtctttggtgtgacaacagtattaacaatgaccactctctcaatttccgcgagaaactccctgccgaaggtggcctatgcgaccgccatggactggttcattgccgtttgctacgccttcgtgttttccgctcttatcgagtttgcgactgtgaactacttcacaaaacgcggatgggcctgggacggaaagaaagcgttagaagctgccaaaataaaaaagaagcgggaagtcatactgaataaatctacgaatgcctttactacgggcaagatgagccatcccccgaacataccaaaggaacagactcctgctggtacctccaacacgactagtgtttctgtgaagcctagcgaggaaaagaccagcgaatccaagaagacatacaacagcatctcaaaaatcgacaagatgagcaggatcgtcttcccggtgctcttcgggacattcaacttggtgtactgggctacctatctgaatagagagccagtaataaagggcgctgcctctccaaaatag

SEQ ID NO: 188834 - DNA, 1389 bp, synthetic construct
  misc_feature 1..1389: note = Description of Artificial Sequence: Synthetic coding sequence
  source 1..1389: mol_type = other DNA
atggacaacggcatgttcagcggcttcatcatgatcaagaacctgctccttttctgtatctcgatgaatttgagttcccacttcggcttttcacagatgccaaccagtagcgtgaaggatgaaaccaacgacaatatcaccatctttacaaggatcttggacggcctgctcgatggatatgataaccggcttagaccgggattgggagaacggatcacccaggtcaggactgacatctacgtgaccagttttggacccgtgtccgatacagagatggagtacactatcgacgtatttttccgtcaatcgtggaaggacgagcgcctgcggtttaaggggcctatgcagcgcctgccccttaacaacctgttggctagcaaaatctggaccccggacactttcttccacaatgggaagaaaagtatcgctcataatatgactacacctaacaagttacttcgcttagaggacgatggtactctactttacaccatgaggttgacaatttctgcggagtgccctatgcaactggaagacttcccgatggatgcgcacgcatgtcctctgaagttcggcagttacgcctacccaaactccgaggtagtatacgtgtggacgaacggatccaccaaatccgtggtcgtggcggaggacggctcccggctcaatcagtatcacctgatgggacaaacagtgggaaccgagaatattagcacatccacaggcgaatacacgattatgaccgctcacttccacctgaagaggaagattgggtatttcgtcatccaaacttatcttccttgcattatgaccgtgatcctgtcccaagtgtcgttttggttgaatagggaaagtgttcccgcccgcacagtgttcggtgtgacaacagtcttaaccatgactactctgtcaatatcggcaagaaattccctgcctaaggttgcttacgcaacggcgatggattggttcatcgccgtctgttatgcattcgtgttcagcgcactgatcgagttcgctacggtaaactatttcaccaagagaggctgggcttgggatggaaagaaagcgctagaggcggcaaaaatcaaaaaaaagcgggaggtgatccttaataagagcactaacgcgttcaccaccggcaagatgagtcacccacccaacatccctaaggagcagacacccgccgggacctctaacactacctcagtctccgtcaagcccagcgaagagaaaacttctgaatccaaaaagacctataatagcatatccaagatcgataagatgagtcggattgtctttcctgtgctttttggcactttcaacctggtttactgggctacatatcttaaccgtgaacccgtgattaaaggggctgcatcgccgaagtag

SEQ ID NO: 188835 - DNA, 261 bp, synthetic construct
  misc_feature 1..261: note = Description of Artificial Sequence: Synthetic coding sequence
  source 1..261: mol_type = other DNA
atggacaacggcatgttcagcggcttcatcatgatcaagaacctgctcctgttctgcatttcaatgaacctcagcagtcatttcggattctcccagatgcctactagttccgtcaaggatgaaaccaacgataacatcactattttcacgaggatacttgacgggttgctggatggctatgacaaccggttgcggcccggactgggcgagagaatcacacaggtcagaactgatatttatgtgacatcttttggtccctag

SEQ ID NO: 188836 - DNA, 450 bp, synthetic construct
  misc_feature 1..450: note = Description of Artificial Sequence: Synthetic coding sequence
  source 1..450: mol_type = other DNA
atggacaacggcatgttcagcggcttcatcatgatcaagaacctgctcctgttttgtatatctatgaatctgtcgtctcacttcggatttagccaaatgccgactagctcagtaaaggatgagactaatgacaatattaccatctttaccagaatcctggacggactgctagatgggtatgacaacaggctgcgtccaggccttggagagcgcataacacaggtgcggacggatatctacgttacctcctttggcccagtgtctgacacagaaatggaatacaccatcgacgtgttttttagacagtcgtggaaggatgagcgactacggtttaagggccccatgcagcgactacctctgaacaatctcctcgcttctaaaatctggactcccgacacttttttccacaacggcaaaaagtcaattgctcacaacatgacgactccttag

SEQ ID NO: 188837 - DNA, 501 bp, synthetic construct
  misc_feature 1..501: note = Description of Artificial Sequence: Synthetic coding sequence
  source 1..501: mol_type = other DNA
atggacaacggcatgttcagcggcttcatcatgatcaagaacctgttgctgttttgtatctccatgaatctttcctctcatttcggcttttctcagatgccgactagctccgtcaaagacgagaccaacgacaatatcaccatttttacccggatcctcgatggcttgttggacggatacgacaataggcttcgacctggtttgggcgagcgtattacacaggtgaggaccgacatctatgtaaccagctttggcccagtgtccgacactgaaatggaatatacaatagacgtgttctttcggcaatcctggaaagacgagcggctgaggttcaaagggccaatgcagaggctacccttaaataacctgctggcctccaaaatatggactcccgataccttctttcacaatggaaagaagtctatagcccacaatatgactacaccaaacaagcttcttaggctggaggacgacggcacgcttttgtacaccatgaggtag

SEQ ID NO: 188838 - DNA, 51 bp, synthetic construct; identical to SEQ ID NO: 82644
  misc_feature 1..51: note = Description of Artificial Sequence: Synthetic coding sequence
  source 1..51: mol_type = other DNA

SEQ ID NO: 188839 - DNA, 1362 bp, synthetic construct
  misc_feature 1..1362: note = Description of Artificial Sequence: Synthetic coding sequence
  source 1..1362: mol_type = other DNA
atggccagcagcctgccctggctgtgcatcatcctgtggctggagaacgccctcggcaaactggaggttgagggaaatttctactcagagaatgtatctcggattttagacaatctcttggaagggtacgacaataggcttagaccaggcttcgggggcgctgtgacagaagtgaagaccgacatctatgtaacttctttcggccccgtctcggatgtggaaatggagtacaccatggacgtgttctttcggcaaacctggaccgacgagcgcctcaagttcggaggtcctacagagatcttgtccctgaataatctgatggtgtctaaaatatggacccccgacacatttttcaggaatggtaagaagtcgatagcccataacatgacaacacctaacaaactcttccgaatcatgcagaatggaaccatcttgtatacgatgcgcctgaccattaacgctgattgccccatgagactggtgaatttccctatggatgggcacgcttgccccctcaagttcggctcttacgcataccctaaaagcgagataatctatacgtggaagaagggcccactctattccgttgaagtgcctgaggaatctagctctctgctgcagtatgacctcatcgggcagaccgtgtcgtctgaaactatcaagtcaaacacaggcgagtatgttatcatgacagtgtattttcacctacagagaaaaatggggtacttcatgatacagatttacacaccctgcatcatgacagtcattctgtcgcaggtgtccttctggattaacaaggaatccgtgcccgccagaactgtcttcgggataactaccgtgttgactatgactactctttcaattagcgcccgccactccctccctaaggtgagctatgctacagcaatggattggtttatcgccgtttgtttcgcctttgtcttttcagccctgatagagtttgctgccgtgaattacttcactaaccttcagactcaaaaagccaaacggaaggctcaatttgctgccccccccactgtgactatttccaaggctacagagcctctggaggcggaaatcgttcttcacccagacagcaagtaccatctaaagaaaagaataacctccctgagtttgcctattgtgtcctcatcagaagcaaacaaagtgctgacacgtgccccaattctacaatctacacccgtgacacccccccccttaagcccggcattcggcggcacttccaagattgaccagtatagccgtatattgttcccagtcgcattcgccggctttaatctggtgtattgggtggtctatcttagcaaagatacaatggaagtgtcatccagtgtcgagtag

SEQ ID NO: 188840 - DNA, 1332 bp, synthetic construct
  misc_feature 1..1332: note = Description of Artificial Sequence: Synthetic coding sequence
  source 1..1332: mol_type = other DNA
atggccagcagcctgccctggctgtgcatcatcctgtggctggagaacgcgctgggcaagctggaagtggaagggaacttctattccgaaaacgtttccaggatcctcgacaacctcctcgaggggtatgataataggttaagacctggttttggaggagccgtaacggaagtcaaaacagacatttatgtaacttcttttgggcccgtgagtgacgttgagatgacgtggaccgatgagcgcctaaaattcggtggtcctacagaaattctgtcactgaataacttaatggtgagcaagatttggacgccagacacattttttagaaacggaaagaagagcatcgcacacaacatgacaacccctaacaagcttttcagaataatgcagaacggtacgatattgtacacaatgagactgacaattaatgccgactgccctatgcgcttagtcaacttcccgatggacggacacgcctgcccacttaagtttggctcctacgcgtacccaaaaagcgaaattatatacacctggaaaaaggggcccctttactcagtggaggtgccagaggaaagtagcagcctgctgcagtacgatctgatcggccagaccgtgtccagcgagactataaagagcaacaccggggaatacgtcatcatgactgtgtatttccatcttcaacgcaagatgggctattttatgatacagatttatactccctgtataatgactgtcattttaagccaagtatctttttggatcaataaagagtcggtgccggcgcgtacagtatttggaattaccaccgtactcacgatgactaccctgtccatttccgccaggcactctctgcccaaagtgtcgtacgcaaccgcaatggattggtttatcgcggtctgtttcgcttttgttttttccgctctgatcgagtttgctgccgtcaattatttcaccaacctgcagacccagaaggctaaaaggaaagcccaatttgctgcccctcccaccgttactatctcaaaggccaccgaacccctggaggctgaaattgttctccacccggacagtaagtatcatcttaaaaagcgcatcacatccctatctctgcccattgtttcttcttccgaagctaacaaggttttaacccgagcccccatcctgcaatcaacccccgtcacacctccacctctgagcccagcgttcgggggcacatccaagatcgatcaatattccagaattctgtttcccgtagcgttcgctggttttaatctggtgtattgggtggtgtatttgtccaaggacactatggaagtgagttctagcgttgagtag

SEQ ID NO: 188841 - DNA, 1425 bp, synthetic construct
  misc_feature 1..1425: note = Description of Artificial Sequence: Synthetic coding sequence
  source 1..1425: mol_type = other DNA
atgtggaccgtgcagaaccgggagagcctgggcctgctgagcttccctgtgatgatcacaatggtttgttgtgcccatagtactaacgagccttcaaatatgtcttacgtgaaagaaaccgtcgatagactgctaaaaggctatgacattcgtctccggcctgacttcggaggacctccagttgacgtgggaatgaggatagacgtagcatccatcgacatggtttcagaagtgaatatggactatactctaaccatgtactttcagcagtcttggaaggacaagcgactcagttattctgggatccccttgaatcttaccctcgacaatcgggtggccgatcagctgtgggtgcccgatacctattttttaaacgataagaaaagctttgttcacggcgtgaccgtcaaaaatcgcatgataaggcttcatccagacgggactgtgttgtatggattgagaatcacaacaaccgcggcatgcatgatggatctaagacgatatccactggatgagcagaactgcaccctggagatcgaatcatatggctatactaccgacgatatcgagttctattggaacggcggggaaggagctgttacgggcgtcaacaagattgaacttcctcagttttccatcgtggactataaaatggtgtctaagaaagtggagttcaccacaggcgcatacccgaggctcagtctgagcttccgactgaagaggaatatcggctacttcatcctgcagacttatatgcccagcacccttataaccatactatcttgggtttctttttggatcaattatgacgcgtctgcggcgcgcgtagctctcggaattaccaccgtgctcaccatgacaactataagtacccacctgcgggagacgctgcctaagattccttatgtgaaagctatagacatctatttaatgggatgttttgtcttcgtattccttgcactcctggagtacgcattcgtgaattatatctttttcggcaaggggccacagaagaaaggagcatccaaacaggatcagtcagcaaacgaaaaaaataagttggagatgaacaaggtgcaggtggacgctcatggcaacatcctcctgagcacactcgagatccggaacgagacctcaggatctgaagtgctgactagcgtaagtgatcctaaggccacaatgtacagctatgattccgcctctatccagtacaggaagcctctgtctagccgggaggcatacgggcgggccctcgatcgccacggcgttccaagtaagggaagaatcaggcggagagcgagtcaattaaaggtgaaaatccctgaccttaccgacgttaactccatcgacaagtggtccagaatgttcttcccgatcacatttagtctgttcaacgtggtgtactggctgtactacgtgcactag

SEQ ID NO: 188842 - DNA, 1215 bp, synthetic construct
  misc_feature 1..1215: note = Description of Artificial Sequence: Synthetic coding sequence
  source 1..1215: mol_type = other DNA
atgaccttcgcctgcggccggaccagcgaggactacaccctgaccatgtactttcagcagtcttggaaagacaaaaggctgtcctacagcggcatccctctcaatttgaccctcgataacagagtggcagatcagctgtgggttcccgatacgtacttcctcaatgacaaaaaatctttcgtacatggggtcacggtgaagaataggatgatacgactgcatcccgacggtactgtcctctacggccttagaattacaaccacagccgcctgcatgatggatttgagacggtacccactcgacgaacagaactgtacattggagattgaatcatatggctatactactgatgatattgagttttattggaacggcggtgagggcgctgtcaccggcgtcaacaaaatcgagctgcctcagttttctattgttgattataagatggtgtccaagaaggtagaattcacaacgggagcttacccacgcctttccctgagttttagactgaagagaaatattggatactttattctccagacctacatgccaagtactttgattacgatcttatcctgggtgtctttttggatcaattatgacgcttctgccgcaagggttgcactgggaattactaccgtgcttacaatgacgaccatatcgacacacttgcgggagaccctccccaaaataccctatgtgaaggccatagacatatatttgatgggctgttttgtcttcgtgttcctcgcactcctggagtatgcattcgttaactatattttttttggaaaaggccctcaaaaaaagggtgcttccaagcaggaccagagcgcaaatgaaaagaataagttagagatgaacaaggtgcaggtggatgcccacggaaacattcttcttagcaccctggaaatccgaaacgaaacaagtggaagcgaagtcttgacatcggtaagtgatccgaaagctaccatgtacagctacgatagcgcttccatccagtacaggaaaccactgagttctcgagaagcctacggtagggcccttgacagacatggcgtgccctcgaaggggaggatccgacggcgcgcctcacagctgaaggtcaagatcccagatctcacagatgtgaattccatcgacaagtggtcccgcatgttcttccccatcaccttctctcttttcaatgtcgtctattggctgtactatgttcactag

SEQ ID NO: 188843 - DNA, 1539 bp, synthetic construct
  misc_feature 1..1539: note = Description of Artificial Sequence: Synthetic coding sequence
  source 1..1539: mol_type = other DNA
atgtggcgggtgcggaagcggggctacttcggcatctggagcttccccctgatcatcgccgccgtctgcgcacagagcgtgaatgacccttctaacatgagcctggtaaaagaaacggtggataggcttctcaaaggctatgacattagactccgcccagacttcggtgggccacccgttgctgttggaatgaatatagacatcgcatctatcgacatggtaagcgaggtaaatatggattacacactaacaatgtattttcagcaggcatggcgggacaagcggctctcctataatgttatccctctgaatctaacccttgacaatcgggtggccgaccaactgtgggttccagatacatattttctaaatgacaaaaaatcttttgtgcacggggtcaccgtgaaaaacaggatgattaggctgcacccagatgggaccgtactgtacgggttgaggatcacaactaccgccgcctgcatgatggatctgcgccggtatcccctggacgagcaaaattgcaccctggagattgaaagctacggatataccaccgatgacatcgaattctattggaggggggacgacaatgctgtgactggggtgacaaaaattgaacttccccagttcagcatagtggactacaagctgatcacgaaaaaagtggtattcagtacaggctcttatcctcggctcagcctgtctttcaagttgaagcgcaacatcgggtacttcattctgcagacctatatgccctccatcctcatcaccatcctctcttgggtcagcttctggattaattatgatgcgagtgctgccagagtcgccctggggataaccacagtgctcacaatgaccactattaacacacatttacgtgagactctacctaagatcccgtacgtaaaggcaatcgatatgtacttgatgggatgcttcgtgttcgttttcatggcattgctagagtatgccttggtgaactacatattcttcggtaggggtccacaacgtcagaagaaggcagccgagaaagcagcctccgccaataacgaaaagatgcgattggacgtcaataagattttctacaaggacatcaagcagaatgggacacagtatcgttctctttgggaccccaccggaaacctgtcacctacgaggagaacgacaaactatgacttttctttgtacactatggatccacacgagaacatcttgctgtccaccttggaaattaaaaacgagatggctacctctgaggctgtgatgggcttaggcgatccaagatctaccatgttggcttacgatgcttcctccattcagtacagaaaggcaggtctgccccgccattcctttggacggaacgctttggagaggcacgtggctcaaaagaagagccgtttgcggcgcagggcctcacagctaaagatcacaattccggacctgaccgacgtgaacgctatcgacagatggtctaggattttcttccctgtggtgttctccttcttcaatattgtgtactggctgtattacgtcaactag

SEQ ID NO: 188844 - DNA, 1425 bp, synthetic construct
  misc_feature 1..1425: note = Description of Artificial Sequence: Synthetic coding sequence
  source 1..1425: mol_type = other DNA
atgtggcgggtgcggaagcggggctacttcggcatctggagcttcccactgatcatcgcggcagtctgcgctcagagcgtcaacgacccgtcaaatatgagtctggtcaaggaaaccgtagatagacttctgaaaggctacgatatccgacttcgcccagatttcggcggcccaccagttgccgtggggatgaacattgatattgcttctattgacatggtaagcgaggtcaatatggattatacccttaccatgtattttcagcaggcatggcgcgacaagcggttgtcctacaacgtgataccactgaatttgacgctggacaacagagtggctgaccagttgtgggtcccagacacttacttcttgaacgataaaaaaagtttcgtccatggcgtaactgttaagaaccgcatgataagactccatccagacgggaccgtcctgtacgggcttcggattaccacaaccgctgcttgtatgatggatctccggcggtacccactcgacgagcaaaattgtaccctggagatcgaatcttatggatacaccacagacgatattgaattctattggaggggagatgacaatgccgttactggagttaccaaaatcgagctgccccagttcagcatcgtggactacaagcttatcaccaagaaggtcgtgttcagcaccggatcatacccccgtctgtcgctgagtttcaagctgaaaaggaatattggctattttatcctccagacatatatgccaagtattcttatcaccattttatcttgggtatctttttggatcaattacgacgccagcgccgctagagtggccctcgggataactacagttctgacaatgaccacaattaatacccatctccgggagactcttcctaagattccttatgtaaaggcgatagacatgtacctcatgggctgcttcgtattcgtcttcatggcgctcctggagtacgcacttgtgaattatatatttttcgggaggggtccacaacgacaaaaaaaagcggccgagaaggctgcctcagcaaacaatgaaaaaatgagactggatgtgaacaagatggacccccacgagaacatacttctgtccaccctcgagatcaagaatgagatggccacatcggaggcggtcatgggcctgggcgatcctcggtcaactatgctcgcctatgatgctagttccatccagtacaggaaggccggccttcctagacattctttcgggagaaacgcgttggaaaggcacgttgcccaaaagaaatcaaggctccggaggagagcttcccagctcaagatcaccattcctgacctgaccgacgtgaatgctattgatagatggagtcgaatcttctttcccgttgtgttctctttttttaatatcgtttattggctgtattacgtcaactag

SEQ ID NO: 188845 - DNA, 1539 bp, synthetic construct
  misc_feature 1..1539: note = Description of Artificial Sequence: Synthetic coding sequence
  source 1..1539: mol_type = other DNA
atgtggcgggtgcggaagcggggctacttcggcatctggagcttccccttgatcattgctgccgtgtgtgcccagtctgtcaatgatccaagcaatatgagccttgtcaaggagactgtggacaggctcctgaaagggtatgacatcagattgcggcccgatttcggtggacccccggtggccgtaggtatgaatattgacatcgccagcatcgatatggtttccgaggttaacatggattacaccttgaccatgtactttcagcaagcttggagagataagcggctgagctacaacgtgattccactgaatctgacactggataaccgcgtagcagatcagctgtgggtgcccgatacttacttcctgaatgacaaaaaaagtttcgtgcatggagttaccgtgaaaaaccgaatgatcaggttgcaccctgatgggacagtcctgtacggtctaagaattactaccacggccgcgtgcatgatggacttgcggcggtacccccttgatgaacagaattgcaccctcgaaatcgaaagctacggctacacgaccgatgacattgagttctactggcgaggagatgataacgcggttacaggtgtaaccaaaattgagctgccccagttctcgatcgtggattataagctgattactaagaaggtcgtgttttctacgggatcctatccacgattgagcttatcctttaaactcaagcgaaatatagggtatttcattttgcagacatacatgccatcaattctgatcaccatactctcatgggtgtccttctggattaattatgacgccagcgccgcccgtgtcgccctcgggattacaacagtgttgactatgacgaccataaacactcacctccgtgaaactttaccaaaaatcccgtatgtgaaagcgatcgatatgtacctcatgggttgttttgtgtttgtgttcatggctttactagaatacgcactagtcaactacatcttcttcggtcgcgggccacagcggcagaaaaaggccgccgagaaggctgccagtgctaataatgagaagatgaggttggacgtgaacaaaatcttttataaggacatcaagcaaaatgggactcaatatcggagtctctgggacccaaccggcaacttgtcccctacacgcagaactacgaactacgacttttctctgtataccatggacccgcatgaaaacattttactgtcaacattagagattaaaaacgagatggcgacctctgaggccgttatggggctgggtgacccacggtcaaccatgttggcgtacgacgcatcaagcattcagtataggaaggctggtttacctaggcatagttttggtcgtaatgcgctcgagcgtcatgtagcccagaagaaaagccgcctcaggaggcgggcatcccagctgaaaatcacaattcccgacctgacagacgtgaacgcaatcgataggtggagccgtattttctttcctgttgtcttctctttcttcaacatcgtgtattggctgtattatgtcaattag

SEQ ID NO: 188846 - DNA, 945 bp, synthetic construct
  misc_feature 1..945: note = Description of Artificial Sequence: Synthetic coding sequence
  source 1..945: mol_type = other DNA
atgatggacctgcggcggtaccccctggacgagcagaactgcaccctagagatagaaagttacggatataccacagatgacattgagttttactggcgaggggacgacaatgcggtcaccggcgtgacaaaaatcgagctgcctcaattcagtattgtcgactacaaacttattacgaagaaagtggtattttctacaggttcttaccccagattgtctctcagttttaagctgaagagaaacattgggtattttattctccagacctacatgccctcaattctcatcacgatattaagttgggtttccttctggatcaattatgatgctagcgccgccagggtagccctcggcattacaacggtcctgacaatgacgactatcaatacacacctcagggagactctgcccaagattccttacgttaaggctatcgatatgtatctgatgggttgttttgtgttcgttttcatggccctgctcgagtacgctcttgtgaactatatattttttggccgcggccctcagaggcagaagaaggctgccgagaaagccgcatctgcaaacaatgagaagatgcgccttgatgttaacaagatggaccctcacgaaaatatcctcctgagcactcttgagatcaaaaacgagatggcaacgagtgaagcagtgatggggctgggggacccaaggtctacaatgctggcatatgacgcttcttccatccaatataggaaggccgggcttccccggcatagctttggccgcaatgcactcgagagacacgtggcccagaagaaatcaagactacgcagaagagcttctcaactgaaaatcaccattcccgatcttaccgacgtgaacgctatcgatcgctggtctagaatcttctttccagtggtgttcagtttctttaacatcgtatactggttgtattatgtgaactag

SEQ ID NO: 188847 - DNA, 1236 bp, synthetic construct
  misc_feature 1..1236: note = Description of Artificial Sequence: Synthetic coding sequence
  source 1..1236: mol_type = other DNA
atgaacatcgacatcgccagcatcgacatggtgagcgaggtgaacatggactataccctgacaatgtactttcagcaggcatggcgcgacaaaagactgtcctacaatgtgattcctcttaatcttactctggacaatagagtagctgatcagctttgggtccctgatacgtacttcttgaatgacaagaaatcatttgttcacggcgttacagtgaagaacagaatgatcagactgcaccctgacgggacagtgctgtacggtcttagaattaccacgactgccgcctgtatgatggatttgaggcgctatcccctggatgagcagaattgtacgcttgagattgaatcatacggctacactacagatgacatcgaattctactggcggggagacgataatgcagtgacaggcgtcactaagattgaactgccacaattttctatagtcgactacaagttaattaccaagaaggtcgtgttctcaaccggttcttacccaaggttgtctctttccttcaaattgaaaagaaacataggctacttcattctccagacgtatatgccctccattttgatcaccattctcagctgggtatctttttggattaattatgatgccagtgcagcccgcgttgccctcggcatcaccacagtgttaacgatgaccactatcaacacacacttacgtgagactttgccaaagattccctatgttaaggccatagacatgtacctgatgggctgtttcgtgtttgtgtttatggccctgctggaatatgctctagttaattatattttcttcggccggggacctcagagacagaagaaagccgccgagaaagctgcctctgctaataacgagaaaatgcgcctggacgtgaataagatggaccctcacgagaacatcctgcttagcaccctggagattaaaaatgagatggccacaagcgaggcagttatgggtcttggcgaccctcggagcactatgctcgcatacgatgcgtcaagcattcaataccgcaaagccggcttgccacgacactcttttggtcggaatgctttagagcgccacgtagcacagaagaagtctaggctccgtcgaagagcgtcacaactgaaaatcactatcccagaccttaccgacgtgaacgccatcgatcggtggtcacgaatcttttttccggttgtgttcagtttttttaacatagtgtattggttgtattacgtaaattag

SEQ ID NO: 188848 - DNA, 1425 bp, synthetic construct
  misc_feature 1..1425: note = Description of Artificial Sequence: Synthetic coding sequence
  source 1..1425: mol_type = other DNA
atgtggcgggtgcggaagcggggctacttcggcatctggagcttcccactaatcattgccgcggtttgtgctcagtccgtgaacgaccccagcaatatgagcctcgtgaaggaaacagttgacaggctcctgaaaggctatgatatccggctgcgaccagactttggggggccacctgtggcagtgggcatgaatatcgatatagccagcatcgatatggtttccgaagtgaacatggattacacactgactatgtatttccagcaggcctggcgggacaagaggctgtcatacaatgtcatacctctgaacttaacgctcgataacagggttgccgaccaactttgggtgcccgacacatactttctcaacgacaagaagagctttgtgcatggcgttactgtgaagaatcggatgattcggctgcaccctgacggaactgttctttacgggctgaggatcactaccactgctgcctgcatgatggatttgcgccgatatccactggacgagcagaactgcacactggagatagagtcatatgggtacactaccgacgatatcgaattttactggagaggtgatgataacgctgtaaccggggtcactaaaattgaacttccccagttttccatcgtcgattacaagctcattactaaaaaagtggtctttagcactgggtcttatccacgcctttcactcagcttcaaacttaaacgcaatatcggttacttcattctgcagacatacatgcctagcatcttaataaccattctgagttgggtgtccttttggataaactatgacgcgagcgctgcccgtgtggcactgggaatcaccacagttcttaccatgaccaccatcaatacgcacctgcgggaaacacttccaaaaatcccttatgtcaaagccatagacatgtatcttatgggttgtttcgtgtttgtgttcatggcactgctggaatacgccttggtcaattacattttctttggacggggtccgcagaggcaaaaaaaggcagccgagaaggcagccagcgcaaataacgagaaaatgagactcgacgtgaacaagatggatccccatgagaacatcctgctgagcaccctggagatcaagaatgagatggccacttccgaggcagtgatgggactcggagatcctcggtctactatgctcgcttatgacgctagctctatccagtacagaaaggccggcctaccccgccactctttcggaagaaacgctctagagcggcatgtggctcagaagaagtcacggctgcgtcgcagagcctcgcagctgaaaattacaatccctgatttgacagatgttaatgccattgacaggtggtcaaggatattctttcctgtcgtgttttcgttctttaacatagtgtattggctctattatgtgaactag

SEQ ID NO: 188849 - DNA, 1422 bp, synthetic construct
  misc_feature 1..1422: note = Description of Artificial Sequence: Synthetic coding sequence
  source 1..1422: mol_type = other DNA
atgtgcagcggcctgctggagctgctgctgcccatctggctgagctggactttgggcaccagaggcagcgaaccccggtccgtgaacgatccaggaaacatgtcattcgtcaaagagacagtggataagctgctgaagggctacgatatcagactgcgccccgatttcggaggcccccccgtctgcgttggcatgaatatcgatatcgcgagcattgatatggtgagcgaggtgaatatggattatacactcacgatgtacttccagcaatattggcgggacaagaggctcgcgtacagcggaatacctctgaatctcaccttggataacagggtcgctgaccagctgtgggtccctgatacctactttttgaacgataaaaaaagcttcgttcatggggtgactgttaaaaaccggatgatccgcctgcaccctgacgggacggttctttacggtcttcgtataactactacagcagcatgcatgatggacttgcggcgttaccctcttgatgaacagaactgtactctggagatcgagagctacgggtacaccaccgacgatattgaattctattggagaggcggggacaaggcggtgacaggtgtggagcggatcgaattgccccagttcagtatagtggagcacagactggtgtcacgtaacgttgtgttcgctaccggcgcttatcctaggttgagcctctccttcaggttgaaaaggaatataggatatttcatcctacaaacttatatgccgtcaattctgattacgatcttgtcatgggtatctttctggatcaattatgatgcaagtgcggcccgcgtcgccctgggtataacgactgtcctcaccatgaccaccataaacactcacctgcgagagacactcccaaagatcccctatgtcaaggcaatcgacatgtatcttatggggtgtttcgtatttgtgttccttgccctcctggagtatgcctttgtgaattatattttctttggaagaggaccccagcggcagaagaaactggccgagaagacggccaaggccaaaaacgacaggtcgaagtccgaaagcaacagagttgatgcccatggtaatattctgctcacgagcctggaagtgcacaatgaaatgaacgaggtgagcggaggcatcggggatacacggaattcagccatttcctttgacaacagtggaatccagtaccggaagcagtccatgccgcgtgagggccatgggcgctttcttggagatagaagtttacctcataagaaaacccatttgcgcaggagatcttcacagcttaagatcaagatccctgatctgaccgacgtgaatgcaatcgaccgatggagcagaattgtgttccctttcacattctcacttttcaacctggtgtattggctatactacgtgaactag

SEQ ID NO: 188850 - DNA, 1422 bp, synthetic construct
  misc_feature 1..1422: note = Description of Artificial Sequence: Synthetic coding sequence
  source 1..1422: mol_type = other DNA
atgtggggcctggccggcggccggctgttcggcatcttcagcgcccccgtactggtcgcagtggtgtgctgcgcacagagtgtgaacgacccaggaaacatgagctttgttaaagagacagtagacaaactcctgaaaggctacgacattcggctcaggcccgactttggtggcccaccagtttgcgttgggatgaacatcgacatagccagcatcgacatggtcagtgaagttaatatggactacacattgacaatgtatttccagcagtactggagggataagagattagcctactccggaattccactgaacttgaccttggacaaccgtgtggctgaccagctgtgggtgccagacacctattttctcaacgacaaaaaatctttcgttcacggagtcaccgtaaaaaaccggatgattcggttgcatccagacggcactgtgctgtacgggttgagaatcaccacaacagccgcgtgtatgatggatcttcgtaggtacccactggatgaacagaattgtacgctcgaaattgaatcttacgggtatacaactgacgacatcgagttctattggcggggtggagataaggccgtgacgggcgttgaaagaattgagcttccccagttctccatcgtggaacaccgcctggtgtcccgaaacgttgttttcgcaactggagcgtatccaagactgagcctgagctttcgcttgaaaaggaacatagggtatttcatcctgcagacttacatgcctagcattttaatcacgatcctgtcttgggtttcattttggattaactacgatgcatctgccgctcgcgtcgctcttggaatcacaaccgtactgaccatgactactattaatacacatctgcgcgagaccctgcctaaaataccatatgtgaaggccattgacatgtacttgatgggctgtttcgtcttcgtgtttctagctttattggagtacgccttcgtcaactacatttttttcggccggggaccccagcgtcagaaaaagctggcagagaaaaccgctaaggctaagaatgatcggtccaaatcggagtctaaccgggtggacgctcatggcaatatcctcctgacctccctggaggttcacaacgaaatgaacgaggtctccgggggcatcggcgatactagaaactcagcgataagctttgacaactcagggatccaataccggaaacaatccatgccccgcgagggtcacgggcgattccttggtgacaggagcctgccccataagaaaactcacttgcggcgacggagctctcagttgaagatcaaaatcccagacctcactgacgtaaacgcgattgatcggtggtcacgtatagtattcccttttactttttcgctgtttaatttggtgtactggctgtactacgtgaactag

SEQ ID NO: 188851 - DNA, 1209 bp, synthetic construct
  misc_feature 1..1209: note = Description of Artificial Sequence: Synthetic coding sequence
  source 1..1209: mol_type = other DNA
atgtgggccacctaccagaccgaggaggactacaccctgaccatgtacttccagcagtactggagggacaaacgacttgcttacagtggcatccctttaaacctcaccctcgacaatagggtggccgaccaactgtgggttccagacacttatttcttgaatgacaagaagagttttgtgcatggtgtcacagtgaaaaatcgcatgatacgcctccaccccgacggcaccgtattatacggacttcgaatcaccaccacagctgcctgcatgatggacctgcgaaggtacccacttgacgagcaaaactgcaccctagagattgagtcctatggctacactaccgacgatatcgagttttactggcgtggaggtgataaagctgttaccggagtggagcggatcgaactacctcagttttcaattgtcgaacatagactggtgagtcgcaacgtcgtgttcgcaaccggcgcgtatcctcggctgtctctctctttcaggctgaaacggaacatcggctacttcattctccagacttacatgccaagcatccttattactatactcagttgggtgagtttctggatcaactacgatgccagcgcagctcgggtcgctctagggattaccacggtcctcacgatgaccactataaacacgcacctgagagagaccctaccaaagattccctatgtcaaggccatcgatatgtacctgatgggctgtttcgtgtttgtgtttttagcactcctggagtacgccttcgtgaactatatattttttggccgaggaccacagaggcagaaaaaacttgccgagaaaacagcgaaagcaaagaatgaccggtctaagtctgagtccaatagagttgacgctcacggtaacatcctgcttacctctcttgaagtccataatgagatgaacgaggtatccggggggataggtgacacacggaactccgccatatctttcgacaattcgggaatacagtaccgcaaacagagtatgccccgcgaggggcacggaagatttctgggggatagatcacttccacacaagaagacgcatctgcgacggcgtagctctcagctgaaaattaagattcccgatcttaccgacgtcaatgccattgacaggtggagtcggatagttttcccgtttacattctctttattcaatcttgtgtattggctctattatgtcaactag

SEQ ID NO: 188852 - DNA, 1167 bp, synthetic construct
  misc_feature 1..1167: note = Description of Artificial Sequence: Synthetic coding sequence
  source 1..1167: mol_type = other DNA
atgtacttccagcagtactggcgggacaagcggctggcctacagcggaattcccctaaacctgacgttagacaatagggtggccgatcagctctgggtacctgacacctactttttgaatgacaagaaaagctttgtccatggcgtcacagtaaaaaaccggatgatacgtctacatccagacggcaccgttctctatggcctacgtatcaccactacggccgcatgtatgatggacctccggaggtatccgctcgacgagcaaaattgtaccctcgagattgaatcttacggatacaccacagacgatattgaattctactggcgggggggcgacaaggccgtgactggagtggaacgcattgagctccctcagtttagtattgtggagcatcggctagtatcaaggaatgttgtgttcgcgaccggtgcttacccccggctgagcctcagtttccgactaaagcgaaacataggctacttcatcttgcagacgtacatgcctagcatactcatcacaattttgtcctgggtttcgttctggatcaactacgacgccagcgccgcccgcgtggctctcggcatcaccaccgtgcttactatgactaccattaatactcatcttagagagacactccctaaaatcccgtatgttaaggctatcgacatgtatctcatgggctgcttcgtgtttgtgtttctcgctctgttagaatatgcctttgttaactacatttttttcgggcggggaccgcagcggcaaaagaagttggcagagaagacagcgaaagcgaagaatgatcgctccaagagcgagagcaaccgggtggatgctcacgggaatatcctgctcacctccctggaggtccacaacgagatgaacgaagtctctggtgggatcggggatacgcgaaattctgctatcagctttgacaatagcgggattcaataccgcaaacagagcatgcctagggaaggccatggacggtttttaggcgacaggagtctcccacataagaagacccacctgaggagacgctcatcccaactgaagatcaaaatcccagatcttactgacgtcaatgccattgaccgttggagccgtatcgtgttccccttcacattttccctctttaacctagtgtactggttgtactatgtgaactag

SEQ ID NO: 188853 - DNA, 417 bp, synthetic construct
  misc_feature 1..417: note = Description of Artificial Sequence: Synthetic coding sequence
  source 1..417: mol_type = other DNA
atgtacttccagcagtactggcgggacaagcggctggcctacagcgggatccccctcaatctcacattggataaccgcgtcgccgatcagctgtgggtgcctgacacctactttctgaatgacaaaaaaagtttcgtgcacggcgtaactgtgaagaacaggatgatccggctgcacccggatggtaccgtcctctacggactccggatcactactacagccgcctgcatgatggacctgcggcggtatcccctggacgagcagaattgcaccctggagatcgagagctatgggtatacaacagacgatatcgagttctactggcgggggggggacaaagccgtcacgggtgtcgagagaatcgagctgccccaattcagtattgtggagcataggctcgtcagccgaaatgtatag

SEQ ID NO: 188854 - DNA, 1359 bp, synthetic construct
  misc_feature 1..1359: note = Description of Artificial Sequence: Synthetic coding sequence
  source 1..1359: mol_type = other DNA
atggacgcccccgcccggctgctggcccccctgctgctgctgtgcgcccagcagcttcgcggcacaagagcaatgaacgacattggagactacgtcggctctaacctcgagatctcgtggctcccgaatttggacggtctgattgccgggtatgccagaaactttagaccaggcattggtgggccacccgtgaacgtggctttggccctggaagtcgcatccatcgaccacatttcagaggccaatatggaatataccatgaccgtgtttctccatcagtcctggagggatagcaggctgtcttacaatcacactaacgagacactggggctagattcccgcttcgtagacaaactgtggttgccagatacctttatcgttaacgctaagagtgcctggttccacgatgttaccgtggaaaataaactcatcagactacaacccgacggagtgatcttatattcaatccggattacttcaacagttgcatgcgatatggacctggccaaatatccaatggatgagcaggagtgcatgcttgatttagagtcttatggatacagcagtgaagatatcgtgtactactggagcgagagccaggaacatattcatgggctggataagttacagttagcccagtttaccattacatcctacagatttaccacggaactgatgaacttcaaaagcgccggtcagttcccaaggttgtcgctacatttccatttaagaagaaatcgaggagtgtatatcattcagtcgtatatgcctagtgttttgctggtggctatgtcttgggtctctttttggataagccaggccgctgtgccagccagagtgtcactgggaatcaccaccgtgcttacaatgacaactcttatggtatctgcacggtcatcactgccccgagcctccgccattaaggcattagacgtgtacttctggatctgctatgtgtttgtcttcgctgccctggtagaatacgcattcgcacatttcaacgccgactacagaaagaagcaaaaagctaaggtgaaagtgagcaggcctagagccgaaatggatgtcaggaatgcgatcgtgctattctccttatccgccgcaggggttacccaggagctggccatttcacgaaggcagcgcagagtcccaggtaatctaatggggagctataggtctgttggtgtggagactggcgaaaccaaaaaagagggtgctgcccgctcaggaggccaaggcgggatccgggcacgattgagaccaatcgatgctgacacgattgacatatatgcccgcgctgttttcccagcggcatttgcggcagtcaatgtaatctactgggcagcctacgcaatgtag

SEQ ID NO: 188855 - DNA, 1521 bp, synthetic construct
  misc_feature 1..1521: note = Description of Artificial Sequence: Synthetic coding sequence
  source 1..1521: mol_type = other DNA
atgctgagcaaggtgctgcccgtgctgctgggcatcctgctgatcttgcagtctagagttgaaggcccgcagaccgagtcaaagaatgaagcatcgtcacgggacgtggtctatggccctcaaccacagcctctggaaaaccagctcctgtctgaggaaacgaagtcgactgaaaccgaaactggatccagagtgggaaagctgcctgaggcttctagaattctgaacaccatcttgagtaactatgatcacaagcttaggccaggaattggtgagaaaccaacagtggtgaccgtggaaatatccgttaattccctagggccactctctatcctggatatggagtacaccattgacatcattttctcacagacctggtacgatgagcgtttgtgttataatgatacctttgagagcctggtgcttaacggaaatgtcgtgtcccaactgtggattcctgacacctttttccgtaattctaaacggactcatgaacatgaaataactatgcctaaccagatggtcaggatctataaggacgggaaggtactctacacaataagaatgactatcgatgcagggtgctccctgcacatgcttagattcccaatggattctcattcctgtccgctttccttctcaagcttctcgtaccccgagaatgagatgatatataagtgggaaaattttaagttggaaataaacgaaaaaaacagctggaagctgtttcagttcgatttcacgggcgtttccaacaagacagagattattaccacgcccgtcggggatttcatggtaatgacaatcttcttcaatgtgtcccgcagatttggatatgtagctttccagaattacgtaccttctagtgtgactactatgctctcctgggtgtctttctggatcaaaaccgagagtgcccctgctcggacctccttaggtattacatcagttctcacgatgacgacattgggcaccttctctaggaagaacttcccgcgggtgtcttacattaccgcactcgatttctacatagctatttgtttcgttttttgcttttgcgcactgctagagtttgcagtgctgaattttctgatctacaaccaaacaaaggcccacgcttcccctaagttgagacaccctcgtattaattccagagcacatgcgcgtacacgcgccagatcccgtgcgtgtgccaggcagcaccaggaggcgttcgtgtgccagatcgttacaacagaaggcagcgacggggaagagcgtcctagctgctcggcgcagcaaccaccatctcccggaagccctgaggggcccagatctttatgctctaaactggcatgttgcgaatggtgtaaaaggttcaagaagtatttctgtatggtgcctgattgcgaaggttctacttggcagcaggggaggctgtgtatacacgtctaccgactcgacaactattcgcgcgtggttttcccagtcacgttctttttcttcaacgttctctactggctagtgtgcctgaatctgtag

SEQ ID NO: 188856 - DNA, 420 bp, synthetic construct
  misc_feature 1..420: note = Description of Artificial Sequence: Synthetic coding sequence
  source 1..420: mol_type = other DNA
atgcggagcccctgccccacccggtggagcgccagcacccggatggcacgatgttgcacccagttggtttcctacccggaaaatgagatgatttacaaatgggagaactttaagcttgaaattaatgagaagaattcttggaaacttttccaattcgattttacaggagttagcaataaaacagaaattattactacacctgtaggcgatctgaacgaagaaccgcgtgacttaccaagggtggctccacgggcaactcttgagaccttgttcactcatcccgatcaggtacagggatctgagggaactgctcttatcgtgagtaggatgtggatggaacccgtcacccaacccgcgatctgcagggaacggcacctcgtccttttacccttcaagatccctagacaagaagacttctag

SEQ ID NO: 188857 - DNA, 1398 bp, synthetic construct
  misc_feature 1..1398: note = Description of Artificial Sequence: Synthetic coding sequence
  source 1..1398: mol_type = other DNA
atgggccccctgaaggccttcctgttcagccccttcctgctgcggtcccaaagtagaggcgttcgcctggtgttccttttgctgacactccatctggggaactgtgttgacaaggcagatgatgaagacgacgaagatctgacagtcaataagacctgggttctcgctcctaagatccacgaaggcgacatcacacagatcttgaattccctactccaaggctacgacaataagctgcggcccgacattggtgtgcgaccgaccgttattgagacagatgtttatgttaactccattggccccgtagatcctatcaacatggaatataccatcgatattattttcgcccagacttggtttgatagccgactgaaattcaactccacgatgaaggtactcatgctgaactcaaacatggtgggtaagatttggatccccgataccttctttcgcaactccagaaagtcagacgcgcactggatcaccacaccaaaccgcctgctgcggatttggaacgacggcagagtactctatactctgaggctgacaatcaatgccgagtgctatttgcagctgcacaatttcccaatggacgagcactcctgtccgcttgagtttagcagctatggataccctaagaacgagatcgaatacaaatggaagaagcctagtgtggaagtggccgacccgaaatactggaggctatatcaattcgcgtttgtcggcctgaggaatagtacagagatcactcacaccatttccggggactacgtgatcatgacaatctttttcgatttgagcaggcgcatgggctacttcaccattcaaacctacatcccatgtatacttaccgttgtgttgtcttgggtgtctttttggattaataaggatgcagtcccggctagaactagtctcggcatcacgacagtgctcacaatgactacactgagcactattgcccggaaaagtttgcccaaggtgagttacgtgacggccatggatctcttcgtgagcgtttgcttcatcttcgtattcgccgcgctcatggagtatggcacattgcattacttcacatccaaccagaagggtaaaacagcgactaaagacagaaagctgaagaacaaggcctctatgaccccgggcttacaccccggctcgacactgatcccgatgaacaatatctctgtcccccaggaggatgattacgggtatcaatgtctggagggcaaagactgtgcttccttcttttgctgttttgaggattgcaggaccggaagttggcgggaaggcagaatccatattcggatcgccaaaatcgatagttatagccgtatttttttccccacagccttcgccctatttaacttggtctattgggtgggctatctgtacctgtag

SEQ ID NO: 188858 - DNA, 1260 bp, synthetic construct
  misc_feature 1..1260: note = Description of Artificial Sequence: Synthetic coding sequence
  source 1..1260: mol_type = other DNA
atgggccccctgaaggccttcctgttcagccccttcctgctgcggagccaatcccggggggtccgtctggtctttcttcttctcacactccatctcgggaactgtgttgataaagcagatgacgaggacgatgaggatctgactgtaaacaagacctgggtcctggcaccaaaaattcacgaaggcgatattacccaaatcctcaacagcctcttgcagggttacgacaataaactccgtcccgacatcggcgtcaggcctactgtgattgagactgatgtgtacgtgaacagtattggacccgtggatcccatcaatatggagtatacaatcgacataatctttgcacaaacctggtttgactccaggctgaaattcaatagtaccatgaaagtattgatgctgaattccaatatggtgggcaaaatctggatccccgataccttcttccggaatagcaggaagtcggatgctcactggatcactacccccaacaggttgctgcgcatttggaacgacggaagggtgctctatactctccggctgactatcaacgccgaatgctacctacagctccacaacttccccatggacgaacactcatgtcctctggaattcagctcatacggatatcccaagaacgaaatcgaatataagtggaagaagccatcggttgaagtggcagaccccaaatactggcgcctataccaattcgcattcgtgggtctgcggaattctactgagattacccacaccattagcggagactacgttataatgactatattctttgatctatcaagacggatgggctattttacaatccagacatatatcccatgcatccttacagtcgtgctgtcttgggtgtccttttggataaataaggacgctgtacccgctcggacctctttgggcatcaccaccgtgctgactatgacaaccctgtcaactattgcaagaaaatccctgccaaaggtgagttatgttacggccatggacctttttgtgagtgtatgcttcatcttcgtgttcgctgctttgatggagtacggcacactccactattttaccagcaatcagaaagggaaaactgctacaaaggacagaaagctcaaaaacaaggcttcaatgactccaggcctgcacccgggatcaaccctaattcctatgaacaatatcagcgtcccccaggaagatgactacggttatcaatgtctggaaggtaggaaggacacccatacccactgtcagaattag

SEQ ID NO: 188859 - DNA, 1428 bp, synthetic construct
  misc_feature 1..1428: note = Description of Artificial Sequence: Synthetic coding sequence
  source 1..1428: mol_type = other DNA
atgagcagccccaacatctggagcaccggcagcagcgtgtacagcacaccggtgttttcccagaaaatgactgtatggattctattattactgagcctctatccaggttttacctctcagaagagtgacgatgactacgaagactatgccagtaataaaacttgggttttgactccaaaggtcccagaaggcgacgtcaccgtgattctgaataatctgttggagggctacgataacaaactgaggccagatatcggagtgaaacccacccttattcatacggacatgtatgttaatagcattggacctgttaatgcaatcaatatggaatacactatagacatcttcttcgctcagacatggtatgatcgccgtctcaaatttaacagtactattaaagtgctgcggcttaactcaaatatggttggaaaaatttggatacctgatactttcttccgcaacagcaaaaaagcagatgctcactggatcaccacgccaaatcgcatgctgcgcatatggaacgatggcagggttttgtacacccttcgtctgactattgatgccgaatgtcagctgcaattacacaattttcccatggatgaacattcttgcccgcttgaattcagctcctacgggtatccccgcgaggaaatagtttaccagtggaagcggtcttccgtggaggttggcgatacaaggagctggaggctttatcaattttcgttcgtgggcctccgtaacacaactgaggtggtgaaaacaacatctggcgactacgtcgtcatgtcagtgtactttgaccttagtcgccgaatgggatacttcactattcagacttacattccctgcacccttatcgtggtgctgtcatgggtgtcattttggatcaacaaagacgctgtgcctgccaggacctcactgggcataacaacagtacttaccatgacgactcttagtacaattgcccgcaagtctctgccaaaggtctcttacgtcacggccatggacctctttgtttcagtctgtttcattttcgtgttctcagccctggtggagtacggaacactccattactttgtgtccaataggaagccctcaaaggataaagacaaaaagaagaaaaatcctctcctccgcatgttttcttttaaggccccaaccatcgacatcagaccgaggagcgccacgattcagatgaataacgcaacacaccttcaggaaagagacgaggagtacgggtacgagtgtctggacggtaaggactgtgcctctttcttttgttgtttcgaggattgccgtaccggcgcatggaggcatggtaggattcatatccgcatcgcaaagatggacagctatgcccggattttttttcccaccgcgttttgtctctttaatctggtgtactgggttagctatttatacctgtag

SEQ ID NO: 188860 - DNA, 1404 bp, synthetic construct
  misc_feature 1..1404: note = Description of Artificial Sequence: Synthetic coding sequence
  source 1..1404: mol_type = other DNA
atgagcagccccaacatctggagcaccggcagcagcgtgtacagcacccccgtcttcagtcaaaaaatgacagtctggattttgttactcttatccttgtaccctggctttactagtcaaaagagcgatgatgactatgaggattatgcctctaataagacatgggtactcacccctaaagtcccggaaggagatgtgaccgttatactgaacaacttactggagggctacgacaataaattacgccctgatatcggagtgaagccaacactgatccatacagacatgtacgtgaatagtatcgggccagttaatgccatcaatatggaatacactatcgacatcttctttgcccaaacatggtacgatagaagactcaaattcaattcaacaatcaaagtactccgcctcaactctaacatggtgggaaaaatctggattccggacaccttttttcgcaactccaaaaaggccgatgcccattggataaccacacccaatagaatgctccgcatctggaacgatggccgggtactttacactctccggctgaccatcgacgccgagtgtcaattacaattacacaactttccaatggacgagcactcctgtccactcgagttctctagctacggataccctagagaagagattgtgtatcagtggaagcgttcctctgtggaggtgggggacacaagaagctggcgcttataccagttctcctttgtgggtctgagaaataccacggaggtcgtgaagaccactagtggagattatgtggtgatgagtgtctactttgacctgagccggagaatgggatactttactatccagacttacataccttgcactctgattgtagtcctgtcttgggtaagcttttggatcaataaggacgctgttcctgcccgcacctcactcggaatcactactgtgttaactatgaccactctctccacaatcgcccgaaagtcactgccaaaagtttcctacgtgacagccatggacctgtttgtttctgtttgctttatttttgttttttctgcattggtggagtatggtactctgcactattttgtatccaatcgcaagccgagcaaggacaaagataagaaaaagaaaaatccggcccctaccattgacatccgaccccgctctgcgactattcagatgaataatgccacacacctgcaggaaagagacgaagaatacggatacgaatgcctcgatggaaaagactgtgccagcttcttttgttgttttgaagattgcagaactggggcctggcgtcatggccggattcatatacggattgccaaaatggacagctatgccaggatatttttccccactgccttctgtctattcaatctggtgtactgggtttcctacctgtacttgtag

SEQ ID NO: 188861 - DNA, 1119 bp, synthetic construct
  misc_feature 1..1119: note = Description of Artificial Sequence: Synthetic coding sequence
  source 1..1119: mol_type = other DNA
atgtacgtgaacagcatcggccccgtgaacgccatcaacatggagtacactatcgacattttttttgcacagacatggtatgaccgtaggctcaagtttaactctacaatcaaggtgctcagactaaactctaatatggtcgggaagatctggattcccgatacctttttccgaaattctaaaaaggcagatgcgcactggattacaactccaaacaggatgttgcgcatttggaatgatggacgtgtcttgtacaccctcaggcttactattgacgccgagtgccaattacaactccataacttccccatggacgaacacagttgccccctcgaatttagctcctacgggtatccccgcgaagagatagtgtatcagtggaagcggtcgagtgtggaagtgggcgacacccgctcttggaggctttatcagttcagcttcgttggtcttagaaacaccactgaagttgtgaagaccacctccggcgactacgtcgtgatgagcgtgtactttgacctgtccaggagaatgggttatttcaccatccagacctatattccttgcactcttattgtggtcctgtcatgggtgtcattctggattaacaaggatgccgtgcccgccagaacctccctcggaattaccacagtgttgactatgactacactgtccacgatcgctcgtaagagcctccctaaagtaagttacgtgaccgctatggacctgtttgtatccgtgtgttttatctttgtctttagtgccctagtggaatatggcacacttcactacttcgtctcgaaccgcaaaccatctaaagacaaagacaagaaaaaaaaaaatcctgcacctacaattgacatccgccctaggtctgctaccatccagatgaataacgcaacccacttgcaagagcgggatgaggagtacggctacgaatgccttgatggcaaggattgcgctagcttcttctgctgttttgaagattgcagaaccggggcctggcgccacggacggattcatattcgaatcgcaaaaatggattcttatgctagaatcttcttccctacggccttttgcctgttcaatttggtgtactgggtctcctatctctacctctag

SEQ ID NO: 188862 - DNA, 1404 bp, synthetic construct
  misc_feature 1..1404: note = Description of Artificial Sequence: Synthetic coding sequence
  source 1..1404: mol_type = other DNA
atggcccccaagctgctgctgctgctgtgcctgttcagcggcctgcacgctagatcccgtaaagtagaagaggatgagtacgaagattctagcagcaaccaaaaatgggtgctagccccaaagtcccaagacaccgacgtgaccctcatcctgaacaagctgttaagggagtacgataaaaaacttcgacctgatataggcatcaaaccgactgttattgacgttgatatttatgtgaactccattggcccggtgtcgtcaataaacatggagtatcagattgatattttttttgcccagacatggacagatagccgcctgcgctttaacagtactatgaaaatactgactttgaattcgaatatggtgggtcttatctggattcccgacactatctttcgaaacagcaaaacagcagaggctcactggatcacaacacctaaccaactgttgcggatttggaatgatgggaagatcctttatacccttcgcctgacgattaacgctgaatgccagctgcaactccataacttcccaatggatgaacactcctgcccccttatcttttcgagctacggatatcccaaggaagagatgatttaccggtggcggaagaactccgtggaagcggctgaccagaaaagctggaggctctatcaatttgattttatgggattgcgtaatacgaccgagattgtgacaacaagtgccggcgactacgtggtgatgacaatttactttgagctctctcgccgaatggggtacttcaccatccagacctacatcccatgcatattaaccgtggtgttgtcttgggtgagcttttggatcaagaaagatgcaacaccagcacgcacggcgctgggaataactacagttctcaccatgacgaccttgtccaccatagcacgtaagagtctccctcgagtgtcatatgtcactgccatggacctgttcgttactgtctgttttttatttgtgttcgccgccctgatggagtatgccacactcaattactattcctcatgtagaaagccaacaactaccaagaagacgacctcgctgttgcaccctgactctagcaggtggatcccagagcgcatttctctgcaagctccctccaactactccctgctagatatgaggcccccccctacagcaatgatcacgttgaacaactccgtatattggcaggaattcgaggacacatgtgtgtatgaatgtttggatggtaaggactgccagagctttttctgttgttacgaggagtgtaaatccggcagctggcgcaagggccggattcacattgatattctcgaactggactcctactcacgagtctttttccccacctcatttttgctttttaatctcgtttattgggtgggctatctttacctttag

SEQ ID NO: 188863 - DNA, 1323 bp, synthetic construct
  misc_feature 1..1323: note = Description of Artificial Sequence: Synthetic coding sequence
  source 1..1323: mol_type = other DNA
atgaactacagcctgcacctggccttcgtgtgcctgagcctgttcaccgagagaatgtgcatccaggggtcccagttcaatgtcgaggtgggacggtccgacaaactctctcttcctggctttgaaaacctgactgcaggttacaacaagttcctgaggcctaacttcgggggcgagcctgtacagatcgctctgacccttgacattgcttctattagttcgatatccgaatctaacatggactacacagcaactatatacctccgtcagcgatggatggaccagcgactcgtgttcgagggcaacaaatcatttaccctggatgctcggctggtcgagttcctttgggtgcctgatacctatattgtggagtcaaagaagagcttcctgcacgaagttacagtcggaaacagactgataaggctattttcaaacggtactgtgctctacgctctgcggatcacgacaactgtcgcctgtaacatggatctcagtaagtatcccatggatacccagacttgcaagctgcaactggaaagctggggctatgacggcaatgacgtcgaatttacctggctacgcggaaatgacagtgtaaggggactggaacacctgaggctggcacagtacaccatagaacgctactttacgctcgtaacaaggtcccagcaggagacaggcaattacacccgtctcgtgcttcaatttgagctcaggaggaacgtgctatatttcatactagagacctacgttccaagcactttccttgtagtgctgagttgggtctcattttggatcagtcttgacagcgtccccgcgagaacttgcattggtgtgacgaccgttctctccatgactactcttatgatcggatctaggacctccctccccaacactaactgctttatcaaagctatcgatgtgtatcttggcatttgtttttctttcgtgtttggggctctcctggagtacgcagtggctcattacagctccctgcagcagatggccgcgaaagacaggggaactacaaaagaggtagaggaagtctcaataacgaacatcatcaattcttcgatctcttcctttaagcgcaagatttccttcgccagtatcgagatcagttctgataacgtagactactctgaccttaccatgaaaacctccgacaagtttaagttcgtgtttcgcgagaaaatgggccgcatagtggattatttcacgatacagaatccatctaacgtagaccactactcaaaattgctgttccctctgatctttatgctggctaacgtcttttactgggcttattatatgtacttttag

SEQ ID NO: 188864 - DNA, 159 bp, synthetic construct
  misc_feature 1..159: note = Description of Artificial Sequence: Synthetic coding sequence
  source 1..159: mol_type = other DNA
atgaactacagcctgcacctggccttcgtgtgcctgagcctgttcaccgaaaggatgtgtattcagggatcacagttcaacgttgaagtgggcaggagcgataagctttcattgccaggcttcgaaaacctgactgctgggtataacaagttcctctag

SEQ ID NO: 188865 - DNA, 1323 bp, synthetic construct
  misc_feature 1..1323: note = Description of Artificial Sequence: Synthetic coding sequence
  source 1..1323: mol_type = other DNA
atgaactacagcctgcacctggccttcgtgtgcctgagcctgttcaccgagcgcatgtgcatccagggaagccagtttaatgtggaagtggggaggagtgataaactgtcgctcccaggatttgagaatctcactgccggttacaacaaattcctgcgcccaaactttggcggcgaacccgtgcaaatcgcacttaccctggacattgctagcattagctccatcagcgaatcaaatatggactatacagccacgatatatttacgacaacggtggatggatcagaggcttgtgtttgagggcaacaagagttttacgttggatgcccgactggttgaatttctgtgggtgcccgatacttacatcgtggaatccaaaaagtcctttctacacgaagttaccgtgggaaacaggctcattcgccttttcagcaacggcactgtgctttacgctttgcgtatcactacaaccgtggcttgtaacatggatctgagcaagtaccccatggatacacagacatgcaaactccagctggagtcatggggatacgacggcaatgacgtcgagttcacttggctcagaggaaacgactcagtgcgcggtctggaacacctgaggctcgctcagtacactatcgaaaggtattttactcttgtcactcgatctcagcaggaaactggaaactatactcggctggtgctgcaattcgagctgaggcgcaatgtactgtactttattctagagacttacgtgccttccacctttttggtggttttgtcttgggtttctttctggatttccctggacagtgtgccggccaggacgtgtatcggagttaccacagtgctgtcgatgactactctgatgatcggctccaggacctcacttcccaacaccaactgcttcattaaggcgatcgatgtgtacttaggcatttgtttttctttcgtttttggcgccctattggaatatgctgtggcacactacagtagccttcagcaaatggccgctaaagatcgagggactactaaggaggttgaggaggtgtcaattaccaacattattaattcttctatcagttcattcaaacgaaagatttcttttgcaagcattgagatatcaagcgataacgtggattatagtgacctcacaatgaaaacatctgacaagttcaaattcgtgttcagggaaaaaatgggcaggatcgttgactatttcacgatacagaacccctctaacgtggatcactacagcaagctgctgttccctctgattttcatgttggctaacgttttctattgggcgtattacatgtacttctag

SEQ ID NO: 188866 - DNA, 180 bp, synthetic construct
  misc_feature 1..180: note = Description of Artificial Sequence: Synthetic coding sequence
  source 1..180: mol_type = other DNA
atgaactacagcctgcacctggccttcgtgtgcctgagcctgttcacagaacggatgtgcatccagggctcccagtttaacgtagaggtgggtcggtcagacaaattgtcactccccggatttgaaaaccttacggcaggatataacaagttcctccgccccaactttgggggcgaatag

SEQ ID NO: 188867 - DNA, 279 bp, synthetic construct
  misc_feature 1..279: note = Description of Artificial Sequence: Synthetic coding sequence
  source 1..279: mol_type = other DNA
atgaactacagcctgcacctggccttcgtgtgcctgagcctgttcacagagaggatgtgtattcagggctctcagttcaatgtggaggtaggtcgttcggataaactgtcacttcccggcttcgagaacttgaccgcaggttacaacaagttcctcagacctaattttggcggggaacctgtccagatcgcactgacgctcgatatcgcctcgattagctcaatttcagagagcaacatggattacaccgctactatctacctgaggcagaggtggtag

SEQ ID NO: 188868 - DNA, 516 bp, synthetic construct
  misc_feature 1..516: note = Description of Artificial Sequence: Synthetic coding sequence
  source 1..516: mol_type = other DNA
atgaactacagcctgcacctggccttcgtgtgcctgagcctgttcaccgaacgtatgtgcatccagggatcccagttcaacgtcgaggttggaaggagtgacaaactgagtcttccaggttttgagaatctgactgcgggctataacaagttcctgcggcccaatttcggtggggagcctgtgcagattgctctcactctcgatattgctagcatcagcagcatctccgagtctaacatggactacaccgccactatctacctgcgacagagatggatggaccaaagactggtgtttgaagggaataaaagttttactctggacgctcgactggtcgagtttctctgggttccagatacatacattgtggagagcaagaaaagctttctgcacgaggttacggttggcaacagactgattcgcctctttagcaatggcacagtcctctatgccctcagaatcacaaccacagtggcgtgtaatatggacctcagcaagtaccctatggatacatag

SEQ ID NO: 188869 - DNA, 570 bp, synthetic construct
  misc_feature 1..570: note = Description of Artificial Sequence: Synthetic coding sequence
  source 1..570: mol_type = other DNA
atgaactacagcctgcacctggccttcgtgtgcctgagcctgttcacagaacggatgtgtatccagggatcccagtttaatgtggaagttggccgttccgacaaactgtccctccccgggtttgagaatttgacggccgggtataacaaattccttcgtccgaactttggaggcgaacccgttcaaatcgcactgacactcgacattgcttctatttcctcgatttcagagtcaaatatggactataccgccaccatctacttgagacagcgctggatggatcaacgactggtttttgaaggcaacaaatccttcactcttgatgcccgcttggtagagtttttatgggttcccgacacttacattgtagaaagtaagaaaagcttcctacacgaggtgacggtaggtaaccgtctgattcgtctttttagcaacggcactgtcttgtacgcactacgaattaccaccacagtggcctgcaatatggatctgtcaaagtacccgatggatacccagacttgtaagctccagctcgaatcatggggttatgatggcaatgatgttgaatag

SEQ ID NO: 188870 - DNA, 564 bp, synthetic construct
  misc_feature 1..564: note = Description of Artificial Sequence: Synthetic coding sequence
  source 1..564: mol_type = other DNA
atggactacaccgccaccatctacctgcggcagcggtggatggaccagaggcttgtttttgagggaaataagtccttcacactagatgaggtcaccgtgggcaaccgactgatccgcttatttagcaatggcaccgtcctttacgcccttaggatcacgactactgtggcctgcaatatggatcttagcaaatatccaatggatacacagacctgcaagctccagctcgagtcttgggggtacgacgggaatgatgtcgaatttacctggctgagaggtaatgatagcgtgagagggctagaacacctgcgtctcgctcagtacaccattgagcggtacttcacacttgtgactaggagtcaacaagaaaccggtaattatactagattagtactgcagttcgaactccggaggaacgtcctttacttcatcctcgagacttatgtccccagcacatttcttgtggtgctatcctgggtatccttctggatcagtttagacagtgtgcccgctcggacctgcatcggagacaacaagggaagtaggaggtcacagtattactag

SEQ ID NO: 188871 - DNA, 2826 bp, synthetic construct
  misc_feature 1..2826: note = Description of Artificial Sequence: Synthetic coding sequence
  source 1..2826: mol_type = other DNA
atggccagcccccggagcagcggccagcccggcccccccccccccccccccccacctcccgctagactactgctgcttctgctgctgcccctgttactgcccctcgcccccggggcatggggctgggcccgaggggcaccacggcctcctccctcatctcctcccctatcaatcatgggccttatgcctttaacaaaggaggtcgcaaaggggagtatcgggcgtggtgtgctgcctgccgtcgaactcgcgatagagcagatccggaacgaatcgttgcttaggccgtatttcctggacctgaggttatacgacactgagtgcgataatgccaaaggcctgaaggccttctatgatgccatcaagtacggaccgaaccatctgatggtgttcgggggagtctgtcccagtgttaccagcattatagcagaatccctgcaaggttggaacctcgtgcagttgtccttcgcggctacaaccccagtgttagccgacaaaaagaaatatccttatttttttagaaccgttccaagtgataatgcggtgaaccctgcgattctaaagttgctgaaacactatcagtggaagcgggtgggcactttgacccaggatgttcagcggttctctgaagttagaaacgacctgactggcgtgttgtacggtgaggacatcgaaatctctgataccgaaagtttctctaatgacccttgcacttcagtcaaaaagctcaagggcaatgacgttcgcataatactcgggcaattcgatcagaacatggccgcaaaggtgttttgctgtgcttatgaagagaatatgtatggctccaaataccagtggattatccccggatggtatgagccctcctggtgggagcaagtgcacactgaagctaattctagtcgatgtttgcggaaaaatctgctagcagccatggagggctacattggcgtagactttgagcctctgagttccaaacagattaaaactataagcggcaagacgccgcagcagtacgagagggagtacaacaacaagcggtccggagtgggaccttcaaaattccacggctacgcttacgacggcatttgggtgatcgccaagactctgcagagggccatggagacactgcatgcttcgtcccgacatcagagaattcaggatttcaattataccgaccatactctcggcaggattattctgaacgccatgaatgagaccaacttctttggagtaactgggcaagttgtttttcgaaacggggagaggatgggaaccataaagttcacccaattccaggacagtagagaagtcaaggtgggagagtacaacgcagtggccgatactctggagataatcaatgacacaattagatttcagggatcagagccaccaaaagataagaccatcattctggagcaattgaggaaaattagcctccctctgtacagcatcttatctgctttgaccattctcggcatgattatggccagcgcattccttttcttcaacattaagaatcgtaaccagaaactgattaagatgtctagtccctatatgaacaacctcattatcttggggggaatgctgtcctacgcatctatattcttatttggtttagatggctcctttgtgagcgagaagacatttgagactctgtgtaccgttagaacctggatattgaccgtggggtacacaactgcatttggtgcaatgttcgccaagacatggcgagttcacgccatctttaaaaacgtcaagatgaaaaagaagatcatcaaggatcagaaactgctggtgatagtaggtggcatgctgttgattgatctctgtattctgatctgttggcaagccgtggaccccctgcggcgcaccgtggagaagtattccatggaacctgatcccgccggtagagatattagcatccgccccctgctcgaacactgtgagaatacgcacatgactatctggctcggaatcgtgtatgcttataagggcctgctgatgctgtttggctgcttcctcgcttgggaaacgagaaatgtgtccatccctgccctcaacgactccaagtacatcggaatgagcgtttacaatgtgggaatcatgtgcattattggtgccgctgtatcttttctcactcgcgaccagccaaacgtgcagttttgcattgtagctctggtcattatcttctgctcaaccatcaccttgtgcttggtgttcgtgcccaagctgatcacactgcgcactaacccagatgctgctacccagaataggaggttccagttcacgcagaaccagaagaaggaagattcaaagacatccacatccgttacctccgtgaatcaggcttctaccagtcggctggagggccttcagagtgaaaaccatcgtctgcgtatgaagatcaccgagctggacaaggatttggaggaggtaacaatgcagcttcaggacacccccgagaagactacatacattaaacagaaccattatcaagagctgaacgatatcctgaacctcggaaacttcactgaaagcacagacggagggaaggcaatccttaagaatcacttggatcagaatcctcagctgcagtggaacacaacagagcctagccgtacttgcaaggatcccattgaggacattaactcgcccgaacacattcagagacgactctctcttcaactccctatactacatcacgcttacctgccttctatcggaggagtcgatgcatcctgtgtttccccttgtgtgagccctacagctagccctagacataggcatgtccccccttcgtttcgggtcatggttagcggactgtag

SEQ ID NO: 188872 - DNA, 1179 bp, synthetic construct
  misc_feature 1..1179: note = Description of Artificial Sequence: Synthetic coding sequence
  source 1..1179: mol_type = other DNA
atgcggcccggcttcggcggccccgccatccccgtgggcgtggacgtgcaagttgagtctctcgattcaatcagcgaggtggatatggatttcacgatgactctctatctccggcattattggaaggatgagcggctgtccttcccgagcaccaataacctgagtatgactttcgatggcagactggtcaagaaaatttgggtgcctgatatgttcttcgttcacagcaaaagatcctttatccatgacaccaccactgacaacgttatgcttagggtgcagcctgacggcaaagtgttgtactcactgagggttacggtgacagccatgtgcaacatggactttagccgcttcccgctagacacgcaaacatgttctctggagatcgaaagttacgcctacaccgaagacgatctgatgctctactggaaaaaaggaaacgatagcttaaagaccgatgaacggatttcactgtctcagttcctgattcaggaatttcatactactaccaagctcgcattttactcctccactggttggtacaaccggctctacatcaactttacactcaggcgccacatattcttcttcttgttacaaacttactttcccgccacactaatggtgatgctgagctgggtgtcattttggatcgaccggcgcgcagttccagctagagtccctctcggtatcacaacagtcctcaccatgagtaccatcataaccggcgttaatgcgagtatgccacgcgttagctatataaaggccgtggatatctacctgtgggtctcttttgtgtttgtctttctttcagtattggaatacgccgcggtgaactaccttaccactgtgcaggagagaaaagagcaaaaactgagggaaaaattgccttgtacttcaggcctccccccacctcggacagcaatgctggatggcaattacagcgatggggaagtgaacgacctcgacaactatatgcctgagaatggcgagaaacctgatcgcatgatggtacagctgacccttgcctccgaacgatcatcaccccagaggaaatcacagaggtccagctatgtttctatgaggatcgatacacatgcgatcgacaagtactctcggattatctttccagcggcatacatcctcttcaatttgatttactggtctatattttcttag

SEQ ID NO: 188873 - DNA, 1389 bp, synthetic construct
  misc_feature 1..1389: note = Description of Artificial Sequence: Synthetic coding sequence
  source 1..1389: mol_type = other DNA
atgctggccgtgcccaacatgcggttcggcatcttcctgctgtggtggggctgggtcttagctactgagtctagaatgcattggccagggagggaggtgcatgagatgtctaagaagggatcacccatattgcgcagaagcccggacattacaaaaagtcctctgaccaaatcagagcagctgcttagaatcgatgaccatgacttcagcatgcgcccgggctttggagggcctgcgatccctgtgggcgtcgatgtgcaagtggagagtctcgatagcatctcagaggtcgatatggattttaccatgaccctttatctcaggcattattggaaggacgaacgtctatctttcccatctacaaataacctcagtatgacgtttgacggaagactggtcaagaaaatttgggtgcccgacatgttcttcgttcactccaaaaggtccttcattcatgatacaactactgataacgttatgctgcgagtccagcctgatggtaaggttctgtactcactcagggttactgtaaccgccatgtgcaatatggatttctcaaggtttccactggatacgcagacttgctcacttgaaatcgagagttatgcatacaccgaggacgatctcatgctgtattggaagaaaggcaatgactccctgaagacagacgaaaggatcagcctgtcgcagtttctgattcaggagttccatacaacaacaaaactcgctttctattcaagtactgggtggtacaacagattgtacataaacttcactcttagaagacacatcttcttctttttactgcaaacctattttccagctaccctgatggtaatgctgagctgggtcagtttttggatcgaccgccgcgccgttcccgcaagggtgcctctcggcataaccaccgtcctcactatgagcacaatcattactggagtgaacgcctccatgccacgggtctcttacatcaaggccgtcgatatctatctctgggttagtttcgtgttcgtgttcttgtctgtcctggagtatgcagcagtcaattatctgacaactgtgcaggagcgaaaagagcagaagctcagagaaaagctcccctgtacaagcggactcccacctcctcggacggctatgctcgacggaaactatagcgacggggaagtaaacgatctcgataactacatgcccgaaaacggcgagaaaccagacagaatgatggtacagctaaccctggcttccgaacgatcctccccacagcgcaagtcgcagagaagctcgtatgttagcatgcgcattgacactcacgcaattgacaagtattccaggataattttccctgccgcgtacatactgttcaatctgatatattggtcgatattctcatag

SEQ ID NO: 188874 - DNA, 1179 bp, synthetic construct
  misc_feature 1..1179: note = Description of Artificial Sequence: Synthetic coding sequence
  source 1..1179: mol_type = other DNA
atgcggcccggcttcggcggccccgccatccccgtgggcgtggacgtacaggtggaatctcttgattctatttcggaagtcgacatggattttacgatgacgctctacctgcgccattattggaaagatgagcgactgagctttcctagtacaaacaacctgtccatgactttcgacgggaggctcgttaaaaaaatttgggtgccggacatgtttttcgtgcacagtaaacgcagcttcattcatgacaccacgactgacaatgtgatgttacgcgtgcagcctgatggcaaggttctgtactccctcagggtgactgtgaccgctatgtgtaacatggactttagccggttccccctggacacacagacttgttccctcgaaatcgagtcctacgcttatactgaggatgatctgatgctttactggaaaaagggaaacgacagtctgaaaaccgacgagcgcatcagcctgagccagttccttattcaggaatttcacacaacgacaaaactcgccttctatagctctacgggatggtacaaccggctatacatcaacttcacacttaggcggcatatcttctttttcctcttacaaacctacttccctgctacattaatggtgatgttgtcctgggtctcgttctggattgatcggagagcggtccctgcccgcgtacccctaggcataacaacggtgctgaccatgtctactataatcactggagtcaatgccagtatgcctcgggtcagctacatcaaggccgtcgacatctatctgtgggtatcgttcgtctttgtgttcctgtccgtgctggagtatgcggcagtgaactatctgactaccgtgcaggagagaaaagagcagaagctcagggaaaaattgccatgtacttccgggctgccccctccacgaacagccatgcttgatggtaattactctgatggcgaggtgaatgacctagataattacatgcccgaaaatggagaaaagcctgatcgcatgatggtgcagctgacactggctagcgaacgctcaagtcctcagaggaagagtcaacggagcagctatgtctcaatgcgaatcgacactcacgccatcgacaagtattccaggattattttccccgcagcttatattctgttcaatctgatatattggagcatcttttcttag

SEQ ID NO: 188875 - DNA, 1440 bp, synthetic construct
  misc_feature 1..1440: note = Description of Artificial Sequence: Synthetic coding sequence
  source 1..1440: mol_type = other DNA
atgctggccgtgcccaacatgcggttcggcatcttcctgctgtggtgggggtgggtactcgccaccgagtctcgtatgcattggccagggcgcgaggtccacgaaatgagcaagaaaggtcggccgcaaagacagcgccgagaggttcatgaagatgcccataagcaggtgagccccatcctccgtaggtcacctgatatcacaaagagcccactcaccaaaagtgaacagctgctacgaattgatgatcatgatttctcgatgcgccctggattcggaggaccggcaatcccggtgggcgtggatgtccaggtggagagcctggatagcatttcggaggttgacatggactttaccatgacactgtaccttcggcactattggaaggatgaacgactgtctttccctagcacaaataatcttagtatgactttcgatggacggctcgtaaagaaaatttgggtccccgacatgttctttgtgcatagtaagagaagcttcattcatgatacaaccactgacaatgtgatgctacgggtccagcccgatggcaaggttttgtattcactaagggttacagtaaccgctatgtgtaatatggacttttccaggtttccgctagatactcagacctgctccctggagatcgagtcctacgcctacaccgaagatgacttaatgttgtactggaagaaggggaacgattccctgaaaactgatgagcgcattagcctgtcccagtttctgatccaagagttccacaccaccacaaaactggccttctactcctccacgggatggtataacaggctgtatatcaatttcacccttaggcggcacatattcttttttctgctgcaaacctactttccagctactctaatggttatgctgtcctgggtgtccttctggatcgacagacgggccgttccagccagggtgccattgggcataacaacggtactgactatgtctaccattataaccggggtgaatgcctctatgccaagggtgtcttatattaaggccgtggacatctatctgtgggtctcttttgtgttcgtcttcctgtccgtgctggagtatgccgctgtgaactatctcacaactgttcaagaaagaaaggagcagaaacttagggagaagctcccttgcacaagcgggctgcccccccctcgtactgccatgcttgacgggaattattcagatggggaggtgaatgatcttgataactacatgccagagaacggggagaagccagaccggatgatggtgcagttaacactagcctcagaacgaagctcaccccagaggaagagccaaaggagttcgtatgtctccatgcgtatagatacacacgctatcgacaaatacagccgcataatttttcccgccgcctacattttattcaatttaatctattggtcaattttttcgtag

SEQ ID NO: 188876 - DNA, 1473 bp, synthetic construct
  misc_feature 1..1473: note = Description of Artificial Sequence: Synthetic coding sequence
  source 1..1473: mol_type = other DNA
atggtgaagcccggcggcatctgcagcgccaccggctactggaaggcagcattctgccttaccgatgtgcacaaaatgccctattttacccgtctgattctgtttttgttctgcttgatggtgcttgtcgagagccgcaagcctaaacggaagcgttggactggtcaggtagagatgccaaaaccctcgcatctgtacaagaaaaatctcgatgttactaaaataagaaagggaaaaccacagcaactactccgcgtcgacgagcatgacttttcaatgaggcccgccttcggtggaccggcgatccctgtcggggtggacgtccaggtggagtcactggactccatcagcgaggtcgatatggattttactatgaccctttatctgcggcactactggaaggatgagcgcctcgctttcagctctgcgtcaaacaagtctatgacatttgacggacgactggttaagaagatctgggtccctgatgttttctttgtgcacagtaagcgatcgttcacgcacgacaccacgacagacaatattatgcttcgtgtttttccagatggccacgtgctctacagcatgcggattactgtgactgccatgtgcaacatggacttttctcattttcctttggactctcagacatgcagtctggaactggagagctacgcctacacggacgaggatctcatgctctactggaagaatggggacgaatccctgaagaccgacgaaaagatttccctgtcccaatttttaattcagaagtttcatacaacaagcaggttggcattttatagtagtacaggttggtataatcggttatacattaatttcacccttagacgccacatatttttttttctattacaaacttactttcccgcaacactcatggtgatgctgtcctgggtcagcttttggatagaccggcgagcagtgccggctcgcgtgtctcttgggattactacagtcttgacaatgaccacaatcatcacaggggtcaatgcttcgatgcccagagttagctatgttaaggccgtggacatctacctgtgggtttcttttgtgttcgtgtttctgtctgtcttagaatatgcagccgtgaactatctcaccaccgttcaggaacgaaaggagcgtaagcttagggagaagtttccatgtatgtgcgggatgttacacagcaagaccatgatgttagatggttcctatagcgaatccgaagctaactctctcgctggttaccctagaagccacatcctcaccgaggaagaacggcaagataagattgttgtgcatttgggcttatcaggcgaggccaatgcagccagaaagaagggactgctgaaaggacagaccggcttcaggatctttcagaatacgcacgccatcgataaatactcacggctcattttccccgcgagttacatcttcttcaacctaatttattggagtgtgttctcctag

SEQ ID NO: 188877 - DNA, 453 bp, synthetic construct
  misc_feature 1..453: note = Description of Artificial Sequence: Synthetic coding sequence
  source 1..453: mol_type = other DNA
atgctgcgggccgccgtgatcctgctgctgatccggacctggctggccgaaggcaactatcccagtcctattcctaagttccatttcgagttctcttctgccgtccctgaggtggttctgaacctgttcaactgtaagaattgtgccaatgaggcagtagttcagaaaattctggatagagtactttctcgatatgatgtccgcctcagacccaattttggtggcgtcctggagacaaatagcacttggggcctgaacgatgatgaactgatggctcacggccaggaaaaggactcatctagcgaatccgaggactcttgcccgccttcaccagggtgttcgtttactgagggtttctcatttgacctgttcaaccccgactatgtgccaaaggtggataaatggtccaggtttttattcccactggccttcggcctttttaatattgtgtag

SEQ ID NO: 188878 - DNA, 1899 bp, synthetic construct
  misc_feature 1..1899: note = Description of Artificial Sequence: Synthetic coding sequence
  source 1..1899: mol_type = other DNA
atgggcatccggggcatgctgcgggccgccgtgatcctgctgctgataagaacctggttagcagaaggtaactacccttctccaataccaaagttccattttgagtttagctccgctgtccctgaggttgtgctgaacctgtttaactgtaaaaattgtgcaaatgaagctgtcgtgcagaaaatcctcgatcgtgttcttagccgttatgatgtgcgacttaggccaaattttggaggagctcctgttcctgtacgaatcagtatctacgtaactagtatcgaacaaatctcagaaatgaatatggactatacgattaccatgttctttcaccaaacgtggaaagatagtcgtctcgcctattacgagactactctgaacctcaccctggactacagaatgcacgagaaactgtgggtgcctgactgttactttcttaattccaaggatgccttcgtgcacgacgttacagttgaaaacagagtattccagttacacccggatgggaccgtgcgctacggtatacggctgacaaccacagccgcatgctccctcgatctccacaagtttcctatggacaagcaggcctgtaatctggtggtggagagttatgggtacaccgtcgaggatatcatactgttttgggatgataacgggaatgcaatccacatgacagaagaactgcatatcccacagtttacttttttaggcagaaccattaccagtaaagaagtgtacttctataccggaagctacattcgcctaatcctcaaattccaagtgcagcgagaggttaattcataccttgtgcaggtttactggccaactgtgctcaccactatcacgagctggatcagcttctggatgaattatgacagttcagccgctagagtcactatcgggcttacgtccatgctcatcctcaccacaatcgacagtcacctgagagataagttgcctaatatcagctgcatcaaggcaatcgatatctatatcctggtctgtctattctttgtgttcctgagtctgcttgaatatgtctatattaattatttattctactctcggggccccaggcgacaaccacgtcgccaccggagacctcgcagggtcatcgctagatacagataccaacaggtagtcgtcggcaacgtgcaagatggtttgatcaatgtggaggacggggtgtcttccttgcctatcacgcccgcacaggctcccctggcctcaccagagtccttggggtcactgacaagcaccagtgagcaggcacaactggccacttccgaaagcctctcccctctgacctctttgtcagggcaggcgccgctggccacaggcgaatccctttccgatctgccaagcacgagcgaacaggcacgccatagttatggggtgcgatttaacggctttcaggccgacgactccatcttccccacagagattagaaatagggtcgaggctcacggtcatggtgtgacccatgaccacgaggactccaatgaatctctgagcagcgatgaaagacatgggcatgggccctccggtaagcctatgctgcaccatggagaaaaaggtgtacaggaggcaggttgggatctcgatgacaataacgataagagcgactgcctggccattaaggaacaattcaaatgtgacactaattctacctggggactcaacgacgacgaactcatggcccacggacaagagaaggactcctccagcgagtccgaggattcctgcccacccagcccaggatgtagctttaccgaaggcttctcattcgatctctttaatcccgactacgtgcccaaggtggacaagtggtctagattcctgtttcccttagctttcggtctctttaatatcgtgtattgggtgtaccacatgtattag

SEQ ID NO: 188879 - DNA, 1083 bp, synthetic construct
  misc_feature 1..1083: note = Description of Artificial Sequence: Synthetic coding sequence
  source 1..1083: mol_type = other DNA
atggacagcagcaactgcaaggtgatcgcccccctgctgagccagaggtaccgccgaatggtgactaaagacgggcatagtacgctgcagatggacggcgcccagagggggcttgcttatttgagggacgcttggggtatccttatggatatgcgctggagatggatgatgcttgtctttagcgcttctttcgtggtccactggttggtgttcgctgtgctctggtacgtcctggccgaaatgaatggagatctcgagctggaccacgacgccccgcctgaaaaccatacgatttgcgtcaagtacatcactagtttcaccgcggctttctcattcagcctcgaaactcagttgaccattgggtacggaaccatgttcccatcgggcgattgtccctctgcaattgcactgctagctatccagatgctgctgggactgatgctcgaagctttcatcactggtgctttcgtggctaagattgcacgtcctaagaaccgcgcattcagcataaggttcacagacaccgccgttgtcgcacatatggacgggaagccaaatctgatattccaggtggcaaacacccgcccctcccctctgacatctgttcgggttagcgccgtgttgtaccaggagcgtgagaacgggaaactctaccaaacctccgttgatttccatctggatggcatcagcagcgacgaatgccctttttttattttcccactgacatactaccacagtatcacgcctagctctccgttggccaccctccttcagcatgagaatcctagccactttgagctggtggtttttctatccgctatgcaggagggaacgggcgagatttgccagaggcgcacctcctacttgccgtccgagatcatgctgcaccactgctttgcttcactgctcaccaggggctcaaaaggggaataccaaattaaaatggaaaatttcgacaagaccgtcccggaattcccaacacccctcgtttctaagtctccaaatcgcaccgacttagacattcacattaacggacagtcaatcgataacttccaaatatctgaaaccggcctaactgagtag

SEQ ID NO: 188880 - DNA, 2106 bp, synthetic construct
  misc_feature 1..2106: note = Description of Artificial Sequence: Synthetic coding sequence
  source 1..2106: mol_type = other DNA
atggccgtgagcgccggcagcgcccggaccagccccagcagcggctttcttatggtcctagacattccacaggaacgcggccttagcagtctggacagaaagtacctcgatggcctggacgtgtgccgtttccctctcctcgatgctctgaggccgctacccctggattggatgtacctcgtttacaccatcatgttcctgggtgctctgggaatgatgctgggcctgtgctacaggatcagttgtgttctgttcctgctgccctactggtatgtcttcctgttagataaaacctcatggaataatcactcttatctgtacgggttactggccttccagcttacctttatggacgccaatcactactggagcgttgacgggcttctgaatgctcaccggcgcaacgctcacgtgccgttatggaattatgcggtgttacgtggccaaattttcatcgtgtactttattgcaggcgtgaagaagctggacgccgactgggttgaggggtacagcatggagtatttatccagacactggctcttttcacccttcaaactgcttcttagtgaggagcttacatctctcttagttgtacactgggggggtttactgctggacctctccgccgggttcctgttgtttttcgatgtgtctagaagcatcggcctgttctttgtgtcctatttccattgtatgaactcgcaattattctccataggaatgttctcttatgtcatgttggcatcaagccccctcttttgctcccctgagtggcctagaaagttggtaagctactgccctagacgattacagcagctgcttccactcaaagcagcccctcaacccagcgtgagctgtgtgtacaaaaggagccgcggaaaatctggccagaaacctggccttcgtcatcagttaggtgccgcgtttactttgctctacttgctcgaacaactgttcctgccctacagtcattttctgacccaggggtacaacaattggacaaacggcctgtacggatatagttgggatatgatggtgcactcacggagtcatcagcacgtcaaaatcacctacagagatggccggaccggcgagctgggatacctgaacccaggagtctttacacagtcacggaggtggaaagaccatgctgacatgctgaagcagtatgccacctgtttgtccagactgttgccaaaatacaatgttaccgagcctcagatttattttgatatttgggtgtcaatcaatgataggtttcagcagaggatattcgatcctagagtagacatagtacaagctgcatggagcccatttcaacgcacttcctgggtacagccccttttgatggacctgtctccctggagggcaaagttacaagagatcaaatcgagccttgacaaccacacagaggtggtcttcatagcagattttcccggcctacacctggaaaacttcgtgtctgaagatctcggaaacacaagcattcagctactccagggggaggtaactgtcgaacttgttgcagagcagaagaatcagaccctaagggaaggggagaagatgcagctgcccgcaggggagtaccacaaggtatacaccacatctccgtctccctcctgctatatgtatgtgtacgttaacaccactgaactcgccctggagcaggatttggcatacctacaggagctgaaggagaaggtagaaaacgggagcgagaccggcccactgcctcccgaattacaacctctgctcgaaggagaagtcaaaggcggccccgagcccactcctcttgtgcaaaccttcctgcgacgacagcaacggttgcaggagattgaacgaagaaggaatacgcccttccatgagcgtttcttccgatttctgttaagaaagctgtacgtctttcggaggtccttcctgatgacctgtattagtctgcgcaatttgatcctcggccgaccatcgttggaacagctagctcaagaggtcacatacgcaaacctacggcctttcgaggctgtaggagagctcaatccctcaaacaccgacagctcccacagtaatccccccgagtcaaatccggaccccgtgcatagcgagttctag

SEQ ID NO: 188881 - DNA, 957 bp, synthetic construct
  misc_feature 1..957: note = Description of Artificial Sequence: Synthetic coding sequence
  source 1..957: mol_type = other DNA
atggccagccccggctgcctgctgtgcgtgctgggcctgctgctgtgtggcgctgcatcactcgagttgtcacgccctcatggagatacagcgaagaagcccattattggcatactcatgcagaagtgcagaaacaaggtgatgaaaaactatggtcgctactatatcgccgcaagctatgtgaagtacctcgagagcgctggtgcccgcgtggtacccgtgaggcttgatcttacagagaaggattatgagattctcttcaagtcgatcaacgggatactgttccctggagggtcggtggatttgcggcgatcagactatgcgaaagtagcgaaaattttctataatctgtccattcaatccttcgatgatggcgactatttcccagtatggggtacctgtttaggcttcgaagagctctcattgctgatttctggagaatgtttgttaacagccactgatactgtcgatgtcgcgatgccccttaattttaccggcggccagctccacagccgaatgtttcagaacttccccacagaactattgctgtccctagccgttgaaccactgacagccaactttcataagtggtctctgtctgttaaaaatttcacaatgaacgaaaagctcaaaaaattcttcaacgttttgaccactaacacagacggcaagatcgagttcatatcaactatggagggttataaataccccgtgtatggtgtgcaatggcatccggagaaggctccttatgagtggaagaacctagatggcatcagtcacgctcctaatgcagtgaaaactgccttctacttggccgagtttttcgtgaacgaggccaggaagaataatcaccatttcaaaagtgaaagtgaggaggagaaagccttgatctatcagttttcgcccatctatactggaaacatctcgtcattccagcagtgttatatctttgactag

SEQ ID NO: 188882 - DNA, 345 bp, synthetic construct
  misc_feature 1..345: note = Description of Artificial Sequence: Synthetic coding sequence
  source 1..345: mol_type = other DNA
atggccaacagcggctgcaaggacgtgaccggccccgacgaggagtcctttctgtactttgcgtatggcagtaatctattgacagagcgcatccatctacggaatccgtccgccgccttcttctgtgtagctagacttcaagattttaagttagattttggcaacagccaaggcaaaactagtcagacctggcacggcggaatcgcaaccattttccagtctcctggagatgaggtctggggcgtcgtgtggaagatgaacaagtctaacttgaatagcctggatgaactctttgcttgggtgcagaaaaaaatggtgtgcaggtggtccatcaagagaagctag

SEQ ID NO: 188883 - DNA, 567 bp, synthetic construct
  misc_feature 1..567: note = Description of Artificial Sequence: Synthetic coding sequence
  source 1..567: mol_type = other DNA
atggccaacagcggctgcaaggacgtgaccggccccgacgaggagagctttctgtacttcgcctacggttctaatctcctcacagaacgaattcacctgaggaatcctagcgcagcctttttttgcgtcgctcgcctgcaagatttcaagcttgattttggaaactctcaggggaagacaagtcaaacctggcacggtggaattgcaacaatattccagagcccaggggatgaggtgtggggcgtggtctggaaaatgaataagagtaatctgaattcacttgacgaacaggaaggcgtgaaaagcgggatgtacgtcgtgattgaagttaaggtcgccacccaggaggggaaagagataacctgccgatcctatctgatgacaaattacgaatccgcgccccccagcccacagtacaagaaaattatctgtatgggggctaaagagaatggcttgcctctggagtatcaggaaaagctcaaggcgattgagcccaacgattataccggcaaggtgtctgaagaaattgaagatattattaagaaaggagagacccagactctttag

SEQ ID NO: 188884 - DNA, 384 bp, synthetic construct
  misc_feature 1..384: note = Description of Artificial Sequence: Synthetic coding sequence
  source 1..384: mol_type = other DNA
atgttcaaccccatccaccacctggactactacaagaagaccctgccctcagagttgaattggctcggccagatgtggttgaagtttgggtgttcgggctttaggcaggagggtgtgaagagtgggatgtacgttgtcattgaagttaaagtggcaactcaggaaggcaaagagatcacatgtcgctcctacctgatgacaaattatgagtccgcacccccttccccacagtacaagaagataatttgcatgggagctaaggaaaacggcctgccactggaataccaggagaaactcaaagccattgaacccaacgactacacaggaaaggtatcagaagagatcgaggacattattaaaaaaggcgagacccagaccctgtag

SEQ ID NO: 188885 - DNA, 285 bp, synthetic construct
  misc_feature 1..285: note = Description of Artificial Sequence: Synthetic coding sequence
  source 1..285: mol_type = other DNA
atggccaacagcggctgcaaggacgtgaccggccccgacgaggagagtttcctttacttcgcctacggaagtaatctcttaacagagcgcatccatctgcggaatccatccgccgctttcttttgtgtggcgcgcctacagataatctgtatgggtgccaaagaaaacggcctacccctcgaataccaggagaaactgaaagccatcgaacccaacgactatactggtaaagtgtcagaggagatcgaggacattataaagaagggagagacccaaacactttag

SEQ ID NO: 188886 - DNA, 501 bp, synthetic construct
  misc_feature 1..501: note = Description of Artificial Sequence: Synthetic coding sequence
  source 1..501: mol_type = other DNA
atggccaacagcggctgcaaggacgtgaccggccccgacgaggagtcctttctctacttcgcgtatggaagtaatctgttgacagaacgaattcatctgagaaacccaagtgccgctttcttttgcgtcgcacgtctgcaggactttaaacttgactttgggaatagccagggcaagacgtcccaaacttggcatggaggaattgccacgatctttcagtctcctggagatgaagtgtggggggttgtgtggaagatgaataaaagtaacctgaattccctagacgaatggcgtaaaaaaagacacactgccttccaaaatcaaggcaatcatccatgcaagcataagacgcggatgtgggatagagaccccaagatacccgtgcaaaatctgtcattggccctatgttggcaagcccagtcgggccacgggacctgtaaccgcctgttcgcttgggtgcagaaaaaaatggtctgcaggtggagcatcaaacgcagttag

SEQ ID NO: 188887 - DNA, 1710 bp, synthetic construct
  misc_feature 1..1710: note = Description of Artificial Sequence: Synthetic coding sequence
  source 1..1710: mol_type = other DNA
atgaagaagaagctggtggtgctgggcctgctggccgtggtgctggtactggtaattgttggactctgtctgtggttaccctcagcgagcaaggagccagacaatcacgtatacactcgagccgccgtcgccgctgatgccaaacaatgcagcaagatcgggagggacgccctccgagacggggggagcgctgtggacgccgccattgccgcattgctctgcgttggcctaatgaacgctcactctatgggcattggcggtggactgttcctgacgatctacaactcgactacacgcaaggccgaggtcatcaacgctagagaagttgcgcctcggctcgctttcgcaaccatgtttaactcctctgagcaatcccaaaagggtggcctgtcagtcgccgtcccaggggaaataaggggctacgagttggcccatcagagacacggccgcctgccttgggccagactgttccagcccagtatccaattagccagacaaggatttccagttggaaagggtcttgctgccgcattagaaaataaaaggaccgtgattgagcaacagcccgtcctgtgcgaggtcttttgcagggataggaaggtgctgagggagggagaacgcctgaccctcccacagctggccgacacgtacgaaactctagccatagagggcgctcaggctttttacaacggctcacttactgcacagatcgtgaaggatatacaggcagccggaggaattgtcactgcggaggacttgaataactatcgtgctgaactcatcgagcatccattgaatatctcacttggggacgtagtgttatatatgccctcggctccattaagcgggcctgtgcttgcgcttatcttgaacattctgaaggggtataacttttccagggagagtgtcgagagtcccgagcaaaagggactgacctatcacagaattgttgaagcttttcgcttcgcctatgctaaaaggacactgctgggagatcctaagtttgtcgacgtgaccgaggtcgtgcgtaatatgacttccgagttcttcgcagcccagctccgggcacaaatcagcgatgataccacacacccaattagctattacaagccagagttctatacccctgacgacggcggcacagcccacttaagtgtcgttgcagaggatggaagcgctgtatccgctaccagtacaataaacctttactttgggtcaaaggttagatctcctgtgagtggaatacttttcaataatgaaatggacgactttagctccccctccataacgaatgagttcggtgtccctccatcacctgcgaacttcatccaacctggcaagcagcccctctcaagtatgtgccccaccatcatggtggggcaggacggtcaggtccggatggttgtgggggcagctggtggaacccagatcactaccgcaacagcacttgccatcatctataacctttggttcggctatgatgtcaagagggcggtggaggaacctcgcctacataaccagcttctgccaaacgtaaccactgtcgaacggaatatcgatcaggccgtaacagctgcactggagacacgccaccaccatacccagattgcttctacctttattgcggtggtacaggccatagttcgcaccgctggtgggtgggctgcggcgtctgacagcaggaagggaggtgagcctgctggttattag

SEQ ID NO: 188888 - DNA, 1710 bp, synthetic construct
  misc_feature 1..1710: note = Description of Artificial Sequence: Synthetic coding sequence
  source 1..1710: mol_type = other DNA
atgaagaagaagctggtggtgctgggcctgctggccgtggtgctggtacttgttatcgtaggattatgcctatggctgccatcagcgagcaaggaacccgacaatcacgtctacactcgagccgcagtggcagctgacgctaagcagtgctccaagatcggcagggacgccctgcgagacggcggatcagccgttgacgccgcaattgcagccctgctgtgcgtaggcctgatgaacgctcacagtatgggcatcggaggtggcctcttcctgacgatttataactctaccacaaggaaggcagaagtgatcaacgcccgcgaagtagccccccggctcgcatttgctacaatgttcaacagttctgagcagtcccagaaggggggcctctccgtagctgtgccaggggaaatcagggggtatgagttggcacaccagaggcatgggcggctcccttgggccagactgttccaaccatcaattcagctagccagacaaggatttccagtcggaaaggggctggctgcagctctcgaaaacaaaagaacagtgattgaacagcaacccgtgttgtgcgaagtgttttgtcgagataggaaagtgttgcgggagggtgagcgcctcacactccctcagctggcagatacctacgaaaccttggcgattgaaggtgcccaggctttctacaacggatccttgactgcccagatcgtgaaagatatccaggctgctgggggaatagtgacggctgaggacctgaataattaccgagcagagttgatcgagcacccactcaacatatcacttggcgatgtggtgttgtatatgccatctgcccctctgagcggacccgtgcttgctctgattctgaatattctgaaaggttacaactttagtcgcgaaagcgtagagtcccctgagcagaagggattaacctaccacagaatcgtggaagcttttcgctttgcatatgcaaaaaggaccttgctgggagatcccaaatttgtagatgttactgaggtcgtaaggaatatgactagcgaattttttgctgctcagctacgggcacaaatcagcgacgacactactcatccaattagttactacaaaccggagttttacaccccagacgatggcgggaccgctcacctcagcgtggtcgcggaggatgggtccgccgttagtgctacaagtacaatcaacctgtattttggtagtaaggtccgctcccccgtatctgggatactgtttaataacgagatggacgacttctcatctccgtctatcacaaatgaattcggtgttcctccctcccctgccaactttattcagcccggaaaacaacccttgagtagcatgtgtcctacaatcatggtgggccaagatgggcaggtgcgcatggtggtcggtgccgccggcggaacccagattacaactgccactgccctcgcgatcatctacaatctatggttcggctatgacgtcaaacgagccgtagaagagccacgactacacaatcagctgctgccaaatgtgactaccgtggagagaaacattgaccaagccgtgacagccgctctggaaacccgccaccaccatactcaaatagcaagtacttttattgctgtggtccaggcaattgtgagaactgcaggtggatgggcagccgcaagcgactcaagaaaggggggggagcctgccgggtattag

SEQ ID NO: 188889 - DNA, 1710 bp, synthetic construct
  misc_feature 1..1710: note = Description of Artificial Sequence: Synthetic coding sequence
  source 1..1710: mol_type = other DNA
atgaagaagaagctggtggtgctgggcctgctggccgtggtgctggtgctcgttattgtgggtctgtgtctgtggctcccgagtgcaagcaaggagcccgacaatcacgtgtatacacgtgccgctgtggctgccgatgctaaacagtgctcaaagatcggcagagatgccttgcgcgacggtggtagtgccgttgacgctgctatcgcagcattgctgtgcgttggtctcatgaacgcacattcgatgggcattggaggcggactgttcttgaccatatacaactcaactaccagaaaggcagaagtcataaacgcccgagaagtggccccacgcctagcctttgctaccatgttcaactcatcagagcagagccagaagggcggcctgtctgtggctgtgccaggagagatacggggctatgagctggctcatcagcgacatgggcggctgccctgggcgagactgttccagccaagtatacagctggcacgccagggttttcctgttggaaaagggctcgctgccgccttggagaataagcggacagtgatcgaacagcaacccgttctctgtgaggtcttctgcagggacagaaaggtgttgagggagggtgaaaggctcacgctccctcagctcgctgacacctacgagacactcgcaatcgagggcgctcaggcattctacaacggctccctcactgcacagattgtcaaggacatacaggccgccggcggtatcgttacggctgaggacctgaacaattaccgcgccgagctcattgaacatccacttaacatttcgttgggcgacgttgtgctgtatatgccatccgctccccttagtggacccgtgctggcactcattctaaatatcctcaaaggctacaacttttcccgggagtctgtggaaagcccagagcaaaagggactgacctaccatagaatcgtggaggccttccgattcgcttatgctaagaggactctcctgggagatccaaaatttgtcgatgtgacagaggtcgtgcgcaacatgacctctgagttctttgccgcccagttgagagcccagatctccgatgacaccacccatccgatttcctactacaaacccgagttttacacacctgatgacggcgggactgcccacttaagtgtcgtcgcagaagatggatctgccgtgtccgctacatctaccatcaacttgtactttgggagcaaggtgcgcagcccggtgtcggggatcctgttcaacaatgaaatggatgatttctcaagcccttccattactaatgagttcggcgtacccccgtcccctgccaacttcatccagcctgggaaacaaccgctttcttcgatgtgccccactataatggtgggccaagacgggcaggttcggatggtggttggagcagcaggcgggacgcaaatcacaactgcaacggctttggctattatctacaacctgtggttcggatatgacgtgaaacgcgcagtcgaagaacctaggctccacaaccagcttcttccaaatgtgacaactgtagagagaaatatcgaccaggcggtgacagccgcactcgagactaggcaccaccatacacagatcgccagcactttcattgctgtggtgcaagccatagtgcgcaccgccggtggatgggccgccgcaagtgactcccggaagggtggcgaaccagccggttattag

SEQ ID NO: 188890 - DNA, 1710 bp, synthetic construct
  misc_feature 1..1710: note = Description of Artificial Sequence: Synthetic coding sequence
  source 1..1710: mol_type = other DNA
atgaagaagaagctggtggtgctgggcctgctggccgtggtgctggtactcgtaatcgttggtctttgcctttggctgccctcagcatcgaaggaacctgataaccacgtttacacccgagccgccgttgcagccgacgcaaagcaatgtagtaagattggacgggatgcattgcgagatggaggatccgcagtcgatgctgccattgcggccctcctgtgcgtcggcctcatgaacgcccacagtatggggatcggcggcgggctcttccttacgatctacaattcaactacccgcaaagccgaagtgatcaatgcgcgcgaggtggctccccggttagcctttgcaaccatgttcaactctagtgaacagtctcagaaagggggtctgtcagtggccgttccaggcgagatcaggggctatgaattggcccaccaacgacacgggagactgccctgggccaggctgtttcagccctccatccagctggcaagacaaggctttcccgtaggtaaagggctggctgcggccctcgaaaacaagcggacggtaatagaacaacagcctgttctgtgcgaagtattctgccgagataggaaggtgctccgagaaggcgaacggttgacactgccgcaattggccgacacttacgaaactctagccattgaaggggcccaggcattctataacggtagcctcacagcacaaatcgtgaaggacattcaggctgctggggggatagtgacggcagaggacctgaacaactaccgagcagaactgatcgagcatcctttaaatatcagtctgggcgacgtggtgctatacatgccttctgctccattgtccggccccgtcctggccctgatccttaacatcctaaaagggtataacttcagcagagagtcagtggaatcacccgagcagaagggactgacttatcatcgaatcgtcgaggccttccggtttgcttatgccaagcggaccctcctcggcgatccaaaattcgtagacgtgacagaagtcgtccgcaacatgacctctgagttttttgctgctcagcttcgcgcccaaatctcagacgatactacgcatccaatctcatactataagcccgaattttatacccctgatgatggtggtaccgcacatctgtctgttgtcgctgaggatggatcggctgtatctgcgacctcaaccatcaatctctactttggttcaaaagtgcgatcgcccgtgtccggtatcctgtttaataatgaaatggacgacttctccagcccaagcattacgaacgaatttggcgtcccacccagcccagctaactttatccagccaggaaaacaacctctgtccagtatgtgccctaccattatggtcggacaggatggccaagtcagaatggtggtcggggccgctggtgggacgcagataaccacagcgacagctctggcgatcatctataatctttggtttggctatgacgtgaaaagagcggtggaggaaccccgtttgcacaaccaacttttgccgaatgttaccaccgtagaacgcaacatcgaccaggccgtcaccgccgcgttagaaacaaggcaccaccacacccagattgcaagcacttttattgcagtggtacaggccatcgtccgcaccgcaggggggtgggcggctgctagcgactcgcgcaagggcggtgaacctgccggatactag

SEQ ID NO: 188891 - DNA, 678 bp, synthetic construct
  misc_feature 1..678: note = Description of Artificial Sequence: Synthetic coding sequence
  source 1..678: mol_type = other DNA
atgaccagcgagttcttcgccgcccagctgcgggcccagatcagcgacgacacaactcatcccatctcctactataaacccgagttctacacccccgatgacggggggacagctcacctaagcgtggtcgcggaggatggttccgccgtctcagctaccagcactattaacctttatttcgggtcaaaggttcgcagtccagtgtcgggaattcttttcaacaacgaaatggatgactttagtagtccttccataaccaacgaatttggcgtgcctccatctcccgccaatttcattcagcccgggaagcagccacttagctccatgtgcccgaccataatggtgggccaggatggacaggtccgtatggtggtgggcgcagcaggcgggacgcagattaccactgccactgctctggccatcatctacaatttgtggttcggatatgacgtgaaaagggctgttgaagagcccaggctgcacaaccagctgctgcccaatgtcaccactgtggagcggaatatcgaccaagcggtaaccgccgctctggagacacgccaccatcatacccagatcgcctctaccttcattgctgttgttcaggccattgtgcgcaccgcgggtggttgggccgcagcctcagacagccgtaagggcggtgagcccgcgggatattag

SEQ ID NO: 188892 - DNA, 678 bp, synthetic construct
  misc_feature 1..678: note = Description of Artificial Sequence: Synthetic coding sequence
  source 1..678: mol_type = other DNA
atgaccagcgagttcttcgccgcccagctgcgggcccagatcagcgacgataccacccatcctatttcatactataagcccgaattttacacccctgacgatggaggaaccgcccacctatcagtggtagctgaggacggctccgccgtgtcagccacatctactattaacttgtattttgggtccaaggttagatcacccgtaagcggaatcctctttaataacgaaatggatgacttcagcagcccaagcatcacaaatgagttcggcgtccctcccagcccagcgaattttatccagcctggcaagcaaccactgtcctcaatgtgcccaactatcatggtgggacaggacggtcaggttcgtatggtggttggagctgccggcggcacccagattacgaccgccacagctctggccatcatatacaatctctggtttgggtacgatgtcaagcgggctgtcgaggaaccaaggctgcataatcaactgttaccaaacgtgactacagtggaaaggaatattgatcaagctgtgacagcagccttggaaacaaggcaccaccacacgcaaatcgcctccacgttcatcgccgtggtccaggctatcgtgcggactgctggcggttgggccgccgcatctgattctagaaaagggggagaaccagccggatactag

SEQ ID NO: 188893 - DNA, 678 bp, synthetic construct
  misc_feature 1..678: note = Description of Artificial Sequence: Synthetic coding sequence
  source 1..678: mol_type = other DNA
atgaccagcgagttcttcgccgcccagctgcgggcccagatcagcgatgacaccacgcaccccatttcgtattacaaacccgaattctacacacccgatgacgggggcactgcacatttgtccgtggtcgctgaggatggttccgcggtaagcgctacgagtaccattaacctatattttggatccaaggttcgatcccccgtcagcgggattctgtttaacaatgagatggacgacttctcctcacctagcatcacaaacgagttcggtgtcccaccatcccctgccaacttcatccaacccggcaagcaaccactgtcgtcaatgtgcccgacaatcatggttgggcaggatggccaggtgcggatggttgtcggagcagccggtggtacacaaattacaaccgcaaccgctctggctatcatctacaacctgtggtttggctacgacgtcaaacgggccgtagaagagccccgtctccataaccaactcctgccgaatgtgaccaccgtggaacggaatatcgatcaggccgttacagcagccctggagacccgacaccaccatacacagattgcgagcacttttatcgctgtagtgcaggcgattgtgaggacagccggcggatgggctgccgcatctgactctcggaaggggggcgaaccggctggctactag

SEQ ID NO: 188894 - DNA, 1710 bp, synthetic construct
  misc_feature 1..1710: note = Description of Artificial Sequence: Synthetic coding sequence
  source 1..1710: mol_type = other DNA
atgaagaagaagctggtggtgctgggcctgctggccgtggtgctggtcttggttatcgtgggcctctgtctctggctcccaagtgcatcgaaggagcccgacaaccacgtatatacccgcgctgctgtggctgccgacgccaaacagtgtagtaagatcggtcgggacgccttgagggacggaggctctgcggtggacgctgcaattgccgcactgctctgtgtcggtttgatgaacgcccattcgatgggtatcggcgggggcttgttcctgactatttacaatagtacgacaaggaaagctgaagttatcaacgcccgcgaagtggcccccagactcgcctttgcaactatgttcaactcttccgagcagagccagaaagggggcttgtctgtagctgtgcctggggagatacggggatatgagctcgcccaccaacggcatggccggctgccctgggcgcggttgttccaacccagtatccagctcgccagacaggggtttcctgtgggaaaaggcctggctgccgctctcgagaacaagcgaaccgtaatcgagcaacagccagtgctctgcgaggtgttctgtcgggataggaaagttctgcgagaaggagaaaggctcactcttccccaactcgccgacacatatgaaacattggccattgaaggtgcccaggccttctacaacggcagtcttacagctcaaatagttaaggatattcaagctgctggtggcatcgtgaccgcagaggacctgaacaattatcgcgcagaactgatcgaacacccgctcaacattagtctcggcgacgtggtgctgtacatgccttctgctcccctgagtggccccgtcctggctttaatcctgaatattttgaaaggctataatttcagccgcgagtccgttgagtctccagagcaaaaagggctgacttaccatcgcatagtggaagcctttaggttcgcctacgccaaacggacactgctgggcgatcccaagttcgtggacgtgacagaagttgtgaggaacatgacgtccgaattcttcgccgcacagttgagggcgcaaatttccgatgacacaacacaccccatctcttactataaaccagagttctacacacctgatgatggcgggactgcacatctcagtgtggtggccgaggacggaagcgccgtgagcgccacaagtaccatcaacctctatttcggatcaaaggttagatcacccgtgtcaggaattctgtttaacaacgagatggatgatttctcgagtccttctatcaccaacgaattcggtgtccccccttcacccgccaattttatccagcctgggaagcaacccctcagctcaatgtgcccgactatcatggtagggcaggatggtcaagttagaatggttgtcggggctgcaggaggcactcagatcacaacagccacagccctcgccatcatttacaacctctggtttggatatgacgtgaagagagccgttgaggaaccacgcctgcataaccagctgctgccaaacgtgaccaccgtggagcgaaatatcgaccaggctgtgaccgccgccctcgagacgaggcaccaccatacgcaaattgcatcaactttcatcgctgtcgtacaagctatagttagaacagccggaggatgggccgcagcctctgattctcgtaaggggggcgagccggccgggtactag

SEQ ID NO: 188895 - DNA, 363 bp, synthetic construct
  misc_feature 1..363: note = Description of Artificial Sequence: Synthetic coding sequence
  source 1..363: mol_type = other DNA
atgaagaagaagctggtggtgctgggcctgctggccgtggtgctggttctcgtgatcgtcgggctctgtctctggctgccctctgcctctaaagagcccgacaatcatgtctacacaagagctgcagtggccgccgacgcaaaacagtgttcaaagatcggtcgagatgcgttaagagacgggggcagtgcagtggacgccgccatagctgccctcctttgtgtggggttaatgaatgcccattctatgggcatcgggggtgggctgtttctgacgatttacaatagtacgacacgaaaggccgaagtgattaacgctcgagaggtcgcccctcggttggcctttgcgaccatgtttaattag

SEQ ID NO: 188896 - DNA, 1392 bp, synthetic construct
  misc_feature 1..1392: note = Description of Artificial Sequence: Synthetic coding sequence
  source 1..1392: mol_type = other DNA
atgaagaagaagctggtggtgctgggcctgctggccgtggtgctggtgttggtgattgtggggttatgtctctggctcccttcggccagcaaagagcctgataatcatgtgtacacccgtgcagccgtggcagcagatgcgaagcagtgctcaaagatagggcgcgacgccctcagagatggcggcagtgctgtggacgccgcaatcgcagctttactgtgcgtaggcctgatgaacgcacacagtatggggatcggcgggggtttgttcttaactatctacaatagcaccacccgaaaagccgaagtcattaacgctagagaggtagccccccggctggcttttgccaccatgttcaacagctctgagcagtctcagaaaggcggcctgtcggtggccgtgcctggggagattcgaggttatgaactcgcgcaccagaggcacggacggctgccctgggcaagattgtttcagccgtccatccaactggcccgacagggctttccggtgggaaaaggcttggctgcagctttggaaaacaagaggacagtgatcgaacaacagcccgtgctgtgtgaagtgttctgtagagaccgaaaagtgcttcgtgagggagaacgacttactttgccacagcttgcagacacatatgagaccctggctatagagggcgcgcaagctttctataatggaagtctgacagcccaaatcgtgaaggacatccaggccgccggtgggattgtgacggcggaggatctgaacaattacagagcggagctgatcgagcacccgttgaatatatctctgggtgacgtagtgctgtacatgccctccgcgcccctcagcggtcccgttctcgctcttatattaaacatacttaaagggtacaacttcagtcgggagagcgtggagtcaccagagcagaagggcctgacataccataggatcgtagaggctttccggttcgcatacgccaagagaactctgctcggcgaccccaagttcgtggacgtaactgaggtggtaagaaatatgacctctgagttcttcgccgcccaattgcgagctcaaattagcgatgacaccacacaccccatcagctattataagcccgagttttacacgccggacgacggcgggaccgcccatctttccgtcgtggcggaagacggctctgcagtctcggccacgtccacaattaacctgtacttcggaagcaaggtgaggtcccctgtcagcgggatccttttcaataacgagatggatgacttctcatccccttccatcacaaacgagttcggcgtcccgccctctccagccaatttcatccagcctgggaaacagccactgtcttcaatgtgtccaaccatcatggtgggtcaggacggttag

SEQ ID NO: 188897 - DNA, 243 bp, synthetic construct
  misc_feature 1..243: note = Description of Artificial Sequence: Synthetic coding sequence
  source 1..243: mol_type = other DNA
atgaagaagaagctggtggtgctgggcctgctggccgtggtgctggttctggtgatcgtcgggttatgcctgtggctgccttcagccagcaaggagccggacaaccacgtatatactagagccgccgttgctgccgatgcaaagcagtgtagcaaaattggtcgcgacgcactgcgtgacggcgggagtgccgtggatgccgctattgcggccctgctgtgcgtgggtttaatgaatgcctag

SEQ ID NO: 188898 - DNA, 525 bp, synthetic construct
  misc_feature 1..525: note = Description of Artificial Sequence: Synthetic coding sequence
  source 1..525: mol_type = other DNA
atgaagaagaagctggtggtgctgggcctgctggccgtggtgctggttctcgttatcgtggggctatgcctgtggttaccttccgctagcaaagagcctgacaaccacgtctatacccgcgcagcagtagcggccgatgctaaacaatgctcgaaaatcggacgagacgccctgagggacggcggctcggccgtggatgctgccattgctgcactcctgtgcgttgggttgatgaacgcccactccatgggcattggtggcggcctgtttctcacaatctacaactccacaaccaggaaagcagaggtgataaacgctcgcgaggtggccccccgacttgcctttgccaccatgttcaacagttcagagcaatcccagaagggaggattatccgtcgcggtcccgggcgaaatccgggggtacgagctggcgcaccaacgccacgggcgcctgccctgggcccgcctttttcaacctagcatccagctggctagacagggcttccccgttggcaagggcttatag

SEQ ID NO: 188899 - DNA, 381 bp, synthetic construct
  misc_feature 1..381: note = Description of Artificial Sequence: Synthetic coding sequence
  source 1..381: mol_type = other DNA
atgaagaagaagctggtggtgctgggcctgctggccgtggtgctggtgctagtcattgtagggctgtgcctttggctgccaagcgcttcaaaagagcctgataaccatgtttacacgcgcgctgccgtggcagccgacgccaaacaatgcagtaagatcgggagggacgccctccgagatggaggttctgccgtggacgccgctattgccgcactgctctgcgtgggtctgatgaatgctcacagcatgggcatcggcggaggcctattcttgacaatatataactcaaccacacggaaagctgaagtgattaacgctcgagaggtcgcacccaggttggcttttgcaactatgttcaacagctccgaacagagccaatag

SEQ ID NO: 188900 - DNA, 330 bp, synthetic construct
  misc_feature 1..330: note = Description of Artificial Sequence: Synthetic coding sequence
  source 1..330: mol_type = other DNA
atgaagaagaagctggtggtgctgggcctgctggccgtggtgctggttttggtgattgtaggactgtgtctatggctgccgtctgcgtctaaggaacccgacaatcatgtgtacacaagagctgctgtcgccgccgacgcaaagcagtgctcaaaaataggccgagatgctctgcgagacggcggctctgctgttgatgccgccattgccgcactgctatgtgttggtctgatgaacgcccacagcatggggatcggcggcggactgttcctcaccatttacaattctaccacacggaaggctgaagtgattaatgcacgggaagtgtag

SEQ ID NO: 188901 - DNA, 336 bp, synthetic construct
  misc_feature 1..336: note = Description of Artificial Sequence: Synthetic coding sequence
  source 1..336: mol_type = other DNA
atgaagaagaagctggtggtgctgggcctgctggccgtggtgctggtactggtcatcgtcggattgtgtctctggctgccttccgcttcaaaagagcctgacaaccacgtctacaccagggctgccgtagccgccgacgccaaacaatgcagcaaaataggacgtgacgctcttagagacggaggatccgccgtggatgctgctatagcagctttgctctgcgtagggctgatgaacgcacattcaatgggaataggcgggggtctgttcttaacgatatataatagcaccacgagaaaggccgaagttattaatgctcgggaagttgcaccttag

SEQ ID NO: 188902 - DNA, 114 bp, synthetic construct
  misc_feature 1..114: note = Description of Artificial Sequence: Synthetic coding sequence
  source 1..114: mol_type = other DNA
atgaagaagaagctggtggtgctgggcctgctggccgtggtgctggtgctcgtcattgtgggcctctgtctgtggctcccaagtgcctctaaagaacccgacaaccatgtctag

SEQ ID NO: 188903 - DNA, 207 bp, synthetic construct
  misc_feature 1..207: note = Description of Artificial Sequence: Synthetic coding sequence
  source 1..207: mol_type = other DNA
atgaagaagaagctggtggtgctgggcctgctggccgtggtgctggtgctggtgattgtgggcctatgtctgtggctcccctcagcatctaaagaaccagacaatcatgtctacactcgggcagctgttgcagccgatgctaaacaatgcagcaagatcggccgcgacgcactacgggacggaggatccgcggtggacgccgcatag

SEQ ID NO: 188904 - DNA, 381 bp, synthetic construct
  misc_feature 1..381: note = Description of Artificial Sequence: Synthetic coding sequence
  source 1..381: mol_type = other DNA
atgaagaagaagctggtggtgctgggcctgctggccgtggtgctggtgttggtgattgtgggactttgcctgtggctgccatctgctagcaaggagcctgacaaccacgtctatactagggccgccgtagctgctgatgcaaaacagtgctcaaagattggtcgcgacgctctgcgcgacgggggctccgctgttgacgctgccatcgccgccctgctttgtgtaggccttatgaacgcccactctatggggatcggcggtgggttgtttttaaccatttataacagcaccactcgaaaagctgaggtgattaacgcacgggaagtggcccccagacttgcgttcgccaccatgtttaattcctccgaacaatcacaatag

SEQ ID NO: 188905 - DNA, 351 bp, synthetic construct
  misc_feature 1..351: note = Description of Artificial Sequence: Synthetic coding sequence
  source 1..351: mol_type = other DNA
atgaagaagaagctggtggtgctgggcctgctggccgtggtgctggttttggtgattgtaggactctgtctctggttgccaagcgcgagtaaggagccggataatcacgtgtatactagagctgcggtagcagccgatgcaaagcagtgttctaagatcggtagggatgctttgcgggatgggggaagtgcagtggatgctgccatcgcggcgctcctgtgtgtgggcctgatgaatgctcatagtatggggattggcggcggactgtttctcactatatacaactctacaacaaggaaggcggaggtcataaacgcccgcgaagtagcccctcgactcgccttcgcctag

SEQ ID NO: 188906 - DNA, 384 bp, synthetic construct
  misc_feature 1..384: note = Description of Artificial Sequence: Synthetic coding sequence
  source 1..384: mol_type = other DNA
atgaagaagaagctggtggtgctgggcctgctggccgtggtgctggtgctggtgattgtgggcctttgcctgtggttgccatcggcttctaaagagcccgacaatcacgtgtatactagagcagccgtggcggctgacgccaaacagtgttccaaaattggccgggacgcgctgcgggacggcggctctgcagtggatgcagctatagctgcccttttatgtgttggcctcatgaatgcccactccatgggcatcgggggcggtttgttccttactatctacaattccactaccaggaaagctgaggttattaatgcccgcgaagtggcccctaggctagcattcgcaaccatgtttaacagctccgagcagtcgcaaaaatag

SEQ ID NO: 188907 - DNA, 297 bp, synthetic construct
  misc_feature 1..297: note = Description of Artificial Sequence: Synthetic coding sequence
  source 1..297: mol_type = other DNA
atgaagaagaagctggtggtgctgggcctgctggccgtggtgctggtgttggtcattgttggactgtgtctgtggttgccctcagcgtccaaagaacctgataatcatgtctatacgcgtgctgctgtcgctgctgatgctaagcagtgcagtaagattggtcgggacgctctaagagatggtggatctgctgttgatgctgcgattgcggcattactgtgcgtggggctgatgaatgcacatagcatgggtattgggggcggcctgttccttactatctataactctacaacatag

SEQ ID NO: 188908 - DNA, 93 bp, synthetic construct
  misc_feature 1..93: note = Description of Artificial Sequence: Synthetic coding sequence
  source 1..93: mol_type = other DNA
atgaagaagaagctggtggtgctgggcctgctggccgtggtgctggtgctcgtgatcgtgggattgtgtttgtggttgccgtccgcatcatag

SEQ ID NO: 188909 - DNA, 1710 bp, synthetic construct
  misc_feature 1..1710: note = Description of Artificial Sequence: Synthetic coding sequence
  source 1..1710: mol_type = other DNA
atgaagaagaagctggtggtgctgggcctgctggccgtggtgctggtgctggtgatagtaggcctttgtttgtggctgccgtcggcatctaaggagcctgataaccacgtgtataccagagcagccatggctgctgatgcgaagcaatgcctggagattggacgggacactctgagggacggcggaagcgccgtggacgcggctatagcggcccttctgtgtgttggtctcatgaacgcccatagtatgggcattggagtcggtttattcctcactatatataatagcacaaccaggaaggcagaggtcattaacgccagggaagtcgctccaaggctcgcgtttgcctctatgtttaattcctccgagcagtcacaaaagggtggacttagcgtagctgtaccaggagaaattcggggctacgagcttgcacaccagcgacacggacgccttccttgggcccgcctcttccagcctagcatacagcttgcaaggcagggttttcctgtgggaaaggggctagcagccgtcctggaaaacaaacgtacggtgatcgaacagcagcctgttctgtggtatgtcttttgcagagatcggaaagttctgagagaaggggagcgactgacacttcccaggctagcggacacatacgaaatgttagccattgagggagcccaggcgttctataatggctctcttatggctcagattgtcaaagacatccaagccgcaggcggcattgtgaccgccgaggacctgaacaattatcgggcggagcttattgaacatcctttgaatatttcactgggggacgccgtcctgtatatgccctcagccaggctttcaggtcctgttctggccctcattctcaacattctaaagggttacaacttcagcagagaaagcgttgagacccctgaacagaagggtctaacataccatagaattgtggaagcctttcgcttcgcatacgctaaaagaacactactgggggaccctaagtttgtggatgtaaccgaggtggtcaggaacatgacttcagagttcttcgctgcccagctgagaagccagatcagtgaccacacaactcatcctattagctattacaaacctgagttctacacaccagacgacggaggtaccgctcacctgtctgttgtggcagaggatggatctgctgtgtcggccacatccacgatcaacctctacttcggaagcaaagtgtgttctcccgtgagcggcattttgttcaacaacgagtggactacatccgcccttccagcattcaccaatgagttcggcgcaccaccttctcctgctaacttcattcaaccgggcaagcagcctctgttatccatgtgcctcacaattatggtcggccaggacgggcaggttcgcatggtcgttggggccgctggggggacacagataaccacagatactgccctcgccataatttataatctctggttcggttacgacgtgaaacgggcagtggaagaaccccgtctgcataacaaacttctccccaatgtcaccacagttgagcgcaacatcgaccaggctgttactgccgcgttggagactcgacaccaccatacacagatcgcttcaacctttatcgcggtggtgcaggcaattgttcgcactgcaggcggatgggcagcggccagtgattcccggaagggtggcgaacctgcaggctactag

SEQ ID NO: 188910 - DNA, 1680 bp, synthetic construct
  misc_feature 1..1680: note = Description of Artificial Sequence: Synthetic coding sequence
  source 1..1680: mol_type = other DNA
atgaagaagaagctggtggtgctgggcctgctggccgtggtgctggtccttgtgatcgtagggctctgtttgtggctgccatcagctagcaaggaacctgacaaccatgtgtacacacgggcagccatggctgcagacgccaagcagtgcctcgagatcggacgtgatactctccgagacggagggtccgctgtcgacgccgctattgcggccctactgtgtgttggcttgatgaatgcacatagtatgggcattggggtagggttgtttctgacgatttacaatagcaccacgcgaaaggcggaagtgattaacgcccgcgaggtggctcccagactggctttcgccagcatgttcaattcctccgaacagagccagaagggcggcctcagtgtggctgtacctggagagattagaggctacgaactggcacatcagcggcacggaaggttgccgtgggcaagactattccaaccctccattcagcttgccaggcagggttttccagtgggaaaagggttggctgcagtgctggaaaacaagcgaacagttatcgaacagcagcctgtcttgtggtatgtcttttgccgcgatcggaaagtgctcagggaaggagaacgacttaccttaccacgactggctgatacctatgaaatgctagccattgagggagcacaggccttctacaacgggagcctgatggcccagatcgtgaaggacattcaagccgccggaggtatcgtgactgcagaagatctcaataattatcgagccgagttaatcgaacatccgttaaacatcagcctgggggacgcagttctgtacatgccatccgctcgcttatccggtcctgtgcttgctctgatcctcaatatattgaaggggtataatttcagccgcgagagcgtggagacgccagaacagaagggacttacttatcatagaatcgttgaggccttcaggtttgcatacgcaaagcggacccttctcggcgatcccaagttcgttgatgtaacagaagtggtccggaacatgaccagcgaattttttgctgcccagcttcgcagtcagatctctgaccatactacacaccccatctcttattacaagccagagttctatactcctgatgacggtggcaccgcccatttgtctgtggtggccgaggacgggtctgctgtctctgcgaccagtaccattaacctctacggcatactcttcaacaacgaatggactactagcgctttacccgcatttactaatgagttcggtgctccccccagcccagcaaatttcatccaaccaggtaaacaacccctgctttccatgtgtctgactatcatggtgggccaagacggacaggttagaatggttgtgggggcagctgggggtacgcagataaccacagacacagcactggcgattatttataacttatggttcggctacgatgtgaaaagagcagtggaagaaccaaggctccataacaaattgctgcctaacgtgaccacggtcgagcgaaatatcgatcaggcagtcactgccgcacttgagacaagacaccatcacacccaaattgccagcacttttattgccgtcgtacaggctatagtgcgtaccgccggcggctgggctgccgcctcagacagccgcaaaggcggtgaaccggcagggtactag

SEQ ID NO: 188911 - DNA, 1710 bp, synthetic construct
  misc_feature 1..1710: note = Description of Artificial Sequence: Synthetic coding sequence
  source 1..1710: mol_type = other DNA
atgaagaagaagctggtggtgctgggcctgctggccgtggtgctggtcttggtcatcgtcgggttgtgtctgtggctgccttccgctagcaaagagccagataaccacgtctacacacgtgcagcaatggcagctgatgccaagcagtgcttagagatcgggagggatacacttagagatggcggaagtgccgtggacgccgcaatcgctgctttgctgtgtgtgggtctcatgaacgcacattctatgggcataggagttggcctatttctgactatttacaactcaaccactaggaaggcggaagtgattaacgcccgggaagtcgccccacggctcgccttcgctagtatgttcaactcttccgagcagagccaaaagggcgggctgagtgtggcggtgcctggcgagatccgtgggtacgagttagcccatcagcgtcacggccgcctcccatgggcgaggcttttccaaccatctatccaattggcgagacaagggttcccggttggaaagggactggccgccgtacttgagaacaagaggacagtaatcgagcagcagcctgttctctggtacgttttctgccgcgataggaaggttctcagggagggggagcggttgacactgcctcgtctcgcggacacatatgagatgctggcaatcgaaggggcacaggcattttacaacgggtcacttatggcccagatagtgaaggacattcaagctgctgggggtattgtgactgctgaagacctgaacaattaccgggccgaattgattgagcacccactaaacataagtctcggagatgccgtattgtacatgccttccgcaagattgtcagggcctgtgctggccctgatcctcaatattttaaaggggtacaacttttccagggaaagtgttgagacaccggaacagaagggattgacataccataggatcgtggaggcttttaggtttgcgtacgccaagcggacccttcttggtgatccaaaattcgtcgacgtcactgaagttgtgaggaatatgacttctgaattctttgccgcccagttacgctctcagatctctgatcacaccacccacccaatctcttactacaagcctgaattctacacccccgatgatggcggtacggcacacctgtccgtcgtggcagaggatggtagtgcagtctctgcaacttctactataaacctctatttcggttctaaagtttgttcccctgtgagtggtattctctttaacaatgaatggacaacttctgcgctccccgccttcaccaatgaatttggtgcccctccgagccccgccaattttattcagccagggaaacagcccctgctctcgatgtgcctcaccattatggtgggacaggacgggcaggttagaatggtagttggggccgccggcggtactcagattacaacagacacagcgcttgctattatatataacctgtggtttggatacgacgtgaaaagggcagttgaggagccccgtctgcacaataagctgctgccaaatgttactactgtggagaggaatattgaccaagccgtgaccgccgccctggaaactagacaccaccacacgcagattgcttcaaccttcatcgcggtggtccaggctatcgtgcgcaccgccggaggctgggcagcggcttccgatagtcggaaagggggcgaaccagccggatattag

SEQ ID NO: 188912 - DNA, 1665 bp, synthetic construct
  misc_feature 1..1665: note = Description of Artificial Sequence: Synthetic coding sequence
  source 1..1665: mol_type = other DNA
atggcccggggctacggcgccaccgtgagcctggtgctgctgggcctgggtctggcattggccgtgatagttttagcagtggtgcttagtagacatcaggctccctgtggcccacaggcttttgcccacgccgccgtagctgccgatagtaaggtctgttccgacattggacgcgcaattctgcaacagcagggctctcctgtcgatgcgaccatcgccgccctcgtctgtacatccgtcgtcaatcctcagtccatggggttgggtggcggagtaatattcaccatatacaacgttaccactggggcccagtggatcggagtgccaggcgaattgagaggctatgctgaggctcatagacggcacggccgcctcccctgggcacagctcttccagcctacaattgctctgcttcgaggcggacacgtggttgcccctgtcctgtcgcgcttcctccacaatagcattctacgaccgagcctgcaggcctctactctaagacagctgttctttaacggaaccgagccactccggccccaagacccactcccctggcctgctctggccaccactctggagacagtagccacagaaggggtggaggtcttctacaccggaaggctgggccagatgctggttgaggacattgctaaggaggggagccagttaaccttacaagacttggccaagttccaacctgaagtcgtggacgccctggaggtacctttaggagactatacactgtactctcctccacccccggctgggggcgcgatcctgtcttttattcttaacgtgctccgtggattcaattttagcacagagtccatggctagaccggagggcagagtgaacgtgtatcatcaccttgtagaaacactcaaattcgccaagggccaaagatggcgattgggcgacccacggtcccatcctaagttgcaaaacgcatcccgggacctgctcggggaaacactcgctcagctaatcagacagcaaatcgatggccggggggaccatcagcttagccattacagtctggccgaagcctggggtcacggaacgggcaccagccatgtttccgtgctaggcgaagatggctcggccgtggccgctacgtcaacaatcaacacccccttcggagctatggtgtattctccgcgaacgggcataatcctgaataatgaattgctggacctgtgcgagcgctgtccgagggggtctgggacgaccccttccccagtctctggggatcgagtgggcggggcaccaggacgatgttggccgcccgtgcccggcgagagatccccgtcatctatggtgccaagcatacttatcaataaagcgcaggggtccaagttggtcatcggaggggcgggaggtgagctcatcatcagcgctgtggcacaggccataatgtccaaactgtggctgggattcgatttgcgggctgccatcgccgctcccattcttcacgttaattctaaagggtgtgttgaatatgaaccaaatttttcgcaggaggtgcagaggggtcttcaagacagaggacagaaccagacacagagacctttctttttgaatgtggtccaggcagtctctcaggagggtgcatgcgtgtacgcagttagtgatttgcggaagagcggggaggcagcaggctactag

SEQ ID NO: 188913 - DNA, 1761 bp, synthetic construct
  misc_feature 1..1761: note = Description of Artificial Sequence: Synthetic coding sequence
  source 1..1761: mol_type = other DNA
atggcccggggctacggcgccaccgtgagcctggtgctgctgggcctgggtctggccctagcagtcatcgtgctagccgtggtgctgagcaggcatcaggccccctgtggaccccaggccttcgcccacgccgcagtggctgctgacagcaaggtgtgcagcgacattggccgggcaatcctccagcaacaagggagtccggtagacgccactattgctgctctagtctgcacttctgtggtcaatccccagtccatgggactgggcgggggagtgatttttactatctacaatgtaaccacggggaaggtggaagtcattaatgccagagagactgtccccgccagccatgccccaagtctcctggaccagtgtgctcaggctctgcccctgggaaccggagctcagtggattggagtgcccggagagctacggggatacgctgaagcccacaggcggcacggtaggctcccttgggctcagctattccagcccactatcgccctactgcgcggtgggcatgtcgtggcccccgtgttgagcagattcctgcataacagtatcctgcgcccgtccctacaggcatccacgcttcgccagctcttcttcaatggaactgagcctctgcgcccacaagaccccctgccctggcctgcgctagccacaaccctggagacagtcgcaacggagggagtggaagtgttctatacaggcagactaggccagatgctggtggaagatattgcaaaggaaggctcccagctaacgcttcaggatctcgccaagtttcagcccgaggtggtcgatgcgctcgaggtaccactcggcgactacaccctctattcacctccccccccagccggaggcgcgatcctgagctttatactaaatgtgctgcggggtttcaacttttcaaccgagtcaatggctcgccccgagggacgcgtgaatgtgtatcatcatcttgtcgaaacactcaagttcgctaagggccagagatggagactaggggatcctcgctcccacccaaagctgcagaacgcctccagggacctcctgggagagactctggcccaattgatcaggcagcaaattgacggcagaggcgaccaccagttatcccactactctctggctgaagcgtggggccacggcacaggtacctctcacgtgagcgtgctcggagaggatggttctgctgtggcagcaacatccaccattaatacccctttcggtgccatggtctactctccgcgaactggcattatcctcaataatgagctattggacctgtgcgagagatgcccgcgcggttcgggcactactccatccccagtttctggagatcgtgttgggggggctcccggtcgctgctggccacctgtacccggtgagagaagtccctcctccatggtgccgagcatcttgatcaacaaagcgcagggctccaagctcgtcatcggcggagccggtggtgaactgatcatatctgcagttgcacaggccatcatgtcgaagctgtggcttggcttcgacctccgtgccgcaatcgctgcaccgatcctgcacgtgaactccaaaggatgcgttgagtacgagcccaatttcagtcaggaagttcaaagagggttgcaagaccgaggtcaaaaccagacacagcggccattcttccttaacgtcgtgcaggccgtttctcaggagggtgcatgcgtgtatgccgtgagcgacctcagaaagagtggtgaggcagcaggatattag

SEQ ID NO: 188914 - DNA, 1764 bp, synthetic construct
  misc_feature 1..1764: note = Description of Artificial Sequence: Synthetic coding sequence
  source 1..1764: mol_type = other DNA
atggcccggggctacggcgccaccgtgagcctggtgctgctgggcctcgggctggctctagccgtcatcgtcctcgctgtagtgctgtctagacaccaggccccttgcgggccccaggcctttgcccatgctgctgttgccgcagatagcaaggtctgcagcgacatcggccgggcaattctacaacaacagggaagtccagttgatgccaccatcgcagcactagtgtgcacctccgtcgtgaacccacagagtatgggcctggggggcggggtgatctttactatttataacgtaacgacaggaaaagttgaagtgataaatgcccgcgagactgtgcccgcctcccatgcaccctcacttcttgatcagtgcgctcaggcactgccgctgggcacaggggcccagtggatcggagtccctggcgaattacggggctacgcggaggcccacaggagacacggacgccttccctgggcacagctatttcagcccactattgcacttctcagggggggtcatgtcgttgccccagtgctcagccgatttctgcacaatagcattctgagacccagcctgcaggctagtactttacgtcagttgttttttaacggcaccgagcctctaaggccccaggaccctcttccctggccggcactggctacaacactggagacagttgctactgaaggcgtggaggtgttttataccggacggctcggacagatgctggtggaagacattgccaaagaaggcagccagctgacacttcaggatctggctaagtttcagcctgaggtcgtcgacgcccttgaagttcctcttggcgattacaccctatattcaccgccgccccctgctgggggcgccatcctcagtttcatcctgaatgtcctgcgcgggtttaacttcagcacagagtccatggctcggcccgagggtcgggtaaacgtttaccatcacttggtggagacattgaagttcgccaaagggcaacgctggaggctgggcgaccctcgcagccaccctaagctgcaaaacgcctcccgcgatttgctcggcgagactctggcccagctaattcggcagcaaatcgacgggaggggggatcaccaactgtcccattacagcctggcagaagcttggggacatgggactggcacgagccatgtatctgtcctgggagaggatggatctgcggtggcggccacctctaccataaataccccattcggggccatggtctatagccctcgaacaggtattatcctcaacaacgagctgctggacctgtgtgaacgttgcccaaggggcagcgggacaacaccatcacctgccgtaagcggcgacagagttggtggagcccctgggaggtgttggcctcctgtgccgggcgagagaagcccttctagtatggtgcctagcatcctgatcaacaaggctcagggtagcaaattagtaatagggggcgccgggggagagctgatcatatcagccgtcgctcaggctattatgagtaaattgtggctcggcttcgatctgcgggctgcaattgccgcgcctatcctacatgtgaactccaaggggtgtgtagagtacgaaccaaatttctcccaggaggtgcagcgaggcctacaggatagaggccaaaaccaaacacagcgccctttttttttgaatgtggtgcaggccgtgtcccaagaaggcgcttgcgtttatgccgtttcagacttacggaaaagcggcgaggcagccggctactag

SEQ ID NO: 188915 - DNA, 1533 bp, synthetic construct
  misc_feature 1..1533: note = Description of Artificial Sequence: Synthetic coding sequence
  source 1..1533: mol_type = other DNA
atggcccggggctacggcgccaccgtgagcctggtgctgctgggcctgggtctggccctggccgtgattgtgctggccgtggtgcttagcagacaccaagccccctgcgggccccaggctttcgcccacgccgccgtcgcagcagatagcaaagtctgtagcgacataggcagaggaccagtggaccgaggagctagaggcgcgccttggctgtgccggggaccccctcccccatggccgcccgccctaggtgccgctgtaccggctcatcacagagctgcccctaggggagcctgcggggggccgtgtccccagccttttccagcacagcaacacccggccgcattccttgctggggttaaccccgcccttttttttaacggcacagaaccactgcgtccccaagatccattaccttggcccgcccttgcaactacattggagactgttgcaaccgaaggggttgaggttttttataccggcaggctgggccagatgttggtggaggacattgcaaaagagggctcgcagctgactctgcaggatctggctaagttccagccagaagtagtcgatgctttggaggtcccgctgggcgactacactttgtactcccctccacctcctgcaggaggagccattctttccttcatcctgaacgtgctgcgcggtttcaactttagcacggagtccatggccagacctgagggtagagtgaatgtttatcatcacttagtggagactctcaaattcgcgaagggccagaggtggcggctcggagatcctcggtcccacccgaaattacaaaatgcaagcagggatcttctcggcgaaacattggctcaacttattaggcagcagatcgacggtaggggtgaccaccaattatcacattattcgctggctgaagcctgggggcacggcaccgggacatcacacgtcagtgtcctcggagaagacggatccgctgtagccgcgacttccactattaatactccgttcggcgcaatggtgtatagtccgaggaccggcattattctgaataacgagttgctcgatttatgcgagcgctgccccaggggttccggaacaacgccaagcccagccgtcagcggtgacagggttgggggggcccctgggagatgctggccccccgtgcctggagaacgctcgccctccagcatggtgccctcaatcctgattaataaggcccaagggtcaaagctcgtgattggtggggccggcggtgagttgattattagcgctgtcgcacaggccatcatgagcaagctgtggctgggatttgatttaagggccgccatagccgctcccatccttcatgttaatagcaaaggctgcgtggagtacgaaccaaacttttcccaggaagttcaaagaggcctgcaagatagaggacagaaccagacccagcgccctttttttctgaacgtcgtgcaagccgtgagtcaggaaggtgcttgcgtgtacgccgttagcgatctaaggaagtcaggagaagcggccgggtattag

SEQ ID NO: 188916 - DNA, 1506 bp, synthetic construct
  misc_feature 1..1506: note = Description of Artificial Sequence: Synthetic coding sequence
  source 1..1506: mol_type = other DNA
atgggcctgggcggcggcgtgatcttcaccatctacaacgtgaccactggaaaggttgaggtaattaatgcacgtgagaccgtgccggcctcccatgcaccgagcctcctggaccagtgtgcgcaagctctccccctcggcaccggggctcagtggatcggagtaccgggggaactcaggggttatgcagaagctcatcggagacatggccggctcccatgggcccagcttttccagccaaccatcgccctgcttagaggtggacacgtggtcgccccggtgctgtcccggttccttcataactctatcctccgcccgtctcttcaggcgtctacattaagacagctgtttttcaacggcaccgagccattaagaccccaagatcccctgccttggcctgccctcgcaaccacgctggagaccgttgcgacagaaggggtggaggttttctacactggcaggctcggtcagatgctggttgaggatatcgccaaagagggttcacagctgaccctgcaagacctcgccaagtttcagccggaagtggtagatgcgctagaggtcccgctcggagactacaccttatactcccccccgccacccgccggcggagctattttgtcgttcatcctcaacgttctgcgagggttcaactttagtactgaatccatggcccgcccggagggtcgtgtaaacgtttatcaccacctggtggagaccctcaaattcgcaaaaggtcaacgctggaggttgggagacccgcggagccatccaaagctgcagaatgctagcagggacctgctgggcgagacactcgcccagctgatacgccagcagattgatgggcggggtgaccaccaactaagtcattatagcctggctgaagcttggggacacggcactggcacaagtcacgtttccgtcctgggcgaggacgggtccgcagtggccgccacttcaactataaatacaccttttggcgctatggtctactctccacggactgggattatactgaacaacgaactgctggacttgtgtgagcggtgtcctagaggaagcggcacgacgccttcccctgttagtggagatcgagtgggtggggcccctggaagatgctggcccccggtgccgggcgagcggagcccgagttcaatggtgccttccatacttattaataaagcccagggcagtaagctggtaattggaggcgccggaggcgaacttattatctcagctgtcgctcaggcgatcatgtcaaagctatggctgggcttcgatctgagagccgccatcgcagcaccaatcctgcacgtcaactctaagggatgcgtggaatacgaacccaatttttcacaggaggtgcagcggggcctgcaagaccgcggccagaatcagacccagaggccattctttctgaatgttgtgcaagcagtcagccaggaaggcgcgtgcgtgtacgctgtatccgatctgcggaaatccggagaggccgccggttactag

SEQ ID NO: 188917 - DNA, 1386 bp, synthetic construct
  misc_feature 1..1386: note = Description of Artificial Sequence: Synthetic coding sequence
  source 1..1386: mol_type = other DNA
atggagcgggccgaggagcccgtggtgtaccagaagctgctgccctgggagccgtctctggagtcagaagaagaagtggaggaggaggagacctccgaggctctggtgctgaatccccggcgccatcaggactcaagtaggaataaggctggcggactccctgggacttgggctagggtggtggccgccctcttgctgttggcagtcggctgttccctggctgtgaggcagttgcagaaccaaggccgctcgacagggtcgcttggctctgtcgcaccaccccctgggggccatagccacgggcctggagtctaccaccacggcgcaattatctccccagccggggctatgttctggggactcttccacgactcgtccagtggcaactctactgctttgaccagtggcccggctcaaactctcgctcctgggcttggccttcctgccgcactgcctacattgcatcttctgcatgctagattcggtcgactcccctggcctaggttgctagtaggcccaactactcttgcacaggagggcttcctggttgacacccctcttgctagagccctggtggccagagggactgaaggcctctgtcctttgctgtgccacgctgatggaacacctctaggagccggcgcccgggcaaccaaccctcagctggctgccgtcttgcggtctgccgcgttagcccccacgtccgacctcgcaggcgatgccctcttgagtctgttggctggggatctaggagtggaggtacccagcgccgtgcctagaccaacactggagccagcagagcaactcccagtccctcagggcatcctcttcactaccccttctcccagcgctgggcctgaacttctggctttattggaggccgccctgagaagcggggcgcctattcccgatccatgtccgcccttcctgcagacggcagtgtccccagaaagcagcgctctggctgccgtggacagttctggtagcgtcctgctgctgaccagttcactgaattgtagtttcggctccgctcacctgagtccatccacgggggtgctgctttcgaacttagtcgccaaatccacaacttcagcttgggcctgcccactgattctgagaggctcactggacgataccgaggcggatgtactcggcctggttgcctctgggacccccgatgtagctagggctatgacgcacaccttgttaagacacttggcggctagaccaccaactcaggcccagcaccaacaccagggacagcaggagcctacagaacatcccagcacgtgtggccagggaactctcctgcaagtagcggcacataccgagcacgctcatgtgagctcagtaccgcacgcttgctgcccattccagggcttttag

SEQ ID NO: 188918 - DNA, 1482 bp, synthetic construct
  misc_feature 1..1482: note = Description of Artificial Sequence: Synthetic coding sequence
  source 1..1482: mol_type = other DNA
atggagcgggccgaggagcccgtggtgtaccagaagctgctgccctgggagccttcgctcgaatctgaggaggaggtggaagaggaggagacaagcgaggctctggtactgaatcctcggcgtcaccaggatagttcccgaaacaaggcgggtggcttaccaggcacctgggcccgcgtggtggcagcactgttgctgctggccgtgggctgctccctcgccgtgcgccagctgcaaaatcagggacgctccacaggctcactgggcagtgtagccccgcctcctggtggtcatagccatggtcccggcgtatatcatcacggagccattatttcccccgcaggcagagaactcctggttgcagggggaaatgtggtggatgcaggggtgggagcagcactctgtttggccgtcgtccatcctcacgctaccgggctgggagctatgttttggggtctgttccatgattccagcagtggtaattcgactgccctcacaagcggacctgcccagacgctggcacctggtctcgggctgcctgcagctctgccaacgctccatctgctccacgcacgattcgggagattaccctggcccagactgctggttggtcccacaacactcgcccaggaaggcttccttgtggatacccccctggcaagggccttagttgcaagaggtacagagggactctgcccgctactctgtcacgccgatggcactcccctcggagctggtgcgagagcgaccaatccgcaactggccgcagtactgcggtctgcagcgctcgccccaacatccgatctggcaggagatgccctgcttagtctgctagcaggggacctcggcgtcgaggtgccctccgctgtcccccggcccaccctggaacccgctgaacagctgcctgtaccccaaggcatccttttcaccaccccctcaccaagcgctggccctgaactgctggcactcctggaagccgctcttagatctggtgctccaattccagatccctgtccaccattcctgcaaacggccgtgtcaccagagtcaagtgcgctggccgccgttgatagcagcggcagcgtgctgctcctgactagcagcctgaattgcagcttcggctccgctcacctgtctccttctactggggtactgcttagtaatctggtcgccaaatcgacaacctctgcttgggcatgcccattgattctccgaggaagtcttgacgacaccgaggctgatgtgcttgggctggtggcctcaggcacaccagacgtggctagggccatgacgcatacgttgttacgccatttagccgctaggccccccacccaagctcagcatcagcaccaaggccagcaggagccaacagagcatccgtcaacctgcggccagggaacgctgttgcaagtggcggcccacactgagcacgcacacgtttccagtgtgccccacgcgtgttgtccgttccaaggattctag

SEQ ID NO: 188919 - DNA, 1038 bp, synthetic construct
  misc_feature 1..1038: note = Description of Artificial Sequence: Synthetic coding sequence
  source 1..1038: mol_type = other DNA
atgttctggggcctgttccacgacagcagcagcggcaacagcaccgcccttacttcaggccctgcacaaactctcgcccccggactcggcctgccagccgccctgccaacactgcacctcctgcacgcgcgtttcggacgcctgccctggccccgtcttctcgtaggacctactacccttgctcaggaaggctttctggtggatactcccctcgctcgggccctggtagcccgcggtactgaggggctgtgtccactgctctgccacgccgatggtacccctctcggcgcaggagctcgggccacaaaccctcagctcgccgcggtgctgcgctcagctgctctggctccgacgagcgacctggccggcgatgcactgctttctctgctggccggtgacctgggtgtggaggtcccgtcagccgtgccaagacccaccctcgaacctgccgaacagctgcccgtaccccagggaatccttttcaccacccccagcccgtcagccggccctgaattactggctctgctggaagcagcactgagatcaggcgcccccatcccggacccatgcccgcccttcctgcagaccgctgtctctccagagtccagcgccctggctgcagtggactcatcgggatctgtcctgctcctgacatcaagcctgaactgttccttcggttcggctcacctatccccttccacgggggtgctcttaagtaacttggttgcaaagtccacaacgtctgcctgggcatgtccccttattctgcgaggttctctcgatgacacagaggccgacgtgctgggactggtggcgagcggtacgccagatgtggcacgggctatgactcacacacttctcaggcacttggcagcccggcctcctacgcaagcccaacaccagcaccaggggcagcaggagcccaccgagcacccctccacatgcggacagggaaccctgctgcaggtggccgcgcatacggaacacgctcacgtctcaagtgtcccacatgcatgttgcccctttcagggattctag

SEQ ID NO: 188920 - DNA, 1482 bp, synthetic construct
  misc_feature 1..1482: note = Description of Artificial Sequence: Synthetic coding sequence
  source 1..1482: mol_type = other DNA
atggagcgggccgaggagcccgtggtgtaccagaagctgctgccctgggagccatctctggaaagcgaagaggaggttgaggaggaggagaccagcgaagcccttgttctcaatcctagaaggcatcaggatagctctcgcaacaaggcaggaggcctgccaggcacctgggctcgcgttgtggccgccctgctcttgctggccgtgggctgctccctagcagtccgacagttacaaaaccaagggagaagcaccgggagcctaggatcagttgcccccccacctggcgggcacagccatggtcctggtgtgtaccaccatggcgccatcattagccctgccgggcgcgagttactagttgcaggcggcaacgtcgtggatgccggggtcggcgctgccctgtgtctcgctgttgttcacccccatgccactgggctcggtgcaatgttttggggtctttttcatgactcctctagcggaaactcaacagctctcacatccggccccgcccagacactggcacctggcctggggctccctgctgccctcccgactcttcacttgttgcatgctcggtttggcaggcttccatggcctcgccttctagtcggcccgaccaccctggcacaagagggattccttgtcgacacccccctggctagggctctagtagctcgcgggaccgaaggtttgtgccccctgttatgtcacgccgacggcaccccattgggagcaggggcccgagcgacaaaccctcagctggcggcagtgctgaggagcgcagctctcgctcccacttcggatctcgccggcgacgctctactctccttgttagcaggtgacctcggcgtggaagtaccgtccgcagtgccacggcccaccctggaacctgccgaacagctgccggtacctcagggcatactattcacgacccctagcccctccgctggtcccgaactccttgccttacttgaggctgcactccggtccggagcccccattcccgatccatgcccgccattccttcagactgctgtgagccctgaatcctctgccctcgctgccgttgattcttcagggtcggtgctgctcttgacctccagcctcaactgctctttcggctctgctcatctcagcccatcaactggggtacttctcagcaacctggtggccaagtcaacgacctctgcgtgggcttgtccattgatcctgagaggctccctggacgatacggaagcagacgttctggggcttgtagcgtcaggtaccccggatgtggccagggcaatgactcacactctcttgaggcatctggcagcacggccgcccacacaggcccagcatcaacaccagggccaacaggagccaaccgaacatccttcaacctgtggtcagggtaccctgctccaggtggcagcccatacggaacatgctcatgtatcctccgtacctcatgcttgttgtccatttcagggtttttag

SEQ ID NO: 188921 - DNA, 678 bp, synthetic construct
  misc_feature 1..678: note = Description of Artificial Sequence: Synthetic coding sequence
  source 1..678: mol_type = other DNA
atgaccagcgagttcttcagcgcccagctgcgggcccagatcagcgatgatactacccatccaataagttattataaaccagaattttacatgcccgatgacggaggtaccgctcacctgtccgtcgtcgcggaggacgggtccgccgtttccgctacatccacaattaacctttacttcggtagcaaggtcaggagccctgttagtgggatacttctgaataatgagatggatgatttttccagcacttccatcaccaacgaattcggtgtacctccatcaccggccaacttcatccaaccagggaagcaaccactgagcagtatgtgccctactattatggtcggccaggacggccaggtgcgaatggtggtcggagcagctgggggaacacagattactatggcaacagcgctcgcaattatatataacctgtggttcgggtatgacgtaaaatgggccgtcgaggagccacggcttcataatcagctgctgcccaacgttacgacggttgagagaaatatcgatcaagaggttaccgccgccttagagaccaggcaccatcatacacaaataacttccacattcattgccgttgtacaggctattgtccgtatggccggcgggtgggcggcggctagcgattccagaaagggtggggaaccggctggctactag

SEQ ID NO: 188922 - DNA, 678 bp, synthetic construct
  misc_feature 1..678: note = Description of Artificial Sequence: Synthetic coding sequence
  source 1..678: mol_type = other DNA
atgaccagcgagttcttcagcgcccagctgcgggcccagatcagcgacgataccacccatccaatttcctattacaaacccgagttctatatgccagatgacggcggaacagctcatctttctgtcgttgccgaggatggaagtgccgtcagcgcaaccagcaccatcaatctatacttcggctccaaggtgaggtctcctgtgtcggggatccttctcaacaacgaaatggatgattttagcagcacatcaattaccaacgaattcggcgtcccgccaagccccgctaatttcattcagcctggcaaacagcctctgtcgagcatgtgcccaaccataatggtggggcaagacggccaggtcagaatggtcgtgggggctgctggtggaacccagattacgatggccacagctttagcgataatctacaatctgtggttcggctatgacgtcaaatgggcggtcgaagaaccacggctgcataaccagttgctgccaaatgtcacaactgtggaaaggaacatcgatcaggaagtcacggccgccctggagactaggcatcaccacacacaaatcacgagcacctttattgcagttgtccaggctatcgtacgtatggccggaggctgggcagctgcctctgactcccggaaaggcggggaaccagccggatattag

SEQ ID NO: 188923 - DNA, 678 bp, synthetic construct
  misc_feature 1..678: note = Description of Artificial Sequence: Synthetic coding sequence
  source 1..678: mol_type = other DNA
atgaccagcgagttcttcagcgcccagctgcgggcccagatcagcgatgatacgacgcaccctatctcgtactataaacctgagttctatatgcccgacgacggcggcactgcacacctaagcgtggttgctgaagacggttcggcagtgagtgccaccagtacaatcaacctctactttggctcgaaggtccggagcccagtttccggcatactacttaataacgagatggatgatttcagctcaacgagtatcacaaatgagtttggcgtgcctccatcaccagcaaacttcattcagcccggaaaacaaccactgagcagcatgtgtccaaccatcatggtcgggcaggacgggcaggtgcggatggtcgtgggcgctgccggcggcacacagatcaccatggccactgcactggcaatcatctacaacctatggttcggatatgatgttaagtgggctgtggaggagccccgcctccacaaccaactcttacccaacgtaacaacggttgaacgaaacatcgaccaggaggttaccgctgcactcgagacacgtcaccaccacactcagattacctcgacctttatcgccgtcgtgcaagcaatcgtgcgtatggctgggggctgggccgcagcaagcgatagcaggaagggaggggaacctgctggttactag

SEQ ID NO: 188924 - DNA, 678 bp, synthetic construct
  misc_feature 1..678: note = Description of Artificial Sequence: Synthetic coding sequence
  source 1..678: mol_type = other DNA
atgaccagcgagttcttcgccgcccagctgcgggcccagatcagcgacgacactacacatccaatcagttattataaaccggagttttatacccccgttgatggcggaaccgcacacttgtctgtagtcgcagaggacggctctgccgtgagcgctactagtactatcaatttatacttcgggtccaaggtaaggtctcccgtttctgaaatcctgttcaatgatgagatggacgatttctctagcccaaacatcaccaacgaattcggggttccgccctctcctgctaattttatccagcccggaaaacagcctctgtcttccatgtgtcctactattatggttggacaggacggacaagtcagaatggtagtgggggccgcgggaggcacccagatcaccacagctaccgccctggccatcatttataacctatggttcgggtacgatgtgaaaagggcggtggaagagcctcgcctgcacaatcagcttctcccaaatgtaaccactgtggagaggaacattgaccaagccgtgactgccgctctggaaactcggcaccatcacacacagattgcctccactttcatcgccgtggttcaggctatagtacggacagccggagggtgggccgccgcaagtgattccaggaaaggcggcgagccagcaggttattag

SEQ ID NO: 188925 - DNA, 657 bp, synthetic construct
  misc_feature 1..657: note = Description of Artificial Sequence: Synthetic coding sequence
  source 1..657: mol_type = other DNA
atgaccagcgagttcttcgccgcccagctgcgggcccagatcagcgatgacaccacccatccaatcagttattataagccagaattctatactccagttgatggggggaccgctcatctgtccgtcgtggcagaggatgggagcgcagtgtcggctacttccacaatcaacttgtactttggaagcaaggtgcgcagcccagtgtccgagattctcttcaacgacgagatggatgacttcagctccccaaacattacaaatgagtttggagtcccaccgtctcccgcaaactttattcagccagggaaacagcccttgtccagtatgtgtcccacaatcatggtgggtcaggatggacagcccccaagccatgccgaccacactcccatgccccaggccataatctataacctgtggttcgggtacgatgtgaagagggccgtggaggaaccaaggctgcacaaccagctcctgcccaacgtcactacagttgaaagaaacattgatcaggcagtcactgcggcactggagacccgccaccaccatacgcaaatcgcgtctacttttatcgccgttgttcaggccatcgtaagaaccgcaggaggctgggcggctgcttccgattccagaaagggaggcgaacctgccgggtattag

SEQ ID NO: 188926 - DNA, 678 bp, synthetic construct
  misc_feature 1..678: note = Description of Artificial Sequence: Synthetic coding sequence
  source 1..678: mol_type = other DNA
atgaccagcgagttcttcgccgcccagctgcggagccagatcagcgaccacaccactcatccaattagctattataagcccgaattttacacccccgacgatggcggaaccgctcatctgtccgttgtcgcagaggacggcagtgccgtcagtgccacctccacaataaatctgtacttcggctccaaagtgtgttctccggtatctggtatcctgtttaataacgaatggactaccagtgccctacccgcattcacaaacgaattcggtgcacccccaagcccagccaacttcatccagcctgggaaacagcctttgctgtcaatgtgccccacaattatggtaggccaagatgggcaggtcagaatggtggtcggcgcagctggcgggactcagattactactgatacagccctggctataatatacaatctttggtttggttacgatgtcaagcgagcagtcgaggagccgcggcttcacaacaaactcctgcccaatgtcaccaccgtcgagagaaacatcgaccaggctgtgaccgctgcgttggagacaaggcaccatcacacacagattgccagcacatttatcgccgtggtccaggccatcgtgcgtactgccgggggttgggccgcagccagcgatagcagaaaagggggcgagcccgctgggtattag

SEQ ID NO: 188927 - DNA, 711 bp, synthetic construct
  misc_feature 1..711: note = Description of Artificial Sequence: Synthetic coding sequence
  source 1..711: mol_type = other DNA
cccgccctgggcagccagcaggtggtgcggaacatgaccagcgagttcttcgccgcccagcttaggagtcagatttccgaccacaccacacaccccatcagttactacaagcctgaattttatacccccgacgacggtggaacagctcacctgagcgttgtggcagaagacggcagtgcagtaagtgctacttccacaataaacctgtattttggaagcaaggtctgctcacccgtcagtggcatattatttaacaacgagtggacaaccagtgccttaccggcgttcaccaacgagtttggcgctcccccttcccccgccaatttcatccaacccgggaagcagccgttactgagtatgtgtcctacaattatggtggggcaggacggtcaggtgcggatggtcgtgggcgcagcaggcgggacgcagatcactaccgacaccgctctcgccatcatttataacctctggtttggctacgacgtcaagagagccgttgaagaacctcgtctgcataataagcttttgccaaacgtcaccacggtggagcggaacattgaccaggctgttaccgcggctttggagacgcggcaccaccacactcagatcgcctccacattcattgctgtagtgcaggcaattgttagaacagccggaggttgggcagccgcatcggacagtaggaaggggggtgagcccgccgggtactag

SEQ ID NO: 188928 - DNA, 675 bp, synthetic construct
  misc_feature 1..675: note = Description of Artificial Sequence: Synthetic coding sequence
  source 1..675: mol_type = other DNA
atggtggccgccgtgctgctgggcctgagctggctgtgcagccccctcggtgccctggtgctagacttcaacaatatcaggtctagcgctgatttacatggggcccggaagggctctcaatgtctttcagatacagattgtaatacgcgaaaattctgcttacagccccgggatgagaaacccttctgtgccacatgccggggactccgtcggcgctgccagagggatgccatgtgctgccccggtacactgtgcgtgaacgacgtatgtactacaatggaagatgctacacccatcctggaacgccaactggatgaacaggacgggacccacgcagaagggacaaccggccacccagtgcaggagaaccagcccaagcggaaaccctctatcaaaaaatcacagggcagaaaaggtcaagagggcgagtcttgcttgaggaccttcgactgtggacctgggctgtgttgcgccagacacttctggaccaaaatttgtaaaccagttcttcttgaaggtcaggtatgttctagaagggggcacaaggacaccgctcaggctccagagatcttccagcgctgcgattgtggccctggcctgctgtgtcggtcccagttaaccagcaaccgccagcatgcccgcctccgggtgtgtcagaagatagaaaagctatag

SEQ ID NO: 188929 - DNA, 873 bp, synthetic construct
  misc_feature 1..873: note = Description of Artificial Sequence: Synthetic coding sequence
  source 1..873: mol_type = other DNA
atgcggctgaacagcaccggcgaggtgcccgtgctgatccacggcgaaaacattatttgtgaagccacccagatcatcgactatcttgagcagaccttcctagacgagagaacccctcggcttatgcctgacaaggagagcatgtattaccctagggtgcagcattaccgcgagttgctcgatagtttgccaatggacgcgtatacacacgggtgcattctgcaccccgagcttaccgttgatagcatgatccctgcgtatgctactacccggattaggagtcagattgggaacaccgaatctgaactgaagaagctcgctgaggagaatcctgatctgcaagaagcatatatcgccaagcagaaacgacttaagtccaaactcttagaccacgataacgtgaagtacctcaaaaagatactcgacgaactggagaaggtgcttgatcaggttgagactgagctgcagcgcaggaacgaggagacgcccgaggaagggcagcaaccctggctatgtggtgagtcgttcaccctcgccgatgtctcactagcggttacactgcacagacttaaatttctcggcttcgcaaggcgtaactggggaaatggcaaacggccaaacttggaaacctattacgagcgcgtactcaaacgcaaaacttttaataaagttttaggccacgtaaacaacatcctgatatcggcagtcctgcctacggcctttagggtggcgaagaagcgcgcccctaaagtcctcggaactactctcgtcgtgggtctccttgcaggtgtgggttactttgcctttatgctgtttaggaagagattgggtagcatgatactcgcgttcagaccaaggcctaattatttttag

SEQ ID NO: 188930 - DNA, 1632 bp, synthetic construct
  misc_feature 1..1632: note = Description of Artificial Sequence: Synthetic coding sequence
  source 1..1632: mol_type = other DNA
atgggcgactggaacctgctgggcggcatcctggaggaggtgcactctcacagcaccattgttggtaagatatggctgactattttgttcattttccgcatgttagtgttgagggttgccgctgaggacgtctgggacgacgaacaatccgcctttgcctgtaatacccgccagccaggatgtaataatatctgctacgacgacgccttcccgatcagcctcatcagattctgggtccttcaaatcatttttgtctccagcccgtccttggtctacatgggccatgcgctgtacaggctacgggcgtttgaaaaggataggcaacgaaagaagagccatcttcgtgcccagatggaaaatcctgatctcgatttagaagaacagcagaggattgatagggagcttcgacggctcgaagagcaaaaacgaatccacaaagtaccattgaaggggtgcttacttagaacgtatgtcctacatatactcacccgctctgtcttggaagtgggatttatgattgggcagtacatcctgtatggttttcagatgcacccattatataagtgcactcagcccccatgtccaaatgctgtggattgcttcgtgtctcggccaactgaaaagactatctttatgctgtttatgcacagcatcgccgcaatctccctcctgctgaatatcttggaaatatttcacttgggtattaggaaaatcatgcgcacgctctacaagaaatcaagctccgagggcatcgaggacgagaccggccccccatttcacttgaaaaaatactcagtagctcagcagtgtatgatctgcagtagtttgccagagcgcatttcacccctgcaggccaataaccaacagcaagtcatccgagttaacgttcccaagtcaaagacaatgtggcagatccctcagcccaggcaactggaagtggaccccagcaatggcaagaaagactggagtgagaaggaccaacattctgggcagctgcacgtgcacagcccctgcccctgggccggctcagccggtaaccaacatttgggccagcagtcggatcatagctcattcggactacagaatactatgagtcagtcctggctcggtacaaccacagccccccgaaactgcccatcattcgcggtgggcacatgggagcaaagtcaggacccagaacctagcggcgaacctctgactgacctgcactcacactgtagagattccgagggaagcatgagggaatcgggggtgtggattgaccgcagcaggcccggctccaggaaagcgagcttcctctcaaggctcctatccgagaagcgacaccttcattcagacagtggcagctccggatcgagaaactcgtcttgtctcgatttcccgcactgggagaactctccgtcacctttgccttcagtgactgggcatcgcacttcgatggttaggcaggcagctttaccaattatggagctgtcgcaggagctgtttcacagcggctgctttttattccccttctttctccccggtgtctgcatgtatgtgtgtgtggacagagaagctgatggcgggggcgattacctctggcgtgacaaaattattcatagtatccatagcgtgaaattcaacagttag

SEQ ID NO: 188931 - DNA, 1308 bp, synthetic construct
  misc_feature 1..1308: note = Description of Artificial Sequence: Synthetic coding sequence
  source 1..1308: mol_type = other DNA
atgggcgactggagcttcctgggccggctgctggagaacgcccaggaacactcgactgtcattggtaaggtttggctgacagtattattcatattccgcatcctcgtgctcggcgccgcagctgaggacgtctggggagatgaacagagcgacttcacctgtaacacccagcagccggggtgcgagaacgtgtgctatgacagggcattcccgatctcccatatccgattttgggctctccaaatcatcttcgtgtcaacccctaccctcatctacctgggacacgtcctgcacatcgtgcggatggaagaaaagaagaaggaacgcgaggaggaggagcagctgaagcgtgaatccccctcaccaaaagaaccaccccaggataatccttcctctcgcgatgacagagggagggtgagaatggccggtgcgcttctgcggacgtatgtgtttaacattatattcaagaccctgttcgaggtggggttcatcgcggggcagtattttctgtatggctttgagctgaaacctctctaccgctgcgatcgctggccatgcccaaatacagtagattgtttcatttctagacccaccgagaagacgatcttcatcatttttatgctggcagtagcttgcgcatctctcctgttaaatatgctggagatctaccacctagggtggaagaagctgaagcagggcgtgacaagcagactcgggcccgacgcctcagaggctcctttgggtaccgccgacccgcctcccttacctccatccagtcggccgccggccgtcgccatcgggttccctccgtattacgctcataccgccgcaccccttggacaggccagagctgtgggatacccaggcgcacccccgcctgccgcagacttcaagctccttgccctgacagaagcacggggcaagggacaaagtgccaagttgtacaatggacatcaccatcttctcatgacagagcaaaattgggctaatcaggccgctgagcgtcagccccccgcacttaaggcataccccgcggcaagtacaccagccgctccaagtccagtcggcagctcatcccccccactggctcacgaagccgaagcgggggccgcccctctgctcctggatgggtccggatcatccctagaaggtagcgccctcgcaggaacccccgaggaggaggaacaggctgttactacagccgcccagatgcatcagcctccattgccacttggagaccccgggagagcatctaaagcctcgagggcttcatccggcagagctagacctgaggacttagccatatag

SEQ ID NO: 188932 - DNA, 1002 bp, synthetic construct
  misc_feature 1..1002: note = Description of Artificial Sequence: Synthetic coding sequence
  source 1..1002: mol_type = other DNA
atgggcgactggggcttcctggagaagctgctggaccaggtgcaggagcatagcacagtggtaggcaaaatttggctgacagtgctgttcatcttccgtattcttatcctcggtctggccggcgagtcagtttggggagacgaacagtcagactttgaatgcaataccgcccagcctgggtgcaccaatgtctgttatgaccaggccttcccgatctctcacatccgctactgggttctgcagttcctgttcgtttcgaccccaacacttgtgtacctgggccatgtgatttacttgtcacggagggaggaacgactgcggcaaaaagaaggcgaacttagggctttgccagcaaaagacccacaagtggagagggcactggcggctgtggagaggcagatggcaaagatcagcgtggcggaggatgggcgacttaggatcaggggcgccttgatgggaacctatgtagcttcagtcctctgcaaatccgtcctagaggcaggcttcttgtatggtcaatggagattgtacgggtggaccatggagcctgtgttcgtgtgccaacgagccccatgtccttatctggtcgactgctttgtctctcgcccgacagaaaagaccatctttatcatttttatgctcgtggtgggtttgatatcactggtcctgaacctgcttgaactggttcacctcctttgtcggtgcttgagccggggaatgcgggcgaggcagggtcaggacgctcctcctacccagggtacatcttccgatccctacacagaccaggtgtttttttatctgcctgttggccagggcccatcctcgcccccgtgccctacatacaatggtctgtcatccagcgagcagaattgggccaatttaacgactgaagagaggctagccagttcaaggccccctctctttttagatccacccccccagaatggacagaaaccaccctcccgcccttcgtcatctgccagcaagaagcagtatgtatag

SEQ ID NO: 188933 - DNA, 879 bp, synthetic construct
  misc_feature 1..879: note = Description of Artificial Sequence: Synthetic coding sequence
  source 1..879: mol_type = other DNA
atgggcgactggggcttcctggagaagctgctggaccaggtgcaggagcactcaacggtggtgggcaagatttggctgaccgtcctgttcatcttccgcatcctgatccttggtctggcaggagagtccgtgtggggggacgagcagagcgacttcgaatgcaatactgcacagcctggctgcacaaacgtgtgttacgaccaggctttcccaatttcccacattcggtattgggtgctgcagtttctttttgtatccactccgaccctcgtctacctgggccacgttatatacttgtcccgacgggaagagaggttgaggcagaaagaaggcgaactcagggctctgccagcaaaggacccacaggtggagcgggcgctggctgccgtggagcgtcagatggctaagatttctgtcgcagaggatgggcgcctgcggataagaggtgccttgatgggtacctatgtagcctctgtcttatgtaaatccgtgctggaggctggttttttatacggccagtggagattgtacggttggaccatggagcctgtgttcgtatgtcagcgtgccccctgcccttacttggtggactgttttgtgagccgcccaacagagaagacaatttttattattttcatgctggtggttggactaattagcctggtgctcaatctgttagagctcgtgcacctgttgtgcagatgcttgtcccggggtatgcgggcccggcaagggcaggacgcccctccgacccaggggactagcagtgacccctatactgaccaggtctttttctacctaccagttggacagggaccttcatcacccccatgcccgacatacaacggactgagttctagtgagcaaaattgggcatag

SEQ ID NO: 188934 - DNA, 882 bp, synthetic construct
  misc_feature 1..882: note = Description of Artificial Sequence: Synthetic coding sequence
  source 1..882: mol_type = other DNA
atgggcgactggggcttcctggagaagctgctggaccaggtgcaggagcattctactgttgttggcaaaatctggctgacagtgctctttattttccgaatcctgatcttgggcctcgccggtgaatcagtgtggggagacgagcagtccgatttcgagtgcaacacggcacagcccggctgcacaaacgtgtgctacgatcaggctttccctatcagccatataagatattgggtattgcaattcctgttcgtgtctactccaacactggtataccttggtcacgtgatatacctttcacgcagagaagagcgcctaaggcaaaaggaaggggaactccgggctcttcccgctaaggacccacaagtggaacgtgctctcgccgccgtggaaaggcagatggctaaaatttccgtggccgaggatggtagattgcgtattagaggagcattgatgggaacatacgtagcttctgtgttgtgtaagtctgtactcgaggcaggattcttatatggacagtggcgtttatatgggtggaccatggagccggtgtttgtatgtcagcgcgcaccatgtccctacctggtggactgttttgtctctaggcctactgagaaaaccatcttcatcatctttatgctggtggtgggcttgatttctttagtccttaatttacttgagctggtgcatttgttgtgtcggtgtttgtctcgcggaatgagagcccggcaaggtcaggatgcaccacctacccagggcacaccccagaccctaaccagaactaggagctcttccactagtccttgggcacgcggaccacatcctcaccatgccccccctacaatgggaagtcacccggtttcgagaacagggccgacatag

SEQ ID NO: 188935 - DNA, 1077 bp, synthetic construct
  misc_feature 1..1077: note = Description of Artificial Sequence: Synthetic coding sequence
  source 1..1077: mol_type = other DNA
atgggcgactggagcttcctgggcaacttcctggaggaggtgcacaagcactctacagtggtggggaaggtctggctgacagttttattcatattccgcatgctagttctgggcacggcagccgaatcatcatggggtgatgagcaggctgactttaggtgcgacaccatccagccagggtgtcagaacgtatgttacgatcaggctttcccaatctcccatatccggtattgggtgctgcagataatctttgtgtctactccctctttagtgtatatgggccacgccatgcataccgttcgcatgcaagaaaagcggaaactgagggaggctgagagggcgaaggaggtgagagggagcggcagctatgagtaccctgtagctgagaaggcggagctttcttgttgggaagaaggtaacgggcgcatcgcccttcagggtactttgctgaacacatatgtttgctcgatcctgatcagaaccaccatggaggtggggttcattgtagggcagtatttcatctacggaatctttctgacaaccctgcacgtgtgtaggagatccccctgcccacaccccgttaactgctacgtctccagaccaaccgagaaaaatgtctttattgtattcatgctggctgtcgctgccctgagtctgctgctgagtctggccgagctataccaccttgggtggaagaaaattaggcagcgattcgtgaagccacgtcagcacatggcaaagtgccagctgtctggaccctcggtagggattgtgcagagctgcactccaccccctgacttcaatcagtgcctggagaacggacccggtggcaaattctttaaccctttcagcaacaatatggcttctcagcaaaacaccgacaaccttgtgaccgaacaggttcgaggccaggaacagacgccaggcgaagggttcattcaggtacgatatggccagaagcccgaagtacccaacggagtgtctccgggccataggcttccacatggatatcatagcgacaagcgccgcttgagtaaggcctcgtccaaagcccgctcggatgatttaagtgtgtag

SEQ ID NO: 188936 - DNA, 1077 bp, synthetic construct
  misc_feature 1..1077: note = Description of Artificial Sequence: Synthetic coding sequence
  source 1..1077: mol_type = other DNA
atgggcgactggagcttcctgggcaacttcctggaggaggtgcacaagcatagcaccgttgttggcaaagtctggctaacggtgttatttatatttcggatgcttgtgctgggtacagcagcagagtcctcctggggagacgagcaggccgattttagatgcgacactatacagccagggtgccaaaacgtttgctacgatcaggccttccctatatcacacattagatattgggtcctacaaattattttcgtttccactccatctctggtctacatgggccacgcaatgcatactgtgcggatgcaagaaaagcggaagctgcgggaggccgaacgagcaaaggaagttagagggagtggctcctacgagtaccccgtggctgagaaagccgaactgtcctgctgggaggagggcaacggccgaatcgcccttcaggggaccttactgaatacatatgtgtgctcaatcctgatcaggactaccatggaggtggggttcatcgtgggacagtatttcatctatgggattttccttacaacactgcatgtctgtcgccgatccccttgtccacaccccgtcaattgttatgtcagcagacccactgaaaagaatgtgtttatcgtgttcatgttggcggtggcagctctgagtctcctcctgagtctggcggaactgtaccacctgggttggaagaagatccgacagaggtttgtgaagccgcgacaacatatggcaaagtgtcagctaagtggcccctcagtcggtatcgtgcaatcatgcacaccaccacccgactttaaccagtgcctagagaatggaccgggaggtaagtttttcaatcctttcagcaataacatggcctcacagcagaacacagacaatttggttaccgagcaggttcgagggcaagaacagacccccggggaaggcttcattcaggtgcgatatgggcagaaaccagaagtcccaaatggcgtgtctcctggtcaccgcctgccgcacgggtaccattccgacaaaaggcgcctcagcaaggcgtcatctaaggcaagatccgacgatctgtccgtttag

SEQ ID NO: 188937 - DNA, 759 bp, synthetic construct
  misc_feature 1..759: note = Description of Artificial Sequence: Synthetic coding sequence
  source 1..759: mol_type = other DNA
atgggcgactggagcttcctgggcaacttcctggaggaggtgcacaagcatagcactgtggtgggaaaggtgtggcttacagtccttttcatctttcgaatgctggttttagggaccgccgctgaaagctcctggggtgatgaacaagccgacttcaggtgcgacacgattcaaccggggtgccagaatgtctgttacgaccaggccttccccatatcacacatcaggtattgggtcctacaaattatcttcgtatccacaccatcgctggtttacatgggtcatgctatgcacacagttcggatgcaggaaaagaggaaacttcgcgaggcagaaagagctaaagaggttagaggaagcggctcatacgaataccctgtcgctgagaaggccgagctatcctgttgggaagaaggcaacggacggattgccctccaggggacgctgttgaacacctatgtctgtagtatcctgatcaggacaacgatggaagtgggctttattgttggacagtattttatctacggcatctttctcacaaccctgcatgtgtgtaggaggagtccatgtccgcatcctgttaactgctacgtgtctagacctacggagaagaatgtattcattgtgttcatgctcgctgtggccgcactctccctcttgctctcactagccgagctgtatcaccttggttggaagaagatccgccagcgctttgttaagcctcggcagcatatggccaagtgccagttatcagggtag

SEQ ID NO: 188938 - DNA, 1302 bp, synthetic construct
  misc_feature 1..1302: note = Description of Artificial Sequence: Synthetic coding sequence
  source 1..1302: mol_type = other DNA
atgggcgactggagcttcctgggcaacatcctggaggaggtgaacgagcacagcacggtgatcgggcgggtttggctgaccgtgctgttcatctttcgaattctcatactcgggacagcggctgagttcgtttggggagacgagcaaagtgacttcgtttgcaacacacaacagcctggatgtgaaaacgtttgttatgatgaggctttccctatctctcacatcagactgtgggtgctgcagattattttcgtgtctaccccgtcccttatgtatgtcggccatgctgtccactatgtgagaatggaggaaaagaggaagagccgcgaggctgaagaactgggtcagcaggctgggaccaacggcggtcccgatcaaggcagcgtaaagaagagcagtggcagtaaaggcaccaagaagtttcgcctggaggggactctgttacgtacttatatctgccacatcatttttaagactctcttcgaagtgggatttatcgtggggcactattttctgtacggatttcgcatcctccctctctacagatgctccaggtggccttgccctaatgtcgtcgactgctttgtgagccgacccacagagaagacaattttcatcctgtttatgttaagtgtggcatcagtgagcctcttcctcaacgtgatggagctcggtcacctgggcctgaagggcattcgatcggcactgaaacgcccagtggagcagcccttgggcgaaatcccggaaaaatctctacactccattgcggtgtctagcatccagaaagctaagggctatcaactgctggaagaagaaaagatcgtttcccactattttccactgacagaggtcggcatggtggaaacctctcctctgcccgccaagccattcaatcagttcgaggagaaaattagtactggacctcttggggacctcagcagaggctaccaggagactctgccatcttatgcccaggttggcgcgcaggaggtggaaggagaagggccgcccgccgaggagggagcagaacccgaagtgggagagaaaaaagaggaggctgaaaggctcaccacggaggaacaggagaaggttgccgtgccagaaggcgagaaggtggaaacacccggcgtcgacaaagagggagaaaaagaagaacctcaatctgaaaaagtctccaaacaggggctgcctgctgagaagacgccttcattgtgtcccgaactgacaactgacgatgcccgtcctctttctcggctgagcaaggccagcagccgcgctcgctcggacgacctcacagtctag

SEQ ID NO: 188939 - DNA, 1302 bp, synthetic construct
  misc_feature 1..1302: note = Description of Artificial Sequence: Synthetic coding sequence
  source 1..1302: mol_type = other DNA
atgggcgactggagcttcctgggcaacatcctggaggaggtgaacgagcattcgactgtgatcggccgcgtgtggctgaccgtcttgtttatcttccgcatactaatcctgggaaccgccgccgagtttgtgtggggcgatgaacagtccgacttcgtgtgtaatacacagcagccaggttgcgaaaatgtctgttacgatgaggcttttcccatcagccatattaggttgtgggtgctccagattattttcgtgagtacacctagtctgatgtatgttggacatgccgtgcactacgttcgaatggaggaaaagaggaagagccgcgaagcagaagaactcgggcaacaagccgggactaatgggggcccggatcagggctcagtgaaaaaatccagcgggtctaagggtaccaagaagttcaggctagaagggaccctcctacgcacctacatttgtcacatcatcttcaagaccctgtttgaagtgggctttatcgtgggccactatttcctgtatggcttcaggatccttcccctgtaccgctgttcccggtggccatgccccaacgtcgttgactgttttgtgagccggcccacggaaaaaaccatctttattctcttcatgctttctgtggctagtgtgagcctgttcctcaatgtgatggaattggggcacttaggtcttaagggaattagaagcgccctgaagcgtcccgtggaacaaccgctgggtgaaatcccagaaaaaagcctccactcaatcgccgttagcagtatacagaaggctaaaggatatcaactgttggaggaagagaagatcgtatcacactatttccctctgacagaagttggtatggtcgagactagtccattacccgctaagccattcaatcaattcgaagagaaaatcagcaccgggccgctgggcgatctcagcaggggataccaggagactctgcccagctatgctcaggttggagcccaagaagtcgaaggcgaggggcctccagccgaggaaggagcagaacccgaggttggcgaaaaaaaagaagaggccgagcggctgaccactgaggaacaggagaaagtggctgttccagagggagagaaggttgagacgccaggcgtagacaaggaaggtgagaaggaggaacctcagagcgaaaaagtttcaaagcagggactgcccgccgaaaaaacgccaagcttatgcccagaactgaccacagatgatgcgcggcctctgtcccgattgagcaaggcctcaagcagggccaggagtgatgacctgaccgtttag

SEQ ID NO: 188940 - DNA, 1548 bp, synthetic construct
  misc_feature 1..1548: note = Description of Artificial Sequence: Synthetic coding sequence
  source 1..1548: mol_type = other DNA
atgggcgactggaacctgctgggcgacaccctggaggaggtgcacatacactccacaatgatcgggaaaatctggctgacgattctgttcatcttccgcatgctcgttctaggcgtagctgccgaggacgtgtggaacgacgagcagtcaggcttcatctgtaacaccgaacaacccggctgcaggaatgtatgctacgaccaggcctttcccatttcactgatccggtattgggtgttacaggtgattttcgtgtcaagtccatccctggtatatatggggcacgccttgtatcggctcagagtccttgaagaggaacggcagaggatgaaggcccagctgcgcgtggagctggaggaagtggagttcgagatgcctcgtgatcgccggagactggaacaggagctatgccagctggaaaaaaggaagctgaataaggcccccctgcgcggcacactgctttgtacgtacgtaattcacattttcacacgctctgtagtagaggtgggctttatgattggccaatatttactgtacggcttccatctagagccattgttcaaatgtcacggacatccttgtccgaacataatagattgcttcgtcagccggccaacggaaaagacgatctttctgttgttcatgcagagcatcgcaaccatctccctgtttctcaacattctggagatcttccatttaggcttcaaaaaaataaaacggggcctttgggggaagtataagctgaaaaaggagcacaatgagtttcacgccaacaaggctaagcaaaatgtagcaaagtaccaatcaacatccgctaattcactgaagaggctgcccagcgcccctgattataatctattggtggagaagcagacccacacagccgtttacccttccctcaactctagctcagtgttccaaccgaatcctgataaccatagtgtaaatgacgagaaatgtatcttagatgaacaggaaactgtactgagtaacgagatttccaccctatcaacaagctgctcccactttcagcacattagcagcaataataataaagatactcataagatttttggtaaggagctaaacggtaatcaattgatggaaaaacgagagactgaggggaaggattccaaacggaattattatagccgcggccacagaagcatccctggggtggcgattgatggggagaacaatatgcgtcaatccccgcagaccgtcttctccttgccagccaactgcgactggaagccccggtggctgagagctacttggggttccagcacagagcatgagaacagaggctccccccccaaagggaatttaaagggacagtttaggaaaggcaccgtcagaaccctgcccccctcccaaggagattctcaaagtcttgacattccaaacaccgcggactccttgggtgggctctcatttgagccaggtctggtcagaacttgtaacaaccccgtgtgcccaccgaaccacgtcgtgtctctcacaaataacctaataggtaggagggtccctactgatttacagatctag

SEQ ID NO: 188941 - DNA, 1548 bp, synthetic construct
  misc_feature 1..1548: note = Description of Artificial Sequence: Synthetic coding sequence
  source 1..1548: mol_type = other DNA
atgggcgactggaacctgctgggcgacaccctggaggaggtgcacatccattcaacgatgattggaaaaatctggctgaccatcctcttcatcttcaggatgctggtactgggcgtggccgccgaggacgtttggaacgatgaacagagtggctttatttgtaatactgagcagccaggttgcagaaatgtgtgctacgaccaggcatttcccatatccttaattagatactgggtgctccaagtaattttcgtgtcctccccttccctggtatacatgggccacgcactgtatagactcagggtgctggaagaggagaggcagcgtatgaaagcacagctgcgagtggagctggaggaagtcgaatttgaaatgcctagggacaggaggcggcttgagcaggagctttgtcaactggaaaagaggaagttgaacaaagctcctctgagggggaccctattgtgtacttacgtgattcatatctttacacgcagtgttgtggaggtcggctttatgattggacagtatctgctctacggattccacctggaaccattgtttaagtgccatggacatccttgtcccaacatcatcgactgtttcgtgtcaagaccaactgagaagacgattttcttactgttcatgcagtccattgctacaatatcgcttttccttaatatactggaaatctttcatctgggctttaaaaagattaaacggggactgtggggcaagtataaactcaagaaggagcacaacgaattccatgcgaacaaagccaagcagaacgtagccaaatatcagtctacgtccgcgaattcgctgaaacgactgccgtctgccccggactataatttactcgtagaaaaacaaacccataccgctgtttatccatctttgaatagcagtagcgtgtttcaacccaaccctgacaatcacagtgtcaatgacgagaaatgcatcttggatgagcaggagaccgtgctgtctaatgaaatcagcaccctgtcaacgtcctgtagtcatttccagcacattagttcgaacaataataaagacacacataaaattttcgggaaagagctgaacggaaatcaacttatggaaaagcgagaaactgagggaaaagatagcaagcggaattactattcccgcgggcacagaagcatccccggggtcgccattgatggggagaataacatgagacagagccctcagaccgtcttttctttgcccgccaattgcgattggaagccacgatggctgagagcaacctgggggtcaagtacagagcacgagaacaggggaagccctccaaagggaaatctaaagggccaatttaggaagggaacggtccgaacgcttcctcccagccagggggatagccagtcactggacatccccaacacggcagatagtctcgggggactgtctttcgaacccgggctggtccgaacctgtaataacccagtgtgccccccaaatcacgtggtgagcttgacaaataacttgattgggcgcagggtgccgacagacctccagatttag

SEQ ID NO: 188942 - DNA, 1545 bp, synthetic construct
  misc_feature 1..1545: note = Description of Artificial Sequence: Synthetic coding sequence
  source 1..1545: mol_type = other DNA
atgggcgactggaacctgctgggcgacaccctggaggaggtgcacatacatagtacaatgattggcaagatctggctcacgatccttttcatctttcggatgctagtgctcggagtggccgccgaggacgtgtggaatgacgaacagagtggcttcatttgcaacactgaacagcccgggtgccgcaatgtgtgctatgatcaggcctttccaatctccctgattcgctactgggtcctacaagtgatctttgtttcaagtcctagtctggtgtatatgggacatgccttgtacagactacgcgtccttgaagaagagcgccagaggatgaaggcacagctgcgcgttgagctggaagaggtggagtttgagatgccaagagacaggagacggcttgagcaggagttgtgccagctcgagaagcggaagttgaataaggcccccctgcgtggcaccctactgtgcacttatgtgattcacatttttacacgctccgtagttgaagtcgggttcatgatcggacagtatctgttatacggtttccatctcgagccactttttaagtgccacggacacccttgccctaacatcatcgactgcttcgtgtcacgcccaaccgagaagacaatatttctcctcttcatgcaaagtattgccacaatctctttgtttctgaacatcttagagatctttcatttgggattcaagaaaattaaacgggggctatggggcaagtacaaattgaagaaagaacataatgagttccacgccaataaggctaaacagaacgtcgcgaaataccaaagtacgagcgctaacagcctcaaacgcctgccctcagcccccgactacaacttgctggtggaaaagcagacccacactgccgtttacccatcgctgaactctagcagcgtttttcaacccaacccggataaccactctgtgaacgatgaaaagtgcatactggatgagcaggaaacagtgttgtccaacgagatcagtactttgagcacctcctgctcccactttcagcacatctcgtctaacaacaataaagacacgcacaagatatttggcaaggaactgaatgggaatcagcttatggaaaaacgggagacggaggggaaagatagcaaacggaattactactccagagggcatagaagcataccgggagtggccattgatggtgagaacaatatgcgacagtccccacagacagtgtttagcctgccagcgaactgtgactggaagccacgttggctcagagcaacctgggggtccagtactgagcatgagaataggggctccccccccaaggtcccaggcagtaaggcaacagctagcagtcttctcctgattctgcaacgccccacttcctcacaacctagattgaaggaaactccgaagattaaggccgaggctaagatctacgattctaagcaccctcctcgactcctgcagtcgactgtctctacatttagcgggcgagagcctaggtcgccagccccaatgggccaccattccttccgaggtccccggtag

SEQ ID NO: 188943 - DNA, 852 bp, synthetic construct
  misc_feature 1..852: note = Description of Artificial Sequence: Synthetic coding sequence
  source 1..852: mol_type = other DNA
atgaactggaccggcctgtacaccctgctgagcggcgtgaaccggcacagtactgctattggaagggtttggctgtccgtgatattcattttccggatcatggtgctagtggtggcggccgagtctgtctggggtgatgagaagagtagcttcatttgtaacaccctccagcctggatgtaattccgtatgttatgaccagttcttccctatctcccacgtccggctgtggtcattgcagttgatcctggtgagtactccggccctgctggtcgccatgcatgtggcccaccagcagcatattgagaaaaaaatgttacggctggagggccacggcgatcctctgcacctggaagaggtcaagcgtcataaagtgcacatctctggcacactgtggtggacctacgttatttctgtggtgttcaggctgctctttgaggcagtgtttatgtatgttttctatctgctgtatcccgggtacgccatggttcggctggtcaagtgcgatgtatacccttgcccaaatacggtggattgtttcgtctcgaggcctacagaaaagactgtgttcacagttttcatgctggcagcttctgggatatgcatcatattgaatgtggcagaggtagtatatctgatcatccgggcttgtgcccggcgggcccagaggagatcaaatcctccaagtagaaagggctctggattcggccataggctatcacctgaatacaagcagaatgagatcaacaaactcctatccgaacaggatggttcactgaaagatatcctacgccgctctccaggaaccggggcaggtctcgccgaaaagtccgaccgatgtagtgcatgctag

SEQ ID NO: 188944 - DNA, 852 bp, synthetic construct
  misc_feature 1..852: note = Description of Artificial Sequence: Synthetic coding sequence
  source 1..852: mol_type = other DNA
atgaactggaccggcctgtacaccctgctgagcggcgtgaaccggcactctactgccatcggcagagtctggctttccgtgattttcatctttaggatcatggtattggttgtggcagccgagtcagtttggggggacgaaaaatctagtttcatctgtaacacgcttcaaccaggatgtaactccgtctgttatgatcaattctttccaatctctcacgtgaggctgtggagcctgcagttaattcttgtgagtacccctgccctcctggtcgccatgcacgtcgcacatcagcagcacatcgagaagaaaatgcttcgattagagggccacggcgatcctctccaccttgaggaggtgaaacgtcataaagtccacatcagtggaacgctgtggtggacttacgttatttccgtagtctttaggcttttgttcgaagcagtgttcatgtacgtattctatttgctatatccgggctacgcgatggtgcggttagtgaagtgcgatgtgtatccatgccccaataccgttgattgctttgtcagtaggccgacggagaagactgtctttacagtttttatgttggccgcaagcgggatttgcatcattctgaacgttgctgaggtagtctatctcattattcgggcgtgtgctcggcgggcacaacgaaggtcaaaccccccttcgagaaagggatcagggtttggtcacaggctatctccagagtataagcagaacgagatcaacaagttgcttagcgagcaagacggctccctgaaggatatccttcggagatctccagggaccggcgctggccttgccgaaaagtctgatagatgttctgcctgttag

SEQ ID NO: 188945 - DNA, 852 bp, synthetic construct
  misc_feature 1..852: note = Description of Artificial Sequence: Synthetic coding sequence
  source 1..852: mol_type = other DNA
atgaactggaccggcctgtacaccctgctgagcggcgtgaaccggcattccaccgctattgggcgtgtgtggctatccgtgatcttcatctttcggattatggttcttgtagtggccgccgaatccgtgtggggcgacgagaaaagctctttcatctgtaataccctccaacctggttgtaacagcgtctgttatgatcagtttttccccatttcacatgtgcgcctgtggagtctccaactgatcctggtgtctacaccagcgcttctggtggcaatgcacgtcgcgcaccagcagcacatcgagaaaaagatgctacgactggaggggcacggcgaccccctacacttggaggaggtgaagcggcataaagtgcatatctcaggcactttgtggtggacctacgtgataagtgtcgtgtttcgcttgctatttgaggcagtgttcatgtacgtattttatctgctgtaccctggttacgctatggtcaggctggttaagtgtgacgtgtacccctgccccaacaccgtggattgctttgtttctaggcccacggaaaaaacagtgttcacagttttcatgctggctgctagcggaatctgtatcatcctgaatgtggccgaggtagtctacctgattatacgcgcttgtgctcgccgggcccagcgaaggtccaatcccccctcacgcaagggatccggtttcggacacagactgagtcctgagtataagcaaaacgaaatcaacaagctcttgtccgaacaggacggtagcctcaaggacattctaagacgctctcccgggactggcgcaggtttggctgaaaagtcggatcgctgttccgcgtgttag

SEQ ID NO: 188946 - DNA, 255 bp, synthetic construct
  misc_feature 1..255: note = Description of Artificial Sequence: Synthetic coding sequence
  source 1..255: mol_type = other DNA
atgaactggaccggcctgtacaccctgctgagcggcgtgaaccggcacagtaccgccattggaagggtctggctgagtgtgatcttcatctttaggatcatggttctggttgtggctgccgaatcagtgtggggagatgagaaatcctcttttatttgtaacaccctccagcccggttgtaactctgtgtgctacgatcagttttttcccatttcccatgttaggctgtggagcttgcaactgattttggtgtag

SEQ ID NO: 188947 - DNA, 681 bp, synthetic construct
  misc_feature 1..681: note = Description of Artificial Sequence: Synthetic coding sequence
  source 1..681: mol_type = other DNA
atggactggggcaccctgcagaccatcctgggcggcgtgaacaagcactctacctctattggtaagatatggctgacagtcctctttattttccgcatcatgattcttgtggtggctgctaaggaggtctggggagatgagcaggctgatttcgtttgcaatacgctgcagccgggatgtaagaacgtgtgttatgaccactactttcccatttcccacatccggttatgggcactgcagctgatctttgtaagcaccccagctttgcttgtagctatgcacgtggcatataggaggcacgaaaaaaagcgcaaattcatcaaaggcgagatcaagagcgagtttaaggacatagaggaaatcaagacgcagaaggtgagaattgaaggttccctgtggtggacttacacaagttctatttttttcagagttatattcgaggcggccttcatgtacgtcttctacgtcatgtatgacggtttcagcatgcagcgtctcgtcaaatgcaatgcctggccgtgtcccaatactgtggactgtttcgttagcagacccacggaaaaaactgtgttcactgtgtttatgatcgcggtgtcagggatctgtatactgctaaacgttacagagttatgctacctcctgatccgctattgcagcggtaagtctaagaagcccgtgtag

SEQ ID NO: 188948 - DNA, 681 bp, synthetic construct
  misc_feature 1..681: note = Description of Artificial Sequence: Synthetic coding sequence
  source 1..681: mol_type = other DNA
atggactggggcaccctgcagaccatcctgggcggcgtgaacaagcattcaacaagcattggcaagatctggttaaccgttttatttatctttaggattatgattctggttgtggcagctaaggaagtgtggggggacgagcaagctgacttcgtctgtaataccttacagccggggtgtaaaaatgtgtgctatgatcactactttccgatcagccacattcggctttgggctttacagctcatattcgtgtcgactcctgcattactcgtggccatgcacgtagcgtacaggagacacgaaaaaaagaggaaatttatcaaaggcgaaattaaaagcgaatttaaggacatcgaggaaatcaagacgcagaaggtgcggattgaaggtagtctatggtggacatacacatcctcgattttcttccgcgttattttcgaggcagccttcatgtacgtcttttatgtgatgtatgatggattttctatgcagaggctcgtcaagtgtaacgcttggccctgccctaacaccgtagactgcttcgtgtcaagacctaccgagaaaacagttttcaccgtctttatgattgcagtctcaggcatttgcattttgctgaatgtcaccgagttgtgctatcttctgattcggtattgctctgggaagtccaaaaagcccgtgtag

SEQ ID NO: 188949 - DNA, 813 bp, synthetic construct
  misc_feature 1..813: note = Description of Artificial Sequence: Synthetic coding sequence
  source 1..813: mol_type = other DNA
atggactggaagaccctgcaggccctgctgagcggcgtgaacaagtacagtaccgcattcgggcgaatctggctgtcagtggtcttcgtgttcagggtcctggtgtacgtcgtggccgctgagcgggtgtggggcgacgaacagaaagacttcgactgcaatacgaagcagcccggttgcacaaatgtctgttacgacaactactttcctatatctaatatccggctgtgggctctccagctgatctttgtcacctgcccgtcactgctggtgatcttacacgtggcatacagggaggagagggaaaggagacaccggcaaaagcatggagaccagtgcgccaaattgtatgacaatgccggcaagaagcatggcggcctttggtggacgtatctcttcagcctgatcttcaagctaatcatcgagtttttatttctgtacttgttgcacacactgtggcacggattcaacatgcctcgactcgttcagtgtgcgaatgttgccccctgtccgaacattgtagactgctacatcgcacgccccaccgagaaaaaaatctttacatattttatggtgggcgctagcgcggtttgtattgtcttgacaatatgtgaactgtgttatctgatctgccatagggtgctgaggggccttcacaaagacaagccacggggaggctgctctcccagctccagtgcgtcaagggcaagcacttgtcgctgccaccacaagctggtggaggccggggaggttgacccagatccaggaaacaacaagctgcaggccagcgcacccaatctgacaccaatatag

SEQ ID NO: 188950 - DNA, 813 bp, synthetic construct
  misc_feature 1..813: note = Description of Artificial Sequence: Synthetic coding sequence
  source 1..813: mol_type = other DNA
atggactggaagaccctgcaggccctgctgagcggcgtgaacaagtattctactgcctttgggagaatatggctgtcagtggtttttgtttttcgtgttctggtgtatgtggttgcagccgaaagggtgtggggtgacgaacagaaagactttgactgcaataccaagcagccaggctgtacaaacgtctgttatgacaattatttccccattagtaacattaggctgtgggctcttcaactgatttttgtcacctgcccttctctgctagtaatcctgcacgttgcatatagagaagagcgggaaaggcggcacaggcagaagcacggcgaccagtgcgctaagctgtatgataacgctgggaaaaaacacggcggcctctggtggacctacctattcagcttgatttttaaactgatcattgaatttttgttcctgtacttactgcacacactgtggcatggcttcaatatgccacggctggttcagtgcgcaaacgtcgcaccctgtcccaatattgtggattgttacatagctaggccgaccgagaagaaaatttttacttatttcatggtaggagctagtgccgtgtgtattgtactgacaatctgtgaactatgttacctgatatgtcatcgggttctgaggggtctacataaagacaaacctcgcgggggatgtagcccgtcctccagtgcatcaagggcttcaacttgtaggtgtcaccataaactggttgaagcaggagaggtcgatcctgatccggggaacaacaaactgcaggcttcggccccaaatctgactcccatctag

SEQ ID NO: 188951 - DNA, 765 bp, synthetic construct
  misc_feature 1..765: note = Description of Artificial Sequence: Synthetic coding sequence
  source 1..765: mol_type = other DNA
atggactggaagaccctgcaggccctgctgagcggcgtgaacaagtatagcaccgccttcggcaggatttggctatctgtggtgtttgttttcagggtacttgtttatgtggtagcggcagaacgagtttggggcgatgaacagaaagacttcgactgcaacaccaagcaacctgggtgcacaaacgtatgttacgataactactttccaatatcgaacatccggctgtgggccctgcagttaatctttgtgacctgcccgagtctgctcgtaattctgcacgtcgcctatcgcgaggagagggagcgcagacaccgccagaagcatggggatcagtgcgcaaaactttacgacaacgctggcaagaaacatggcgggctctggtggacctatctgcttcacaccttatggcacggctttaatatgccgagattggtgcagtgtgcgaatgtggcaccttgcccaaatatcgtcgactgttacatcgcgcgccctactgagaaaaagatattcacatatttcatggtgggagcctccgcagtctgtatcgttctgaccatttgtgaactgtgttacctaatttgtcaccgcgtgctgcgagggttacacaaggataagccacgaggaggatgttctccttcaagctccgctagccgagccagcacctgcagatgccatcataaactagtagaggcaggcgaggtcgaccccgaccctgggaataacaagctgcaggctagtgccccaaacctcacaccaatctag

SEQ ID NO: 188952 - DNA, 801 bp, synthetic construct
  misc_feature 1..801: note = Description of Artificial Sequence: Synthetic coding sequence
  source 1..801: mol_type = other DNA
atgaactgggccttcctgcagggcctgctgagcggcgtgaacaagtactccactgtgctgtccagaatttggttgtctgtcgtgtttattttcagagtactcgtctatgtggtggctgccgaggaagtatgggatgacgagcagaaggatttcgtgtgtaacaccaagcagcctgggtgcccaaacgtgtgctatgacgagtttttccctgttagccacgtgcgactttgggcattgcaacttatcctggtaacgtgccctagcctgctggtggtgatgcatgtcgcctaccgtgaggagagagagagaaaacaccatctgaagcacggtcctaatgcaccctcactttacgataacctgtccaaaaagcgaggggggctgtggtggacctatcttctgtccctaatctttaaagcagcagtggatgcaggcttcttatacatttttcaccgattgtacaaggactatgacatgccgcgggttgtggcatgcagcgttgaaccctgtccacatacggtggattgttatatttcgaggcccaccgagaagaaggtgtttacatacttcatggtgaccactgccgctatctgcatcctgctgaatttatccgaggtattttacctcgtgggaaagagatgcatggagatcttcggacctcgccataggagacccaggtgtcgcgagtgcctgcctgatacctgtccaccatatgtactcagccaaggcggacatcctgaggacggcaattcggttctgatgaaggcgggctcggccccagttgacgccgggggctatccttag

SEQ ID NO: 188953 - DNA, 822 bp, synthetic construct
  misc_feature 1..822: note = Description of Artificial Sequence: Synthetic coding sequence
  source 1..822: mol_type = other DNA
atgaactggagcatcttcgagggcctgctgagcggcgtgaacaagtattctaccgctttcggtagaatttggctatcgctggttttcatttttcgggtcctggtgtacctggtgacagcagaacgggtgtggtccgatgaccacaaggactttgactgcaatacacggcagcccggatgctccaatgtttgttttgacgagtttttccccgtgagtcacgtccggttgtgggctcttcagctgatcttggtgacgtgtccatccctactggtcgtgatgcacgttgcgtatagggaagtgcaggagaaacggcatagggaggctcacggagagaactctggacgcctgtacttgaatcctggcaaaaagcggggcgggctttggtggacatacgtgtgctccctcgtcttcaaggcttccgtggatattgcgtttctgtacgtatttcattcattctacccaaaatacatcctgccccctgtggtaaagtgccacgcagatccatgcccgaatattgtggactgcttcatttctaaaccgagtgaaaagaacatctttacgctatttatggtggcaactgccgccatttgtatcttactgaaccttgtggagctgatctacctagttagtaagcgctgtcacgaatgtctggccgccaggaaagcacaggcaatgtgcaccggccatcatccccacggaactacatcctcatgcaaacaggatgacctgctctcaggcgacttgattttcttagggtcagattcccatcctcccctcctgcctgaccgtccgcgggaccatgtgaaaaagaccatcctgtag

SEQ ID NO: 188954 - DNA, 786 bp, synthetic construct
  misc_feature 1..786: note = Description of Artificial Sequence: Synthetic coding sequence
  source 1..786: mol_type = other DNA
atggactggggcaccctgcacaccttcatcggcggcgtgaacaagcatagcacctctatcgggaaggtgtggattaccgtaatatttatcttcagggttatgatcttagtggtggctgcccaggaagtatggggagatgaacaggaggactttgtctgtaatacccttcagcctggatgtaaaaatgtttgttacgaccacttcttcccggtgagtcacattcgtctctgggccctccagctgatcttcgtctctacgcccgctctcctcgtggctatgcacgttgcctactaccgccatgagactactcgaaagtttcgaaggggggagaagcgcaacgactttaaagacatcgaggatatcaagaagcaaaaagttaggatagagggctctttgtggtggacatatacgtccagcatattctttagaattatcttcgaggccgcattcatgtacgtcttttacttcctgtacaacggctaccacttaccatgggttctgaaatgcggaatcgatccctgccccaatttggtggattgttttatctctcgccctaccgagaagactgtgtttactatattcatgatctcagctagtgtgatctgcatgctcctcaacgtcgccgagctgtgctatctgttactaaaagtttgctttagacggtcaaaacgagctcagacccagaagaatcacccgaaccacgccctgaaggaaagcaaacaaaacgagatgaatgaactgatctcagactcaggacaaaacgctatcactggcttcccctcatag

SEQ ID NO: 188955 - DNA, 786 bp, synthetic construct
  misc_feature 1..786: note = Description of Artificial Sequence: Synthetic coding sequence
  source 1..786: mol_type = other DNA
atggactggggcaccctgcacaccttcatcggcggcgtgaacaagcattctacatcaatcggaaaggtttggattaccgtcatcttcatttttagagtgatgattttggttgtggccgctcaggaggtctggggcgacgagcaggaggactttgtctgtaacaccctccagccaggttgtaagaacgtgtgttacgaccatttcttcccggtctctcatatacgactgtgggctctgcagctgatcttcgtgtccacccccgccctcctggttgctatgcatgtggcctattataggcacgagactacacgcaagtttcgacggggggagaaaaggaacgactttaaggacattgaggacatcaaaaagcagaaggtgaggatcgagggctcattgtggtggacatatacgtcatccatctttttccgtatcatcttcgaggccgcctttatgtatgtcttttacttcctgtacaatggatatcacttgccgtgggtgttaaagtgtggaatcgacccctgccccaatcttgtcgactgtttcatctcaagacccaccgaaaagacagtgtttacgatatttatgatctccgcatccgttatctgcatgcttctgaacgtggccgagctgtgttatctgttactaaaagtgtgctttcgcagaagtaagcgcgcccagacacagaaaaaccatccaaatcacgccttgaaagagagtaaacagaatgagatgaacgagttgatcagtgacagcggccagaacgccattactggtttcccctcctag

SEQ ID NO: 188956 - DNA, 786 bp, synthetic construct
  misc_feature 1..786: note = Description of Artificial Sequence: Synthetic coding sequence
  source 1..786: mol_type = other DNA
atggactggggcaccctgcacaccttcatcggcggcgtgaacaagcatagtactagcatcggaaaagtctggatcacagtgatcttcatcttccgtgtgatgattttggtggtggcagcacaagaagtgtggggcgatgagcaggaagattttgtgtgcaacacactgcagcctggatgtaagaacgtttgttatgatcactttttccccgtgtcacacattcgcctttgggccttgcagttaatcttcgtgtctaccccagcactactggttgctatgcatgtggcctattaccgccatgaaaccacacgaaagtttaggcgcggggagaagaggaacgactttaaggacattgaggatataaagaaacaaaaggttcggattgaaggatcactctggtggacctacacctccagcatcttttttaggatcattttcgaggctgccttcatgtatgtgttttattttctctataatggttatcaccttccttgggtgctgaaatgtggaatcgacccctgtcctaatttggtcgactgctttattagcagaccgacagagaagactgtgttcacgatatttatgatctcagcttccgttatttgcatgctactgaacgttgccgagctatgttacttgctgttaaaagtttgctttaggagaagtaaacgtgcccagacccagaagaatcaccctaaccacgctttgaaggagagtaaacaaaatgaaatgaacgagttaattagtgacagcggtcagaacgctattacaggcttcccaagttag

SEQ ID NO: 188957 - DNA, 786 bp, synthetic construct
  misc_feature 1..786: note = Description of Artificial Sequence: Synthetic coding sequence
  source 1..786: mol_type = other DNA
atggactggggcaccctgcacaccttcatcggcggcgtgaacaagcacagcacgtctatcgggaaagtctggattacagtaattttcatctttcgagtgatgatacttgtcgttgcagctcaagaggtgtggggggacgagcaagaagactttgtgtgcaatacactgcaaccaggatgcaagaacgtgtgttacgaccacttttttcctgtgtcccacattcgcctctgggcgcttcagctgatatttgtgtcaacccccgcgcttctcgttgccatgcacgtggcctactaccgtcacgaaaccacccgaaaattcagaaggggcgagaagaggaacgattttaaggatattgaggacatcaagaaacaaaaggtgcgtattgaaggatctctgtggtggacatatacatcgagtatattctttcggatcatttttgaggccgcctttatgtacgtgttctacttcctgtacaacggttatcatcttccatgggtgctgaaatgcggaattgatccttgtccgaatctggtcgattgcttcattagcagaccaacagagaagacagtgttcacaatcttcatgattagtgcctctgtcatctgcatgctcctaaatgtggccgagctctgttatttactgcttaaagtttgctttagaaggtctaaacgagcccagacacagaaaaaccatcccaaccacgccctcaaggagtccaagcaaaatgagatgaacgaactgatttctgactccggacaaaacgccataacaggttttccatcctag

SEQ ID NO: 188958 - DNA, 672 bp, synthetic construct
  misc_feature 1..672: note = Description of Artificial Sequence: Synthetic coding sequence
  source 1..672: mol_type = other DNA
atgagctggatgttcctgcgggacctgctgagcggcgtgaacaagtattcaactgggacaggctggatctggctggcagtggtctttgtctttcgtctgttggtttacatggtggccgcggaacatgtttggaaggacgagcagaaggaatttgagtgtaactcaagacagcccggttgcaagaacgtctgtttcgatgacttcttccctatctcccaagtaagactctgggctttgcagctaattatggtgtctaccccctctctgctggtggtcttacatgtagcctaccacgaaggccgagagaagcggcataggaagaagctatatgtctctcccgggactatggacggtggactctggtatgcataccttatctcgctgattgtaaagactgggtttgaaatcggatttcttgtcctgttctacaagctgtacgacggtttttctgttccctacctgatcaagtgcgacttaaagccctgccccaacaccgttgactgcttcattagcaagcctacggagaagactatcttcattctttttctcgtgattacctcctgtttgtgtattgtgctcaatttcatcgaactgtcttttctggtgttaaaatgcttcataaaatgttgcctgcaaaagtatctgaagaaacctcaggtgctgtctgtctag

SEQ ID NO: 188959 - DNA, 492 bp, synthetic construct
  misc_feature 1..492: note = Description of Artificial Sequence: Synthetic coding sequence
  source 1..492: mol_type = other DNA
atgagctggatgttcctgcgggacctgctgagcggcgtgaacaagtactctacagggacgggctggatctggctggctgttgtcttcgtgttcaggcttctggtgtacatggtggccgctgagcatgtgtggaaagatgaacagaaagagttcgaatgtaattctcgacagccaggttgtaaaaacgtctgttttgatgattttttccctatttctcaggtaaggctatgggcccttcagctgataatggtgtctacacccagtcttctagttgtacttcacgtggcctaccacgaaggccgggagaagaggcaccgtaagaagctgtatgtgagtcccgggacgatggatggggggttgtggtacgcctacttgatcagcctgatcgtgaagaccggcttcgagattggattcctggtccttttttataagctatacgatggttttagcgtcccctatttaatcaagtgcgatctgaagccatgcccatag

SEQ ID NO: 188960 - DNA, 672 bp, synthetic construct
  misc_feature 1..672: note = Description of Artificial Sequence: Synthetic coding sequence
  source 1..672: mol_type = other DNA
atgagctggatgttcctgcgggacctgctgagcggcgtgaacaagtacagcacaggaaccgggtggatttggcttgcagtagttttcgtattccgcctactagtctacatggtggccgctgaacacgtttggaaggatgagcaaaaggagtttgaatgcaactctcgacagcctggctgtaaaaatgtatgttttgacgattttttcccaatttcccaggttcgcctatgggcactccaacttattatggtttcaactccatccctgctagtcgtccttcatgttgcctaccacgaaggtcgcgaaaagcggcaccggaaaaagctgtacgtgagtccaggaactatggatgggggactctggtacgcctacctaatctcactgattgtgaaaaccggattcgagatcgggttcctagtgctcttctacaaattatatgacggattttcagtgccctacctgataaaatgcgatctgaagccctgtcccaacacagtggattgtttcatcagcaagccgaccgagaagactatcttcattttattcttagtgatcaccagctgtctgtgcatcgtgctaaactttattgaactgagtttcctggttttaaagtgtttcatcaagtgttgtctccagaaatatctcaagaagccacaggtgctgagcgtgtag

SEQ ID NO: 188961 - DNA, 966 bp, synthetic construct
  misc_feature 1..966: note = Description of Artificial Sequence: Synthetic coding sequence
  source 1..966: mol_type = other DNA
atgggcgagtggaccatcctggagcggctgctggaggccgccgtgcaacagcactcaaccatgatcggacgtatcttactgacggtggtcgtgatctttagaatactaattgttgccattgttggggaaactgtatatgatgacgaacaaactatgttcgtgtgtaatacattgcagcccgggtgtaaccaggcctgctatgatcgggctttccccatctcgcacatccgctactgggtgttccagatcatcatggtttgcacgccaagcctgtgtttcattacttactccgtgcatcagtctgctaagcagcgcgagaggcggtactcgactgtgtttttagcgctggatagggatccaccagagtcgatcggagggcctggtggaacagggggaggaggatccggaggaggcaaaagagaggacaagaagctgcagaatgccatcgtcaacggagtgttacagaataccgagaacacttccaaggagaccgaacctgactgtttggaagttaaagaactcacgccccatccctctggattgcgaactgcctctaagtccaaactgcgccggcaggaagggattagcaggttctacatcatccaagtcgtgtttcggaacgccttggaaataggatttctcgtgggccagtactttctgtacggttttagtgtccctggattgtatgagtgtaatcgctacccctgcatcaaagaggtcgagtgttacgtgtctcgcccaaccgagaagactgttttcctcgtgttcatgtttgctgtatctggcatctgtgtggtcctaaacctagctgaattgaatcacctgggctggagaaagattaagctcgccgtgcgaggagcacaagcgaagcgcaagtcgatctacgagatccgcaacaaggacctcccacgagtcagtgtgcctaactttggaagaacacagagctcagattctgcatacgtttag

SEQ ID NO: 188962 - DNA, 891 bp, synthetic construct
  misc_feature 1..891: note = Description of Artificial Sequence: Synthetic coding sequence
  source 1..891: mol_type = other DNA
atgggcgagtgggccttcctgggcagcctgctggacgccgtgcagctgcaatcgccacttgttggaagactatggctggtcgtgatgctgattttccggatcctggtgttggcaaccgtaggcggggcagtgtttgaggacgagcaggaggagttcgtctgtaataccctccagcccggctgtcggcagacttgttatgatcgagctttcccagtgtcccattatcgcttctggctatttcacatcctgcttttaagcgcgcctcctgtgctgtttgtggtgtactcaatgcatagagctggaaaagaagcaggaggcgccgaggcagccgctcagtgtgcaccgggcctgccggaggcccagtgcgccccatgcgccttacgggcaagacgcgccagaagatgctacctgctaagtgtagcgctaaggctgcttgcggaattgacattccttggagggcaagcgctgttgtacggcttccgcgtggctccccactttgcctgcgcaggccccccctgcccccataccgtggattgcttcgtctcccgacctacagagaaaaccgttttcgtgttgttctattttgccgtggggttgctgtctgccctcctgtcagtagccgaactcggtcacctgctttggaaggggcggccgcgggctggggagcgggataaccggtgcaatagggcccacgaggaagctcagaaactactaccacccccccccccaccaccgcccattgtggtgacttgggaggagaaccggcatcttcagggggagggttcccctggcagcccacaccctaagactgaactggacgctcctcgcttcagacgcgaaagcacatctcccgcaggttggcactgttctcttcctttccacgggacttag

SEQ ID NO: 188963 - DNA, 1113 bp, synthetic construct
  misc_feature 1..1113: note = Description of Artificial Sequence: Synthetic coding sequence
  source 1..1113: mol_type = other DNA
atggagggcgtggacctgctgggcttcctgatcatcaccctgaactgtaacgtcacaatggtgggcaaactctggtttgtgttgacgatgttgttgcggatgcttgtgatcgtgctagcaggtaggccggtctaccaggatgagcaggagagattcgtctgcaatacattgcagccgggctgcgctaatgtttgttacgatgtttttagccctgtgtcccatctgagattctggctgatacagggcgtttgtgttttgcttcctagtgctgtcttctcagtgtacgtgctgcatcggggggcaacactggctgctttgggcccaagaaggtgtcctgatccccgggagcccgcttccggccagcggaggtgtccccgccccttcggagagcgagggggcttgcaggtgcccgactttagtgccggatatatcattcacctcttgctccggacccttctcgaagcagcttttggcgcgttacattatttcctgtttgggttcctggctccaaagaaatttccatgcaccaggcctccatgtacaggagtggtcgattgctacgtatcaagacccacagagaagtctctcctcatgttgtttctttgggcagtatccgctctctctttcctgctcggattagccgatctggtgtgtagcctgaggcgtagaatgcgaaggcggcctggcccacccacatctccttctatccgcaaacagtccggcgcatcaggtcacgcagaaggtaggcgcaccgatgaggagggcggacgcgaggaggaaggcgctcctgcaccgcccggggcacgggcgggaggtgagggcgcaggatctcctagaagaacttctagagtgtcagggcacaccaagatacccgatgaggatgaatctgaggtcacttcctctgcgtccgaaaagctgggccgccagcctcgcggtagaccacacagagaggccgctcaggatccccgtggcagcggctccgaggaacagccatcggccgctccaagccgcttagccgctccaccttcctgctctagcctgcagccacctgatcctccggcgtcctcctcaggtgcaccccacctgcgagctaggaaaagcgagtgggtctag

SEQ ID NO: 188964 - DNA, 1191 bp, synthetic construct
  misc_feature 1..1191: note = Description of Artificial Sequence: Synthetic coding sequence
  source 1..1191: mol_type = other DNA
atgagctggagcttcctgacccggctgctggaggagatccacaaccactccacctttgtagggaagatttggctgaccgttttgatagtctttcggatcgtgctgactgccgtgggtggagagtccatatattatgacgagcagagtaaatttgtgtgcaataccgaacagccgggttgtgaaaacgtctgctatgatgctttcgccccccttagccatgtccggttttgggtgtttcagatcatcctcgtagccactccatcagtgatgtatcttggttatgctattcacaagattgcaaagatggagcatggggaggcagacaagaaagcagctaggagtaagccttacgcaatgcggtggaaacagcaccgggccctcgaggaaaccgaggaggataacgaggaggatccaatgatgtatcccgaaatggagcttgagagcgacaaggagaataaggagcagtctcaacctaagccaaagcatgacggacgcaggaggatccgcgaggacgggcttatgaaaatctacgtactgcagcttctcgctagaaccgtgtttgaggttggttttcttataggacaatactttttgtacggttttcaggtgcacccattctacgtctgtagtcgcctgccctgccctcataaaatcgactgcttcatctcacgaccaactgagaagaccatctttttgttgatcatgtacggagtgaccggcctctgcctgctgctcaatatttgggaaatgttgcacctcggtttcggcacaatccgcgacagcctcaattcaaagcgaagagagctcgaggatccaggcgcatacaattatcccttcacatggaatacccctagcgccccaccaggctacaacatcgcggtgaagcctgaccagatacaatacacggagctgtccaacgcaaaaatcgcctacaagcagaataaagctaacaccgcccaagagcagcagtacggatctcacgaggagaacctcccagctgaccttgaggccttacaaagggaaatccggatggcccaggagcgcttggacttagcagtgcaggcgtactcccaccagaacaatccccacggcccaagagagaagaaggccaaggtgggctccaaggccggctctaacaaaagtacggccagttctaaaagcggcgacgggaaaacgtctgtttggatctag

SEQ ID NO: 188965 - DNA, 1191 bp, synthetic construct
  misc_feature 1..1191: note = Description of Artificial Sequence: Synthetic coding sequence
  source 1..1191: mol_type = other DNA
atgagctggagcttcctgacccggctgctggaggagatccacaaccactccacatttgtggggaagatttggctaaccgtgttgatcgtgttccgcatagtgctgacagcagtgggaggtgaatccatttactatgacgagcaatcgaagttcgtgtgcaataccgagcagcctgggtgtgaaaatgtctgctatgacgcattcgccccattgagtcacgtgagattttgggtattccagataattctcgttgctacgcccagtgtcatgtatctggggtatgcaatccacaagatcgccaagatggaacacggagaagccgataagaaagccgctcgcagcaagccgtatgctatgcggtggaagcagcaccgggcactggaggaaactgaagaagacaacgaagaggatccgatgatgtaccccgaaatggagcttgagagcgacaaggagaacaaggagcagtctcagcctaagcctaaacacgacggtcggaggagaatcagagaggatggccttatgaaaatctacgtgttgcagctgttagcacgaactgttttcgaggttggctttttaatcgggcaatatttcttgtacgggttccaagtccacccgttctatgtttgcagcagactgccatgtccccacaaaattgactgtttcattagcagacctaccgaaaaaaccatcttcctattgataatgtatggtgtgaccggattatgtttgttactcaatatttgggagatgctgcacctcgggttcggcaccattagagactcactcaacagtaaacgccgcgaacttgaggatcccggcgcctacaattacccctttacatggaatacaccaagcgctcctcccgggtacaatatcgcggttaagcctgaccagattcaatacaccgaactttctaatgccaagatcgcctataagcaaaacaaggccaacacagctcaggagcagcagtacggatcccatgaggaaaacctacctgcagatctcgaagccctgcagcgggagatccgcatggctcaggagcggctggatctcgctgtgcaggcttacagccaccagaataatcctcacggcccaagagaaaaaaaggctaaggtcgggagtaaggccggatctaataagagcactgcctcgagtaagtctggcgatggcaaaacatccgtgtggatctag

SEQ ID NO: 188966 - DNA, 1320 bp, synthetic construct
  misc_feature 1..1320: note = Description of Artificial Sequence: Synthetic coding sequence
  source 1..1320: mol_type = other DNA
atgaccaacatgagctggagcttcctgacccggctgctggaggagattcataatcactctaccttcgttggaaaagtgtggctcactgtgctcgtcgtcttcagaatcgtgctgaccgcagtcggaggggaggcaatttattcagacgaacaggcaaagtttacctgcaacacccgccagccgggctgcgacaatgtttgttatgacgcttttgcccccctgtcccatgtgagattctgggtctttcagatagttgtgatctcaacacctagcgtgatgtacttgggctatgccgtacaccggctcgccagagctagcgaacaggaacgtcggcgggccttgagacgaaggcctggcccaaggcgagcgccacgtgctcaccttccccctccccacgccggatggcccgaacccgccgacctgggagaagaagagccgatgctgggcctgggcgaggaggaggaagaggaagaaacaggagctgccgaaggggccggcgaggaggccgaagaggctggtgccgaagaggcttgtaccaaagccgttggggccgatggaaaagccgctggaacacccggcccaactgggcagcatgacgggcgccgacgcatacaaagagagggattgatgagggtttacgtggctcagctggtggcccgagccgcttttgaggtcgcctttttggtcggccagtatctgttgtacggctttgaagtgcggcctttctttccgtgttcgcgccagccctgcccgcacgtcgtggattgtttcgtctcacggccaaccgagaaaacagtcttcttattagtaatgtacgtcgtgtcgtgtctttgcctgcttctgaacttgtgcgaaatggcccacctgggtcttgggtctgcccaggatgctgtgcgcgggcggcgcggacctcccgccagtgcacctgcacccgctcctcgaccgccaccttgtgcctttcctgccgccgcagcaggcctggcttgccccccagactacagcttagtggtccgggccgcagaacgggccagggctcacgatcagaacctggccaaccttgccctgcaggcactgagagacggcgctgccgccggcgatcgggatcgggattcaagcccatgtgtgggcctgccggccgcatctagggggccccctcgggctggggctcctgccagccgaactgggtcagccacgagcgctgggacagttggggagcagggccgacccgggacgcacgaaagacccggcgccaaacctcgcgccggctcagagaagggcagtgcctcctcccgggacggcaagacaacagtttggatatag

SEQ ID NO: 188967 - DNA, 840 bp, synthetic construct
  misc_feature 1..840: note = Description of Artificial Sequence: Synthetic coding sequence
  source 1..840: mol_type = other DNA
atgtgcggccggttcctgcggcggctgctggccgaggagagccggcgatctaccccagtaggtaggctgcttcttcctgtgttattgggatttagactggtgctgctcgctgcaagcggtcccggcgtgtacggtgatgaacagtccgaatttgtgtgccacacccagcagcccggctgcaaggccgcttgcttcgacgcttttcacccccttagtcccctcaggttctgggtgttccaggttattctcgttgccgtgccgtccgctctctacatgggcttcacactgtaccacgtaatttggcactgggagctgtccggcaaagggaaagaggaggaaaccctcattcagggccgcgaagggaacacagacgtaccgggcgcgggatctctgagactgctgtgggcttacgtggcccagttaggtgccagattggtgctggagggtgcagctttggggctgcagtaccacctgtatgggttccaaatgccaagcagttttgcttgtcgccgggagccttgtctgggcagcattacgtgcaatctgagtcgaccctccgagaagacaatcttcctgaaaaccatgttcggagtgtcgggcttctgtctgctgtttacgtttctggagcttgtgttattgggcctcggcagatggtggcggacctggaagcataaatcaagttcttccaagtattttctgacgagtgaaagcactaggaggcacaagaaggccaccgatagtttgcccgtagtagagacaaaggagcagttccaggaggcagtgccaggccgatccctcgcccaggagaaacagaggccagttggcccacgggacgcttag

SEQ ID NO: 188968 - DNA, 1338 bp, synthetic construct
  misc_feature 1..1338: note = Description of Artificial Sequence: Synthetic coding sequence
  source 1..1338: mol_type = other DNA
atgaccatgttcgagaacgtgacccgggccctggcccggcagctgaacccgagaggagacctcacccctctggattcactgatcgatttcaagagattccacccattttgtcttgttctccgcaagaggaagtcaaccttattctggggggccaggtatgtgaggacagattacacattgctcgacgtgttggagcccgggagttctccctcagatccaaccgataccggaaatttcggatttaagaacatgctagatactagagtggagggggatgtggatgtgccaaaaaccgtcaaagtcaaaggcacagctggtcttagtcagaatagtacattggaggtgcagacacttagcgtggccccaaaggctcttgagacagtccaagaacgaaaattggcggctgaccacccattcctcaaggagatgcaggatcagggagagaacttatacgtcgtcatggaggttgtcgagactgtgcaagaggtcactcttgagagggcgggcaaagcagaggcttgcttcagtcttcccttctttgctcccctcgggctccagggaagtattaatcataaagaagccgtgactatcccgaagggctgtgttctcgcatttagggttagacagctgatggtgaagggtaaggatgagtgggacatcccccacatctgtaacgacaatatgcagacatttccacctggggaaaaatctggagaggagaaggttattttgatccaggcatctgacgtcggtgacgtgcacgagggtttcagaaccttaaaggaagaagtccaaagggaaacgcaacaagtcgagaaactgagtcgcgtcggacaatcttccttgttgtcctctcttagcaaacttctcggaaagaaaaaggagctacaggacctggaattggccttagaaggggccctggacaaaggccatgaggtcacattggaggccctccctaaagacgttctgctgtccaaggaagccgtaggcgccatcctctactttgtgggggccttgacagagttatccgaagcccagcagaagcttctggtaaagagcatggagaagaagattctcccagttcagctgaaactggtggagagcactatggaacagaatttcctgctggataaggagggggtgtttccccttcagccagaattactctcatccctcggggatgaggagctaacactaaccgaagcccttgtgggactctcagggttagaagtgcagaggagcggccctcaatacatgtgggatccagatacactcccaagactgtgtgctttgtatgctggactttcattgctacaacaattgaccaaggccagttag

SEQ ID NO: 188969 - DNA, 1212 bp, synthetic construct
  misc_feature 1..1212: note = Description of Artificial Sequence: Synthetic coding sequence
  source 1..1212: mol_type = other DNA
atgttcagcgtgttcgaggagatcacccggatcgtggtgaaggagatggacgccgggggagatatgatagccgtgcgctccctggtggacgcagataggtttcggtgcttccacctggtgggcgagaaacgcacttttttcggctgtcgacattatacaacaggcttgacattgatggatatcctggacactgatggtgacaaatggctcgacgaactcgactcaggtttacagggccaaaaagcggagttccagatacttgacaacgtggactcaaccggggaactgatcgtcagactgcctaaggagatcaccattagtgggagctttcagggctttcatcatcagaaaattaaaatttcggaaaacagaattagccagcagtatctcgccactctggaaaatcggaagctcaagcgggaactcccattctccttccgaagcattaacacccgggagaacctctatttggtgactgagacgctggaaactgtgaaggaggagaccctgaaaagtgacagacaatataaattttggagccagatcagccaaggccatctgagctataaacacaaagggcaacgggaagtaacgataccccccaaccgagttctctcttatagggtaaaacaactggtcttccccaataaggaaactatgaagaaggatggtgcttctagctgcttaggcaagtcattgggctcagaggacagtcgcaatatgaaggagaagctggaagatatggaatctgtgctgaaggacctgacagaggagaaaagaaaagacgtgcttaattctctcgccaaatgcctgggcaaggaggatatcagacaggacttggagcaacgggtgagcgaggtcttgatctccggtgagcttcacatggaagaccctgataagccactgctgtctagtttgtttaacgccgcaggcgtcctggtcgaagcccgtgctaaagctatcttggactttttagatgcactacttgaactgtccgaagagcaacagtttgtagcggaggccttggagaagggaacactcccgttacttaaagatcaagtgaagtccgtgatggaacagaattgggacgagctcgcaagctcccccccagatatggattacgatcctgaagcgaggattttgtgtgccctctacgttgtagttagcatactcctggagctggctgaaggtcccacatcagtctcatcgtag

SEQ ID NO: 188970 - DNA, 1236 bp, synthetic construct
  misc_feature 1..1236: note = Description of Artificial Sequence: Synthetic coding sequence
  source 1..1236: mol_type = other DNA
atgttcagcgtgttcgaggagatcacccggatcgtggtgaaggagatggacgctggtggtgacatgatcgcggttcggtctctcgtggacgcggaccggtttcggtgcttccatttggtgggggagaagcggaccttttttggctgtcggcactatacaaccggcctcacactcatggacatcttagatacagacggggataagtggcttgacgagttagactctggcttacagggacagaaagccgaatttcaaatcctggataacgtggatagcacaggagagctgattgtgcgccttcccaaggaaatcactattagcggttcctttcagggctttcaccaccaaaagatcaagatctccgagaaccggatctctcagcaatacctggctactctggagaatcggaagctcaaacgcgagctgccattcagtttccgatcgattaatacacgggaaaatttgtacctggtcactgaaaccctggagacagtgaaggaagaaacgctgaagtcagatcggcagtataagttttggagccagataagtcaggggcacctgagctataaacacaaggggcagcgtgaggttactattcccccaaacagggtcctttcataccgggtgaagcagctggttttccccaataaagagacaatgtcagctggcctggatatccacttcagaggaaaaactaagtctttccccgaaggaaaaagcctgggctcagaggacagtcgaaacatgaaagagaaactcgaagatatggagtcagtcttgaaggaccttactgaggaaaaacgaaaggatgttctcaacagcctcgccaagtgcctcgggaaagaggatatcaggcaggatctggagcagcgcgtgtctgaggtgctaatctccggcgagctccacatggaagacccagataagccactcttgtcatctctgtttaatgcggcaggggtccttgtggaggccagggccaaggcgatcctggatttcctcgacgctcttcttgagctcagcgaagaacagcaatttgtcgcagaagcattagaaaaaggcactctccctctgctcaaggaccaggtcaaaagtgtgatggagcagaactgggacgagttggccagcagcccccccgacatggactacgatcccgaggcccggattctctgcgccctgtatgtggtagtaagcatcctcctggagctagccgaagggccaacctcagtgtcttcatag

SEQ ID NO: 188971 - DNA, 1185 bp, synthetic construct
  misc_feature 1..1185: note = Description of Artificial Sequence: Synthetic coding sequence
  source 1..1185: mol_type = other DNA
atgttcagcgtgttcgaggagatcacccggatcgtggtgaaggagatggacgccggaggggacatgattgcagtgaggtctctcgttgacgccgatcgattccgctgcttccatttggtgggtgagaagcgtacattctttggctgcagacactataccaccggtctgactctaatggacatcctcgatacagatggggacaaatggctggacgagttggactcggggttacagggtcagaaagccgagttccagattttagataacgtcgattctactggcgagctcattgtgcggctccctaaagaaattacgatcagcggaagtttccagggctttcaccatcagaagatcaaaattagcgagaaccggatctcgcagcagtatctggcaaccctcgaaaataggaagctgaagcgtgagttaccatttagttttcgcagcatcaacactcgcgagaacctttacctggtaacggagacattggagacagtgaaagaggaaactctgaaaagcgatcggcagtacaagttttggtcccagatatctcagggacatctgtcatacaaacataaggggcaaagggaagtcactataccccctaacagggtgctctcttaccgggtcaaacagctggtatttcccaacaaggagacgatgaggaaatccctcgggtctgaagattctcgaaacatgaaagaaaagcttgaagatatggagtcggtcttgaaagatctcaccgaggaaaagagaaaggacgtcctcaactctttagccaagtgtctgggaaaggaggacatccgacaagatctggagcaacgagtgtcagaagtgctcatcagtggggaactgcacatggaggaccccgataagcctctactgtcatccttgtttaatgccgctggtgtgctggtggaggccagagctaaggctatcctcgatttcctcgatgctcttctcgaactgagcgaggagcaacaattcgtggccgaggcactcgaaaagggtaccctgcccttgctcaaggatcaggtcaaatctgtgatggagcagaactgggatgagctagcctcctctccaccagacatggactatgatcctgaagctcgcatcctctgcgctctatacgtggtcgttagcatactcctggaacttgcagagggaccaaccagcgtctcaagctag

SEQ ID NO: 188972 - DNA, 1236 bp, synthetic construct
  misc_feature 1..1236: note = Description of Artificial Sequence: Synthetic coding sequence
  source 1..1236: mol_type = other DNA
atgttcagcgtgttcgaggagatcacccggatcgtggtgaaggagatggatgcaggaggcgatatgatcgcggtccggtctctggtagacgcagaccgttttcggtgcttccacctagtgggggagaagcggaccttctttggatgtaggcattacaccacagggttgaccctgatggacatcctcgatacagatggggataagtggttagacgaactcgacagcggcctgcaggggcaaaaagctgagtttcaaatactggacaatgtggactctacaggagagctcatcgtcaggctgccaaaggaaatcacgatttccggcagttttcaggggttccaccatcagaaaataaaaatttctgaaaataggatctctcaacagtatctggctaccctggaaaatcgcaagctgaagcgagaactccccttctcattccgcagtattaataccagagaaaacctgtaccttgtgactgaaacactcgaaaccgtgaaggaagagaccctcaaaagtgataggcagtacaagttctggtcgcaaataagccagggccatttaagctacaaacataaggggcagagagaagtaacaattccacctaatagggttctgtcttaccgggtcaagcagctagtctttcccaataaggagaccatgtcagctggattggatattcacttccgcggcaaaacaaagtccttcccagagggcaaatccttgggatcagaagactcaaggaacatgaaggagaagctggaggacatggagagtgtcctgaaagatctaacggaggaaaagcggaaggatgttttgaatagcctcgccaaatgtctgggcaaagaggacatccgccaggacctagagcagcgggtaagtgaggtgctgatttccggcgagctccacatggaagatccggataaaccgctcttatcctcactgtttaatgctgcaggcgtgttagtggaagcaagagctaaggctatcctcgatttcctggatgcactgcttgaactgtctgaagaacagcagttcgtcgctgaagcccttgagaagggtaccctgcccctcctcaaggaccaagtgaaatcagtgatggagcagaactgggatgagctggcaagttccccacccgacatggactatgatcctgaggcgcgaattctgtgcgccctttacgtggtcgtgagcattctcctggagctggcagagggaccaacaagcgtgagctcatag

SEQ ID NO: 188973 - DNA, 1251 bp, synthetic construct
  misc_feature 1..1251: note = Description of Artificial Sequence: Synthetic coding sequence
  source 1..1251: mol_type = other DNA
atgttcagcgtgttcgaggagatcacccggatcgtggtgaaggagatggatgccgggggagatatgatcgccgtcaggtccctggtagatgccgatcgtttcaggtgtttccatctggtgggggaaaaacgcacatttttcggctgtcggcactacaccaccgggcttacattgatggacatcctcgatactgacggtgataagtggctggacgagctggatagcggtctgcaggggcagaaagcggagttccagatcctggacaatgtcgacagcacaggtgaactgatagtgaggctgcctaaagaaattactatctctggaagcttccagggattccatcatcagaagatcaagatctccgagaatcggatctcccagcagtaccttgctaccttggagaaccgtaagctgaagagggagctgcccttctctttcaggtcaattaatacacgagagaatctctacctggtaacagaaaccttggagactgtcaaggaagagacactaaaaagtgacaggcagtacaaattctggtctcaaatctcccaagggcatctgtcttataaacataagggccagagggaggtgacaatcccccccaatagggtcctttcttatcgggtgaagcagcttgtcttccccaataaggagactatgaacattcactttcgtgggaagactaagagcttccctgaagaaaaggacggggcctcctcatgtttgggaaaatccctgggatcggaagatagcagaaacatgaaagagaaactggaggatatggaaagtgtcctaaaggatctgacagaggaaaaacgcaaggacgtgctcaattccttggcaaagtgtctcgggaaagaagacatccgccaggacctcgagcagagagtctcggaagttcttatcagcggcgaacttcacatggaagatccagataagcctttattatctagcctcttcaacgcggcgggcgtccttgtagaggcccgggccaaagcgatccttgacttccttgacgcactgctggagctctctgaggaacaacaatttgtggctgaagccttagaaaagggaacactccccctgctgaaagatcaagtaaaaagcgtcatggagcaaaactgggacgagctcgcctccagccccccagacatggattacgacccagaagctcggatattgtgtgctttgtacgttgtggtctccattctgttagaacttgccgaaggacctacatctgttagtagttag

SEQ ID NO: 188974 - DNA, 1047 bp, synthetic construct
  misc_feature 1..1047: note = Description of Artificial Sequence: Synthetic coding sequence
  source 1..1047: mol_type = other DNA
tgactggacgagctggacagcggcctgcagggccagaaggccgagttccagattctggataacgtcgactcaactggcgagctcattgttaggctccccaaggagatcactatctccgggagcttccagggctttcaccaccaaaagatcaaaatttctgagaacagaatctcccagcagtatctggctacactcgagaacaggaaactgaagagagagctacccttcagctttcggtccattaacaccagggaaaacctttatctggtgacggagacacttgagacagttaaagaagagacactaaagagcgaccgtcagtacaagttttggtcacagatttctcaagggcacctctcttacaagcacaagggacagcgggaagttactatccctccaaatcgcgtactctcttatcgggtcaagcagctcgtgtttcccaacaaggaaactatgaacatccacttcaggggaaagacaaaatccttccccgaagaaaaggacggagcatcatcttgtctgggaaaaagcttgggaagcgaagattctaggaacatgaaagaaaagttagaggatatggagagcgtgttaaaggacctgacggaagaaaagcggaaagacgtcctgaacagtctggcaaaatgcctcgggaaagaagacattcgacaggacttggaacagcgggtttctgaggttctgatttccggcgaactgcacatggaggatcccgacaagcctcttcttagctcgctctttaacgctgctggagtcctggtcgaagcgagggctaaggcgatcttggactttctagacgcactgctcgaactgtccgaagagcagcaatttgtggcggaggcgctggagaaaggaactctgcccttacttaaagatcaagtgaaatctgtgatggagcagaactgggacgaactggcctcctcacctcctgatatggactatgaccccgaagcacgaattctgtgcgccctgtacgtcgtcgtctcaatcttacttgaacttgcagaaggacctacctcagttagctcttag

SEQ ID NO: 188975 - DNA, 1224 bp, synthetic construct
  misc_feature 1..1224: note = Description of Artificial Sequence: Synthetic coding sequence
  source 1..1224: mol_type = other DNA
atgttcagcgtgttcgaggagatcacccggatcgtggtgaaggagatggatgcggggggagacatgatcgcagtgcgatccctggtcgacgctgatagatttagatgtttccatctcgttggagagaagcgaacattcttcgggtgtaggcattacacaacaggccttacactgatggacatcctggacacagatggagataaatggctggatgaacttgactcaggcctccaggggcaaaaggctgagttccaaatcttggataatgtcgattccaccggggagctcatcgtgcggttgccaaaggagattaccatatccggatctttccagggatttcaccaccagaagattaagatctcggagaatcgaatttcacagcagtatctggctaccctggaaaaccgcaaattgaagagggaactcccattcagttttcggtcaatcaacactagagagaacctgtaccttgtgaccgagacgctggagacggttaaggaggagacactgaagtccgatcgacaatataagttctggagccagatcagtcagggccacctttcttataaacataaggggcaaagggaggtgaccatccctcctaatcgcgtgcttagctatagagttaaacagctggtcttccctaataaggaaactatgaacatacattttaggggcaagactaaaagctttccagagggaaagagtttaggaagtgaagatagccggaatatgaaggaaaaattggaggatatggaatcagtactgaaggaccttaccgaggaaaaaaggaaagacgttctgaattccctggccaaatgtttgggaaaagaggacataagacaagacctggagcaacgagttagcgaggtgctgatctcaggagagcttcacatggaggatcccgacaaacctctgttaagcagcctcttcaacgccgccggcgtcttagtggaggcacgcgcaaaagctatcctggattttttggatgccttgcttgagctgtctgaagaacaacagtttgtcgcagaggctttggagaagggtactctccccttgctgaaggatcaggttaagtccgtcatggagcagaactgggatgaactggccagtagcccacctgatatggattatgatcccgaagcccgaatattgtgcgctctgtatgttgtggttagcattctcttagaactagccgaggggccaacttccgtgagcagttag

SEQ ID NO: 188976 - DNA, 1527 bp, synthetic construct
  misc_feature 1..1527: note = Description of Artificial Sequence: Synthetic coding sequence
  source 1..1527: mol_type = other DNA
atgcccagcatgctggagcggatcagcaagaacctggtgaaggagatcggctcaaaggacttgaccccggttaagtacctgttatccgcaaccaaactaagacaattcgtgatactccggaagaagaaggactccagatcaagcttctgggaacagagcgactacgtgccggtcgaatttagcctcaatgatattctggagccaagtagtagtgtactggagactgtggtgacaggcccttttcacttttccgacataatgattcagaagcacaaggctgacatgggggttaacgtcggcattgaagtgagtgtgtcgggggaagcctcagtcgatcacggctgcagcctggaattccagatagtgactatcccatcacctaacctggaagactttcaaaaacggaagctcctggatccagagccatcattcctgaaggaatgtcgacgcaggggtgacaacctgtacgtcgtcaccgaagctgtcgagctgatcaacaacacagtgctgtatgacagtagctctgtgaatattttgggcaaaatcgctctctggatcacatatggcaaagggcagggacagggtgaatctctgcgggttaagaagaaggcgctgacgctgcaaaaaggcatggttatggcttataaaaggaaacaacttgtaataaaggagaaagcgatactgatttcggacgacgacgaacaaaggacctttcaggatgaatacgaaatcagcgaaatggttgggtattgcgctgccagatccgaaggcctccttccatccttccatacgatttcccccaccctgtttaatgctagttcaaatgatatgaaactgaagccggagctgtttctgacacagcagttcctgagcggacacctgcctaaatatgagcaggtgcatatactgccggttggacggatcgaggagcctttttggcagaatttcaaacacctgcaagaagaggtcttccagaagatcaaaaccttggcccagctgagcaaagatgtgcaggatgtgatgttctactccattctcgccatgctgcgtgataggggcgctctccaggatctgatgaatatgctggagcttgactcctctggccatctggatggccccggcggggctattctgaaaaaactgcagcaagattccaaccacgcgtggttcaatcccaaagaccccatcctgtacctcttggaggctatcatggtcttatctgacttccagcacgatcttctcgcatgtagcatggagaaacgtattttactgcaacagcaagagttggtgcggtcaatactcgagccaaacttccgttatccctggtccataccatttacactgaagccagagttgctggcgcctctgcaaagcgaggggttagccatcacatacggcctgcttgaggagtgtggtctgaggatggaactggataacccgagatctacatgggatgtggaggcaaagatgccactcagtgccctgtatggcacattgtcactgctccagcagctggctgaggcttag

SEQ ID NO: 188977 - DNA, 462 bp, synthetic construct
  misc_feature 1..462: note = Description of Artificial Sequence: Synthetic coding sequence
  source 1..462: mol_type = other DNA
atggtggccaccaagaccttcgccctgctgctgctgagcctgttcctcgctgtaggtttaggggagaagaaggagggacacttctccgcactgcccagcctcccggtgggaagtcacgcaaaagtgagcagcccgcagcccaggggaccaaggtatgccgaggggacttttatcagcgattatagcatcgccatggacaaaattcaccagcaggatttcgttaactggttgctagcacagaagggcaagaaaaatgactggaagcacaacatcacacagcgcgaggcacgggccttagaactggctagccaagccaatcgaaaagaggaagaagctgtagagccgcagtccagccccgctaagaatcccagcgacgaggaccttctaagagacctcctaattcaggaactgttggcatgtttacttgaccagacgaacctctgcagattgcggtctagatag

SEQ ID NO: 188978 - DNA, 1401 bp, synthetic construct
  misc_feature 1..1401: note = Description of Artificial Sequence: Synthetic coding sequence
  source 1..1401: mol_type = other DNA
atgaccaccagccccatcctgcagctgctgctgcggctgagcctgtgtggtctgctattgcagcgtgccgagactggcagtaagggtcagaccgcaggcgaactgtatcagaggtgggagaggtatagaagagaatgccaggagacactggctgccgcggaacccccttccggattggcgtgtaacggatccttcgacatgtatgtttgctgggactatgcagctccaaatgctaccgcgagggcgagttgtccatggtacctgccctggcaccaccatgtagcagctggctttgtcttgagacaatgcggatctgacggtcagtggggactgtggagagatcatacacagtgtgagaaccccgagaagaatgaggcctttctcgaccaacgactgatactagaaaggttgcaggtgatgtacaccgtgggttacagcttgagtcttgctaccctactactggcattattaatcctctctttgtttaggcgcctgcactgcaccaggaattacatccatattaacttattcacttctttcatgctcagggcagcggctatcctatcaagggaccgccttctacctaggccagggccttatctcggtgaccaagccttagccctgtggaaccaggcactggctgcctgtaggacagctcagatcgttacacaatactgcgtaggggccaactacacctggttactggtggagggtgtctacctgcatagcctcctggttctagttggtgggtctgaagagggacatttccgctactatctcttactcggatggggcgcccctgccttgttcgtcatcccttgggtgatagtgcggtatctgtacgagaatactcagtgttgggagcggaacgaggtcaaggccatctggtggatcatcagaactccaattctcatgacaatcttgattaacttcctgatctttatcagaattctagggattcttctctcgaagctgagaacacggcagatgagatgtcgcgattaccgcctccggttggcgcggagtacactgaccctcgtaccccttttaggagtgcacgaggtggttttcgcccccgttaccgaggagcaggcacggggggcacttagatttgccaagctcggcttcgagatatttctgtcttcattccaggggttcttagtgtccgttctctactgtttcattaataaggaagtgcagtcagagatccgaagagggtggcaccactgtcgtttacggcgctccctgggagaggaacagcggcaactccccgaacgggcattccgcgcccttccatcaggaagtggccccggggaagtgccaacttctcgcggactctctagcgggaccctacccggaccgggtaacgaggcttcacgcgaactggagtcctactgttag

SEQ ID NO: 188979 - DNA, 1293 bp, synthetic construct
  misc_feature 1..1293: note = Description of Artificial Sequence: Synthetic coding sequence
  source 1..1293: mol_type = other DNA
atgaccaccagccccatcctgcagctgctgctgcggctgagcctgtgcgggctgctcctgcaaagggctgaaaccggatcgaaggggcaaaccgctggggagttataccagcgctgggagcgatataggcgcgaatgccaggagacactagccgccgcagagcctcctagcgtggcggctgggtttgttctgcggcaatgcggcagcgacggacagtggggcttgtggagagaccacacccagtgcgagaaccctgagaaaaacgaggctttcctggatcagaggctgatccttgagcggctgcaggtgatgtataccgtgggctactcactctctctggctaccttgttgttggcccttttgatcctgagcctgttccgccgcctgcactgcaccaggaactacatacatatcaacctgtttacatcatttatgctacgtgccgccgccatcctgtctagggaccggttgctaccacgaccaggcccttacttaggcgaccaagccctggccctctggaaccaggctctggccgcctgtcgcacggctcagatcgtcactcagtactgcgtgggagctaactacacctggttgctcgtggaaggcgtgtacctgcattccttactggttcttgtcggcgggtctgaggaagggcactttcgctactatctgctcctaggctggggggcaccagccttattcgttatcccttgggtgattgtgcggtacctatatgagaacacacagtgttgggaaagaaacgaagtcaaagcaatatggtggatcatacgaactcccattctaatgaccatcctcataaacttcttgatcttcatcagaattctcggtatccttctgtccaagctgaggacccggcagatgcgatgcagagactatagactgcggttggcacgctcaacgctgaccttagtgccgttgctgggagttcacgaagttgtattcgcaccagtgaccgaagagcaggccagaggcgcacttagatttgccaagctgggcttcgagatattcttatctagtttccaggggttcctggtcagcgtactctattgttttatcaacaaggaagttcagagtgaaattcggcgcggatggcatcattgtcggctccggcgtagcctcggcgaggagcagcgacagctccccgagcgtgcctttagggctctgcctagcggaagtggtcctggcgaggttcccaccagcagaggcctgtcctctgggacactgccgggtccaggaaacgaggcctcacgtgaactggagagctattgttag

SEQ ID NO: 188980 - DNA, 1401 bp, synthetic construct
  misc_feature 1..1401: note = Description of Artificial Sequence: Synthetic coding sequence
  source 1..1401: mol_type = other DNA
atgaccaccagccccatcctgcagctgctgctgcggctgagcctgtgtggcctgctcctccagcgggctgagaccggaagtaaggggcagacagctggagaactgtaccagcggtgggagaggtaccgacgcgaatgtcaagagactcttgctgccgccgagccgccgagcggcctggcttgcaacggaagctttgatatgtacgtgtgctgggattacgccgcgcccaatgccacagcccgcgcttcttgcccctggtatttgccctggcaccaccatgttgcagcaggcttcgtgctccgccagtgcggcagcgacggacagtggggtctctggagagatcacacccagtgcgaaaatcccgagaaaaatgaggctttcctagatcagagactgattctcgagcggcttcaggtgatgtacaccgtggggtacagcctttccctcgcgaccctgctcttggccctgctcatactgagcctatttaggcgcctccattgtactcgtaactatatccacatcaatctgtttacatctttcatgctgcgcgctgctgccatcctgtcacgagacaggcttctgccacgtccaggtccttacttaggcgaccaagcactcgccttgtggaatcaggcgttagcagcctgccgtactgcgcagatagtgactcagtattgtgtgggtgccaactacacatggctgctagtggaaggcgtttacttgcactccctcctcgtacttgtgggaggtagcgaggagggtcatttcaggtactacctactcctcggatggggggcccccgctctgtttgttatcccgtgggttatcgtgcgttacctctatgaaaatacccagtgctgggagcggaacgaggtgaaagctatctggtggattattcgcacaccaattttaatgaccattctcatcaactttcttatttttatccgcatcctgggcatcctgctgtctaagttgcgtaccaggcaaatgcgctgtagggactataggctgcggctcgctaggagcacactgactttggtgcctctgctgggtgttcatgaagttgtgttcgcccctgtcaccgaagagcaggccaggggggccctgcggttcgccaaattaggctttgagatatttctgagtagctttcagggtttcctggtgtccgttctgtactgctttataaataaggaggttcaatctgaaatccgccgtggatggcaccactgtaggctgaggcgaagtcttggggaagaacagcggcagctccccgaacgtgcattcagagccttgccttctggatctggccctggggaggtccccacctctcgtggcctgtcctccggcaccctccccggcccgggcaatgaagccagccgggaactggagtcatattgctag

SEQ ID NO: 188981 - DNA, 1254 bp, synthetic construct
  misc_feature 1..1254: note = Description of Artificial Sequence: Synthetic coding sequence
  source 1..1254: mol_type = other DNA
atggcctggttcgccctgtacctgctgagcctgctgtgggccaccgctgggacatcaacgcagacccagtcatcctgctcagtgccctccgcccaagagcccttagtgaacggaatccaggtcctaatggagaattcagttactagttccgcttacccgaacccatccatcctgatagccatgaacctggccggagcatataaccttaaagcccagaaactgctcacataccagttaatgagctcggataacaacgatctgactataggccagctcggtctgacgattatggccctcacctcttcatgtcgggaccccggggataaagttagtatcttgcagaggcagatggagaactgggccccctcctcccccaacgctgaggccagtgctttctatggcccatccctggcgatcctcgccctgtgtcagaagaactccgaggccacattgcctattgccgtaagatttgccaagacactgcttgctaatagctccccattcaatgtcgatactggagccatggccaccctagctctgacttgtatgtacaataaaattccggtgggcagcgaggaagggtatcggtccctgttcgggcaagttctcaaggatatcgtggagaaaatcagtatgaagatcaaggacaatggaatcattggagacatatacagcactggcctggccatgcaggctctatcagtgactccagagccctccaaaaaagagtggaattgtaaaaagactacggacatgatcttgaacgagataaaacaaggtaaattccacaatccaatgagcattgcacagatcctaccgagcctgaagggcaagacttaccttgacgtaccgcaggtgacttgtagtcccgaccacgaagtacagccgactctcccgagcaaccctggtcctggcccaacctctgcttcaaacataaccgtcatttacaccattaataatcagctcaggggggtggagctgctgttcaacgagacaatcaatgtgtcagtaaagagcggctctgttctccttgttgtgctggaggaggcccaaagaaaaaaccctatgtttaagtttgagacaactatgacctcatggggcctggtggtgagtagtattaataacattgctgagaatgtcaaccataagacatactggcagttcctttctggggtgacacctctaaatgagggggtggcagattacatcccttttaatcatgaacacatcacagccaatttcacccagtactag

SEQ ID NO: 188982 - DNA, 1179 bp, synthetic construct
  misc_feature 1..1179: note = Description of Artificial Sequence: Synthetic coding sequence
  source 1..1179: mol_type = other DNA
atggccgtgcccagcgcccaggagcccctggtgaacggcatccaggtcctcatggaaaacagtgtcaccagctcagcctatcctaacccgagtatcttaatcgctatgaatctagctggtgcatataacttaaaggcccagaagctcttgacctaccagttgatgtcgtcggataataatgatctcaccattggccagctggggctgactatcatggcccttactagtagttgccgggatcctggcgataaagtatccattctccagaggcagatggaaaattgggccccatcttcccctaatgccgaggcatccgcgttctatggcccatccctggcaatactggccctgtgtcaaaagaattcggaagcaacactgccaatagccgtccgctttgctaagacactcctggctaattcttccccttttaacgtggataccggagccatggcaacacttgccttgacctgcatgtacaacaagattcccgttgggagcgaggaaggatacagatctttattcggccaggtgctcaaggacattgtcgagaaaatttcaatgaaaatcaaggacaatgggatcatcggcgatatttatagcacagggctcgccatgcaagctctgagcgtgactccagagccaagcaaaaaagagtggaactgcaaaaaaactacagacatgatcctcaacgagatcaaacagggcaagttccacaatcccatgtcaattgcccagatacttccgtcactgaaaggaaagacctacctagacgtaccacaggtgacgtgctcaccagatcacgaagtccagccaaccctgccttccaatcctggccccggccctactagcgctagcaacatcactgtcatatataccatcaataaccagcttcggggcgtagagctcctttttaatgaaactatcaatgtgtccgtgaagtccgggagcgtcctgctcgttgtgttagaagaggcccaaaggaaaaatccgatgtttaagttcgagactaccatgaccagctgggggctcgtggtgtcatccattaataatattgctgagaatgtcaaccacaaaacatactggcagtttctgagtggcgtgacgccactcaacgagggtgtagctgattacatcccctttaatcacgaacacatcacggcaaatttcacccagtactag

SEQ ID NO: 188983 - DNA, 306 bp, synthetic construct
  misc_feature 1..306: note = Description of Artificial Sequence: Synthetic coding sequence
  source 1..306: mol_type = other DNA
atgcagcggctgtgcgtgtacgtgctgatcttcgccctggccctggctgccttcagtgaggctagctggaaaccaagatcgcagcagccagatgcccctctcggtaccggtgccaacagggatctcgaactcccatggctcgagcaacaggggcctgcttcacaccatcggcgtcaattggggcctcaaggcccgccccatctggttgccgatccttccaagaaacagggcccctggctcgaggaggaggaagaagcatacggatggatggattttggaagacgtagtgccgaagatgagaactag

SEQ ID NO: 188984 - DNA, 447 bp, synthetic construct
  misc_feature 1..447: note = Description of Artificial Sequence: Synthetic coding sequence
  source 1..447: mol_type = other DNA
atgcggggccgggagctgcccctggtgctgctggccctggtgctgtgtttggctccgagaggtcgtgctgtgccgctccccgccgggggtgggacagttctcactaagatgtacccaagaggcaatcactgggccgtggggcacctcatggggaaaaagagcaccggcgagtcctcctcagtttccgagcgcgggtctcttaaacagcagctccgggagtatattcggtgggaagaggcagcacgtaacctgctgggtctcatcgaggccaaggagaacagaaaccaccagccccctcagcccaaggcactcggcaaccagcaaccatcgtgggacagtgaagatagctctaactttaaagacgttggctcaaaagggaaggtgggtcggctgagcgctcctgggtcacaacgcgagggccggaatccacagctcaaccaacagtag

SEQ ID NO: 188985 - DNA, 426 bp, synthetic construct
  misc_feature 1..426: note = Description of Artificial Sequence: Synthetic coding sequence
  source 1..426: mol_type = other DNA
atgcggggccgggagctgcccctggtgctgctggccctggtgctgtgcctcgccccccggggtcgggcagtccccctgcccgccggcggcggcaccgtcctcacaaagatgtaccctaggggtaaccattgggccgttggacacctgatgggcaaaaaatcgactggagaatctagctcggtgagcgagcgcggctccctgaaacagcaattgagagaatatattcggtgggaggaagcagcccggaaccttctgggcctgatagaggccaaagagaaccggaaccatcagccaccacagcccaaggctctggggaatcagcagcccagctgggactctgaggattcttctaactttaaagatgtgggcagcaaagggaagggaagccagagggaaggccgaaatccccagctgaatcagcagtag

SEQ ID NO: 188986 - DNA, 417 bp, synthetic construct
  misc_feature 1..417: note = Description of Artificial Sequence: Synthetic coding sequence
  source 1..417: mol_type = other DNA
atgcggggccgggagctgcccctggtgctgctggccctggtgctgtgcttggcccccaggggacgggcagtccccctgccagctggaggggggaccgtcctaaccaaaatgtaccccagaggtaaccattgggcagtgggccacctaatgggcaaaaaaagtaccggagaatcttccagcgtttcagaacgagggtccttgaaacagcaactgcgggaatacattaggtgggaagaggcagcccggaacttgctcggcttgatcgaagccaaggaaaacagaaatcaccagccaccacagcctaaggccctcggaaatcagcaaccctcctgggattcggaagattcctcgaacttcaaagatttggtagatagtctgctccaagtattaaatgtgaaagagggtacaccctcgtag

SEQ ID NO: 188987 - DNA, 1155 bp, synthetic construct
  misc_feature 1..1155: note = Description of Artificial Sequence: Synthetic coding sequence
  source 1..1155: mol_type = other DNA
atggccctgaacgactgcttcctgctgaacctggaggtggaccactttatgcattgtaacataagcagccacagcgccgacctgccagtgaacgacgactggagtcatcctggaattctatacgtaatacccgcagtctatggcgttattatccttattggcctaatcggcaatattacgctgataaaaatattttgtacggtgaaatcaatgaggaacgtcccaaacctgtttattagttccctggcgttaggtgacctgctgctgctgattacctgtgcaccagtcgacgcatcccgctatctcgccgacagatggctcttcggtcgcattggatgtaagctgatcccattcatccagctcacgagtgtgggcgtgagcgtcttcacgctgactgccctctctgcagataggtacaaggctattgtccgccccatggatatacaggcttcgcacgcccttatgaagatttgtctgaaagcagcattcatctggatcatttccatgctgctcgcaattcccgaagccgtgttcagcgatttgcatccgtttcatgaggaatctactaatcaaactttcatctcttgtgcaccatatccccatagtaatgagctgcacccaaagattcatagtatggctagctttctagtgttctacgtcatacccttatccatcatctccgtctattattacttcattgctaagaatctgatccagtctgcttacaaccttccggtggaagggaatatccatgtaaaaaagcagatagaatcccggaaaaggctagcaaagaccgtccttgtgttcgtgggtttgttcgccttttgttggcttcctaaccacgttatctatctatatcgcagctatcactacagtgaagtggacacttcgatgttgcactttgttacatccatatgcgcccgcctcctggccttcaccaactcctgtgtgaatcctttcgcgctgtacctcctgtctaagagcttcagaaaacaattcaacacacagttactctgttgccagcctggactgatcattcgcagccatagcactgggaggtcaacgacttgtatgacttctctgaaatcaaccaacccttctgtggcaacgttctctctgatcaacggtaatatctgtcacgaaagatatgtgtag

SEQ ID NO: 188988 - DNA, 480 bp, synthetic construct
  misc_feature 1..480: note = Description of Artificial Sequence: Synthetic coding sequence
  source 1..480: mol_type = other DNA
atggccagcttcctggtgttctacgtgatccccctgagcatcatcagcgtttactactattttatagccaagaacttaatacaatcagcttataacttgccagtggaaggaaacatccacgtgaagaaacaaatcgagtccagaaagcgactggctaaaacagtgttagtttttgtcggactctttgccttctgttggctgcccaaccacgttatctatctctatagatcatatcactatagtgaagtcgatacttctatgctgcacttcgttacctcaatctgtgccagactgctggccttcacaaatagttgcgtgaatccatttgccctttatctactgtcggaattccaggagacagtgcagcactcagccgccctgctccccgcttggcctgaccacccggtgagccagcattggaaggagtataacctgcacgatttgccacaggagtatcagcctctcagaggtcatctttag

SEQ ID NO: 188989 - DNA, 600 bp, synthetic construct
  misc_feature 1..600: note = Description of Artificial Sequence: Synthetic coding sequence
  source 1..600: mol_type = other DNA
atgctggcctacagcagcgtgcactgcttccgggaggacaagatgaagtttacaatcgttttcgcgggattgctgggcgtgtttcttgccccagccttggcaaattacaacataaacgttaatgacgacaacaacaacgctggatccggccaacaaagcgtgagcgtgaataacgagcataacgtagctaatgttgataataacaacggctgggacagctggaactctatctgggactacgggaacggtttcgcagctaccagactgttccaaaagaagacttgtatagtacataagatgaataaggaggttatgccctcgattcagtctctggatgctttggtcaaggagaagaagctccagggaaaggggcccgggggaccgcctcctaagggcctcatgtactcagtgaacccaaacaaggtggacgatctttcaaagttcggcaagaacatcgctaatatgtgcaggggtattccgacatacatggctgaggaaatgcaggaagcaagtctcttcttctactctggtacctgctacactacaagtgttttgtggatagtcgatatttccttttgcggtgacaccgttgaaaactag

SEQ ID NO: 188990 - DNA, 1092 bp, synthetic construct
  misc_feature 1..1092: note = Description of Artificial Sequence: Synthetic coding sequence
  source 1..1092: mol_type = other DNA
atgcagcgggccggcggcggcagcgcccccggcggcaacggcggcggcggaggcggcggaccaggtacagccttctcgattgacagcttgattggacctcccccccctcgcagcggacacctgctctacacaggttaccccatgtttatgccctataggcccctggttctcccacaggccctggctcctgctcctctcccagccggcctgccccccctcgctcctctggccagctttgccggaaggctgacgaacactttttgtgccggcctgggccaggctgtcccaagcatggtggcattgactacagccttgccttcctttgccgagcctcccgatgccttttatggcccccaggaactggccgccgctgcagccgccgccgccgccaccgccgctaggaacaatcctgagccgggggggcgccgacccgagggaggattggaggccgatgaactgctgcccgcccgcgaaaaggttgccgaaccgccacctccccctccaccacatttttcagagacatttccttccttgcccgccgagggtaaggtctacagcagcgacgaggaaaaactggaagcttctgctggtgatcccgcggggagtgagcaggaggaggaaggctctggtggagacagtgaagatgatggatttctggattcatccgctgggggcccaggtgcactgttgggcccaaaacccaaactaaagggaagcctaggaacaggtgctgaggaaggagccccggttactgcaggggttaccgctcccggcggcaagtcacgccgaagaaggaccgcttttactagtgagcagcttctggagcttgagaaagaatttcactgcaagaagtacctgagcctgacagaacggtcccagattgcgcacgccttgaaactcagcgaggtgcaggtgaaaatctggtttcagaacaggagggctaagtggaaaagaatcaaggccggcaacgtgagcagtaggtccggagagcctgttaggaatcccaaaattgtggtgcccattcctgttcacgtgaatcgattcgctgtacgtagccagcaccaacagatggagcagggggcgcgaccatag

SEQ ID NO: 188991 - DNA, 1047 bp, synthetic construct
  misc_feature 1..1047: note = Description of Artificial Sequence: Synthetic coding sequence
  source 1..1047: mol_type = other DNA
atgagcgccgccttcccccccagcctgatgatgatgcagcggccccttggatccagcacagcgttctccattgactccctgatcggctctcctccacaaccaagtcccggacattttgtctataccgggtatcctatgttcatgccctacaggcctgtcgtgctgccaccccccccaccaccacctcccgctctgccacaggcagcccttcagcccgcattgcccccagcacatccacatcaccagatcccgagtctgcccaccggcttctgcagtagcctggcacaagggatggcactgaccagcacccttatggcaaccctgccaggcggttttagcgcatctccacagcatcaggaggccgccgcagccaggaaatttgcccctcagcctctcccaggcggcggaaactttgacaaggccgaggcgctgcaggccgatgccgaagatggaaagggtttcttagctaaggaggggtcattgctggcttttagtgccgctgaaactgtccaggcatccctggtgggcgcagtcagggggcagggcaaggatgaatccaaagtcgaagatgaccccaagggtaaggaagagtccttcagcctcgagtcagatgtcgattacagctccgatgataacctgacgggtcaagctgcccataaggaagaagatcctggccacgccctggaggaaacccctccatcctcaggagctgctggaagtacaaccagcacagggaagaatcgaagacgaaggactgctttcacctcagagcaacttttagagctggagaaagagttccattgcaagaagtacctcagcctaaccgaacgctcccagatcgctcacgcattaaaactgtccgaagttcaggtcaagatttggtttcaaaacagaagggccaagtggaagagagtaaaagctggaaacgcaaactcaaagactggcgagccatctagaaaccctaaaattgtcgtgcctatcccggtacatgtctcacgattcgcaatccggtcccagcaccaacagcttgagcaggcgcggccatag

SEQ ID NO: 188992 - DNA, 1443 bp, synthetic construct
  misc_feature 1..1443: note = Description of Artificial Sequence: Synthetic coding sequence
  source 1..1443: mol_type = other DNA
atggaggtggcccccgagcagccccggtggatggcccaccccgccgttctgaacgctcaacatcccgactcgcaccaccccggcctggcacacaactacatggaaccagcccagctcctcccccctgacgaagtcgacgtgttcttcaatcacctggacagccagggcaacccatattatgccaaccctgcccacgcccgcgccagagtcagttattcccctgctcacgctcgtttgactggaggtcagatgtgccgtccccacctcttacattcacccggactcccttggttagacggcggtaaagccgccctgtcggccgccgccgctcaccaccacaacccctggactgtgtcaccttttagtaaaacacctttgcacccatccgccgcaggtggccctggtgggcccctgtcggtgtatccaggcgcggggggcggcagtggcggaggaagcggcagcagcgttgcctctttaacccccaccgccgcacactcgggttcacacttgtttggtttccccccaacaccccccaaggaggtgagcccagacccaagcacaaccggggcggctagcccagcgtcctcctcagcaggcgggtcagcagctaggggagaagataaggacggggtaaaataccaagtgtctttgactgagagcatgaagatggagtccgggagccctcttcggccgggcttggccactatgggcacgcaacctgcaacccaccaccctattcccacttaccctagctacgtgccagcggccgcacacgattactccagcgggttgttccatcccggagggtttctcggtggtcccgcctcttcattcactcctaaacagaggtccaaggcccgctcttgttccgagggaagggagtgcgtcaattgcggagccaccgcgacccccttatggcggagggacggcaccgggcactatctgtgtaatgcctgtggactgtaccacaaaatgaacggacaaaatagacctctcatcaaacccaaaagacggttatccgccgccagacgggcaggcacctgctgcgccaattgccagaccacaaccactactttgtggagaaggaacgctaacggcgaccccgtctgtaacgcctgcggcttgtattacaaactgcacaatgtaaataggccactgaccatgaaaaaagagggcatccagacaaggaataggaaaatgtccaataagagcaagaaatcaaaaaagggggcggaatgtttcgaggaattaagcaagtgtatgcaggagaaatcaagtcctttttccgctgccgctcttgctggccatatggcacctgtgggccatctgccaccattttcacattctggccacatcctcccaacccctacacctattcatccctccagctctctgtccttcggacacccgcatccaagcagcatggtcaccgctatgggctag

SEQ ID NO: 188993 - DNA, 1401 bp, synthetic construct
  misc_feature 1..1401: note = Description of Artificial Sequence: Synthetic coding sequence
  source 1..1401: mol_type = other DNA
atggaggtggcccccgagcagccccggtggatggcccaccccgccgtgctaaatgctcagcaccctgacagtcatcatcccgggctcgcacataactacatggaacctgctcagctgctgccgccggacgaagtggatgtcttttttaaccacctcgactcacagggtaacccatattacgccaatcccgcccacgcccgcgctcgagtgtcttacagtccagcacacgcgcgcttgacagggggccagatgtgtcgccctcatctgctccattccccgggattgccctggctggatggcggtaaagctgcactgagcgcagccgcagcacatcaccacaatccgtggacggtaagcccatttagcaagacaccgctgcatcccagcgcagcaggggggccaggcgggccgctctcagtctacccaggcgccggcgggggctcaggcggtgggtctggaagctctgtagctagcctgacccctaccgccgcccactctggcagccacctgttcggctttccaccaacaccacccaaggaggtttcaccagacccgtccacaacaggtgcagcctcacccgcatcatcgtccgccgggggtagtgcagcaagaggcgaggacaaagacggggtgaagtaccaggtttctttgactgagtcaatgaaaatggaatctggatctcctctccgcccgggactagctactatggggacacagccagctacacatcaccccattccaacttacccaagctacgtcccagcagctgcacacgactactcgagtggactgtttcatcccggcggctttctaggtggtcctgccagcagttttacacccaagcagcgcagtaaagcacgctcatgttcagagggtagagagtgcgttaattgcggcgccactgccactccgctgtggcgtagggatggtaccgggcactacctctgtaacgcctgcgggctttaccataaaatgaatgggcagaaccgccctctcatcaagcccaaacggcggctcacaactaccaccacactgtggaggaggaacgctaacggcgacccggtgtgtaacgcctgtggcctgtattacaaactccataatgttaatcggcccctaactatgaaaaaagagggaattcagacccgaaaccgcaagatgtcaaataaatctaaaaaaagcaagaaaggcgctgagtgtttcgaagagctttctaaatgcatgcaggagaaatccagtcccttctctgctgcagctctagctgggcatatggctccagtggggcacctgcctcccttctcccatagcggacacatcctgccgaccccaacacctatccacccatcttcctcattatccttcgggcaccctcacccatcaagcatggtgaccgctatggggtag

SEQ ID NO: 188994 - DNA, 1443 bp, synthetic construct
  misc_feature 1..1443: note = Description of Artificial Sequence: Synthetic coding sequence
  source 1..1443: mol_type = other DNA
atggaggtggcccccgagcagccccggtggatggcccaccccgccgttctgaacgcacagcatccagactcacaccacccaggcctggcgcataattatatggagccagctcagctcctgccccccgatgaggtagatgtgttcttcaatcatctggattcgcagggaaacccttactacgctaatcccgctcacgctagggcgagggtcagctactcacccgctcatgccaggctgactggaggacagatgtgccggccccatctgcttcattcccctggcttgccttggctggatggcgggaaggcagcacttagcgcagctgcagcccatcaccataatccatggaccgtgtccccgttttccaagactccgctgcacccatccgctgccggcggccctgggggtccactgtctgtttaccctggggccggaggaggttctggggggggatcggggagctccgtggcaagcttaacacccacggccgcccactctggcagccacctttttggctttcctcctactccccctaaagaggtgtcccctgacccttctacaacaggcgccgctagcccagcaagtagcagtgccggcggctcggctgcaaggggcgaggacaaggacggagtcaaataccaggttagcctcacggaatctatgaaaatggagtcgggatctcctctgcgaccaggcctggcaacaatgggcactcagccggccacccatcaccctatacctacataccccagctacgtgccggccgccgctcacgactattctagcggcctcttccacccgggagggttcctgggtggaccagcgtcttctttcaccccaaagcagcgcagtaaagctcgctcctgctccgagggtagggagtgcgttaactgcggcgccactgcaactcctctgtggcgccgcgatgggacgggtcactatctgtgcaatgcgtgtggactctaccacaagatgaacggccagaacaggcctttaataaaaccaaaaagacgattaagcgctgctcgcagggctggaacttgctgtgcaaattgccagactacaacaaccaccctgtggaggaggaacgcaaatggcgatcctgtgtgcaacgcttgcgggctgtattataaactacataatgtcaaccgtcccttgacgatgaaaaaagaaggtatacagaccaggaatcggaagatgtctaacaaaagcaaaaagtctaaaaagggcgccgaatgttttgaagaacttagcaagtgcatgcaagagaaaagctctcctttttccgcggccgcactcgcgggccatatggccccggtgggccaccttccaccgtttagccacagcggacatattctccccacccctacccctatccacccatcaagctctctttccttcggtcacccccatccttcttccatggtaacagcgatgggatag

SEQ ID NO: 188995 - DNA, 453 bp, synthetic construct
  misc_feature 1..453: note = Description of Artificial Sequence: Synthetic coding sequence
  source 1..453: mol_type = other DNA
atggaggtggcccccgagcagccccggtggatggcccaccccgccgtgctcaacgcacagcacccagatagccaccacccaggactggctcataactacatggagccggcacagctgttaccccctgacgaagtggacgtgttttttaatcatttggatagccagggcaacccatactatgctaatcccgcacatgcccgggccagagtgtcttactctccagcccacgcaagattgaccgggggacagatgtgtcgtccccacctcttgcattctcccggtctgccgtggctggacgggggaaaggccgccctatcggcggccgcagcccaccaccataatccatggaccgtttcacccttttccaaaacgcccttgcatcctagcgcagccggtggcccaggaggacctctgtctgtttatccaggggcaggcggcggatcagggggatag

SEQ ID NO: 188996 - DNA, 27 bp, synthetic construct
  misc_feature 1..27: note = Description of Artificial Sequence: Synthetic coding sequence
  source 1..27: mol_type = other DNA
atggaggtggcccccgagcagccctag

SEQ ID NO: 188997 - DNA, 1326 bp, synthetic construct
  misc_feature 1..1326: note = Description of Artificial Sequence: Synthetic coding sequence
  source 1..1326: mol_type = other DNA
atgtaccagagcctgccctggccccccaccaccggccggccccccgtgccaactaggagagcagccccagccccttcatgtactgcccgggccccacgccccagacagtccacctgcccccacaggggggccctgctccgggcaggacctgtgctccctcccgggcggcgtcgggggttatgtgttaggcgggctagcggaggctccagcggtggtgcggcgtccggggcgggacccggcacgcaacagggcagtcccggatggtctcaggccggggccgatggggctgcttataccccgccacccgtgagcccccgcttttctttcccaggcaccactgggagtctggctgccgcagccgccgcagcggctgccagggaggcggctgcctacagcagtggtggaggcgccgcaggagccggcttagccggccgcgaacaatacgggcgagcaggttttgccgggagctacagtagtccatatcctgcctatatggcggatgtgggcgcctcatgggcggccgccgcggctgcaagcgccggccccttcgactccccagtgcttcactcactccccgggagagccaaccccgcggcacggcatcccaatctggacatgtttgatgatttttcagaaggccgcgagtgtgtcaattgtggagctatgagtacccccctgtggcggcgtgacggaaccgggcactatctgtgtaacgcctgcggtctgtatcataagatgaatggcatcaatcgccctctgatcaagccgcagcgtcgtctatccgctagtcgccgcgtaggattgtcctgtgctaattgtcaaaccactacgacaacactctggaggcgaaacgccgaaggggagcccgtctgcaacgcctgtgggctctatatgaagctgcacggagtgccgcggcctctcgccatgagaaaggagggcatacagacacgcaagcggaagccaaagaacttgaacaaatctaaaacccccgccgcaccctcaggaagcgaaagcctgcctcccgcaagtggggccagcagtaattccagcaacgctaccacgagctccagtgaggagatgcggcctatcaaaactgagccaggactgagctctcactatgggcactcttctagcgtctcccagacctttagtgttagtgcgatgagtggacacggaccctccatccatccagtgctgagcgccctcaagctgtcgccacaaggatacgcctctccagtgagccagagcccgcaaacttctagcaagcaggactcttggaattctctagtcctggctgattcccatggcgacatcataaccgcctag

SEQ ID NO: 188998 - DNA, 1329 bp, synthetic construct
  misc_feature 1..1329: note = Description of Artificial Sequence: Synthetic coding sequence
  source 1..1329: mol_type = other DNA
atgtaccagagcctggccatggccgccaaccacggccccccccccggagcatatgaggcaggtggacctggcgcattcatgcatggagccggggccgctagctctccagtttacgtgccaaccccaagggtgccctcctcagtcctgggtttatcatatcttcaaggggggggtgccggctccgctagcggaggagctagtgggggatcctccggcggagccgcaagtggcgcagggccgggtactcagcaaggcagccccgggtggagccaggctggggccgatggcgccgcctacacccctccccctgtaagtcccaggttttcattccccggcacaacagggtccctggccgccgccgcagccgccgcagctgctagggaggccgccgcctatagtagcggcggtggagccgcaggtgctggcctggcaggccgggagcagtacgggagagccggatttgccgggagctactcgtccccctatccggcctacatggcggatgtgggcgcaagttgggctgccgctgcggcagctagtgctggccccttcgatagtcctgtactgcattctctgcccggtagagccaatccggctgctaggcatcccaatctggacatgtttgatgatttcagcgaaggccgagaatgcgtaaattgcggtgccatgagcacgcccctttggagacgcgacggcaccggccattacttatgcaacgcctgtggtctgtaccataaaatgaacgggattaaccggcctttaattaaaccgcagcgtcgcctctccgcaagcagaagggtggggctttcttgtgcgaattgccagacaacaacgaccacgctgtggcgccggaacgctgaaggggaacctgtatgcaacgcctgtggattgtacatgaaactgcacggtgtccccagacccctcgccatgcggaaagaggggattcagacccggaaaaggaagcctaagaaccttaacaagtcaaaaaccccagctgctccgagtggtagcgaaagcctcccacccgcttccggagcctcgtcaaattcatccaatgcaactacgtcttcctctgaggaaatgagaccgatcaaaaccgagcctggcctgagttcacactatggccattctagctccgtgagccaaaccttttcggtttctgccatgagtggccatgggccttcaatacaccctgtgctatctgcactcaaactgagcccacaaggatacgccagccctgtgtcccagtctcctcagactagcagcaaacaggacagctggaattctctggtgttggccgattcccacggggatattatcactgcttag

SEQ ID NO: 188999 - DNA, 528 bp, synthetic construct
  misc_feature 1..528: note = Description of Artificial Sequence: Synthetic coding sequence
  source 1..528: mol_type = other DNA
atgttcgacgacttcagcgagggccgggagtgcgtgaactgcggcgccatgagcactcctctctggcggagggacgggaccggccattatctgtgtaatgcttgcgggctgtatcacaagatgaatgggattaatcgacctttgatcaagcctcagagacggttgagcgcctcacgccgcgttggtttgagttgtgccaactgtcagactactacgactactctgtggaggaggaatgctgagggtgaacccgtctgcaatgcgtgcggtctgtatatgaaactccacggtgttcctcggccacttgctatgcgtaaggaaggcatccagactcgcaagaggaagccaaagaacctcaacaaatccaagacaccggccgcaccaagcggcagcgaatctcttccacccgcatcaggagctagttctaattcctcaaatgcaacaactagtagttctgaagaaatgcgacccataaaaactgagcccgggctgtccagccactatggacactctagcagcgtttcatag

SEQ ID NO: 189000 - DNA, 354 bp, synthetic construct
  misc_feature 1..354: note = Description of Artificial Sequence: Synthetic coding sequence
  source 1..354: mol_type = other DNA
atgtaccagagcctggccatggccgccaaccacggccccccccccggggcctacgaggctggcggacccggcgcatttatgcacggcgctggcgccgcctctagcccagtatacgtacctacaccaagggtcccaagcagcgttctgggcctctcatatctgcagggaggtggagccggtagcgccagcgggggcgcttccgggggtagcagtgggggagcggcgagtggggcaggtcccggaactcagcagggctcacccggatggtctcaggcgggggctgatggtgccgcgtacaccccacctcccgtttccccccggttctcatttccaggcacgacagggagcctgtag

SEQ ID NO: 189001 - DNA, 711 bp, synthetic construct
  misc_feature 1..711: note = Description of Artificial Sequence: Synthetic coding sequence
  source 1..711: mol_type = other DNA
atgttcgacgacttcagcgagggccgggagtgcgtgaactgcggcgccatgtccactccgctgtggagacgggacgggacaggccattacctgtgcaatgcttgtgggctgtaccataagatgaatggtatcaataggccacttattaaaccacagagaagattgtcggcgtcgcggcgtgtcggcctgagttgtgccaactgtcagacaaccacaaccactttgtggaggcgaaatgctgaaggagaacctgtttgcaatgcttgcggcctctacatgaaactgcatggggtgccgcgccccctggctatgcgaaaggagggcattcaaacaaggaagcgtaagcctaagaatctgaataagtcaaaaaccccagcagcacccagcggcagtgagtcactgcccccggcctcaggcgcctcttctaacagctcaaatgctactactagctcttctgaagagatgcggcctatcaagacagagccagggctctccagtcactacgggcacagttcttcggtctcgcagaccttttcagtatcggccatgtcgggacatggtccttcaattcatcccgtgctcagtgcacttaagttaagccctcagggctacgccagccccgtgtcccagtccccgcaaacttcatccaaacaggatagctggaacagcctcgtacttgccgacagccatggtgatattatcactgcatag

SEQ ID NO: 189002 - DNA, 1332 bp, synthetic construct
  misc_feature 1..1332: note = Description of Artificial Sequence: Synthetic coding sequence
  source 1..1332: mol_type = other DNA
atgtaccagagcctggccatggccgccaaccacggccccccccccggcgcttacgaagccggcggccctggagcctttatgcatggcgcgggtgccgcctcatccccagtgtacgttcctacaccccgcgtgcccagctccgtgctcggcctgagctacctccaggggggtggagctggatccgcttctggaggcgcgtcaggcgggtccagcggcggggcagccagcggggcagggcccggtacacagcaggggagccccggctggtcccaggccggggcggatggtgcagcctacacacccccaccagtgagcccacggttcagttttccaggcaccaccggttccctcgcagcagccgcggccgccgccgctgcaagagaagcagctgcctactcttcagggggaggggccgctggagcaggcctggcagggcgggaacagtatggcagagcaggtttcgccggaagttacagcagcccatatccagcatacatggcagacgtcggagcttcttgggccgctgcagctgctgccagtgccggtccattcgattctccagtgctgcatagcttgcccggccgagccaaccccgccgcccggcatcctaacctcgtggatatgtttgacgatttctcagaggggagggagtgtgtgaattgtggtgctatgtctacccctctttggcgccgggacgggacgggtcactatctctgtaacgcctgcggcttgtaccataagatgaacggtattaatcggccactcatcaagccacagagacgcctgagtgcaagcagacgagtcggcctgtcctgcgcgaactgccaaacgaccaccaccacactgtggaggcgcaatgccgaaggggaacctgtgtgcaatgcttgcggattatacatgaagctgcacggggtccccagaccactcgccatgaggaaagaaggaatacagactcggaagcgaaagcccaagaacttaaacaagtcaaaaacccctgcggctccatccggttccgagtctctgcctcctgcatctggagcttcctcgaacagttcaaatgcaacaacttcctcttctgaagaaatgaggccaattaagactgaacccgggctgagttctcactatggtcattcaagcagtgtgagtcaaaccttctctgtgagcgcgatgtcaggtcacgggccctcaatccaccccgtgctgagcgcacttaaactgtccccccaaggctatgcaagccccgtcagtcagagcccacagacctccagtaagcaggactcttggaacagcctcgtgctggctgacagccacggggatatcattacggcttag

SEQ ID NO: 189003 - DNA, 1194 bp, synthetic construct
  misc_feature 1..1194: note = Description of Artificial Sequence: Synthetic coding sequence
  source 1..1194: mol_type = other DNA
atgtaccagagcctggccctggccgccagcccccggcaggccgcctatgctgattccggatcctttctgcatgcgcctggagctgggagccctatgtttgtcccacccgcgcgggtgcccagtatgttaagctatctctccggatgcgagccctccccgcagccccctgagcttgctgctaggccagggtgggcccagaccgccaccgcagattctagcgccttcggtccaggcagcccacatccaccggccgcacatccccctggcgcaactgcatttccatttgcccattcgccttccgggccagggtccggggggagcgctggcggccgagatgggtcggcctatcagggcgccttactgccccgtgagcagtttgccgccccactcgggcggcccgtgggtacgtcatactctgcgacttaccctgcttacgtgtcgcctgacgtggctcaatcctggactgccggtccattcgatgggtcagtccttcatggactccccggtcgacggccgacttttgtatcggatttcttggaggagtttcctggagaagggcgcgagtgcgtgaattgtggagctctgagtaccccattgtggcgccgggatggcacagggcactatctctgcaacgcctgcggactgtaccataaaatgaacggtgtcaatcgaccattggtgagaccacagaagaggctatctagctcgcgacgtgcaggcttgtgctgcacaaattgtcacactaccaataccacactctggcggcggaattcagagggcgagcctgtgtgtaacgcgtgcgggttgtacatgaagctgcacggggtgccacgaccattggctatgaagaaagagtccattcagactaggaaacggaagccaaagacaattgcaaaggcgaggggttctagcggcagcacacggaatgctagtgcatccccctccgccgtcgccagcaccgactcctctgccgcaacatccaaagctaagccttccctggcctccccagtctgcccaggcccctcgatggctcctcaagcatctggacaggaagacgacagcctagccccgggacacctggagtttaagtttgaacccgaggacttcgcgtttcctagcaccgcgccgtctccccaggccggcttgcggggcgccttgaggcaagaagcctggtgcgctctggccttggcttag

SEQ ID NO: 189004 - DNA, 1194 bp, synthetic construct
  misc_feature 1..1194: note = Description of Artificial Sequence: Synthetic coding sequence
  source 1..1194: mol_type = other DNA
atgtaccagagcctggccctggccgccagcccccggcaggccgcctatgcagactccggtagttttcttcacgcccctggcgcgggctccccgatgtttgtacctcctgcccgagtgccttctatgctttcctacctctccggctgtgagccctctccccagccacctgaactcgccgccagacccggctgggcacagacagccacggccgactctagtgcttttggccctgggagcccccaccccccggcagctcaccctccaggagccactgcattccctttcgcccactccccttccgggcctggatcagggggatccgcagggggtcgggatgggtccgcttaccagggggctcttttgccaagagagcaattcgctgcaccactcggacggccagtgggtacctcctacagtgcaacatacccggcttatgtgtctcctgatgtggcccagtcatggacggccggacctttcgatggctccgtgctgcatggcttgcctggccgcagacctacttttgtatcagacttcctagaggagttcccaggtgaagggcgggagtgcgtcaattgcggtgccctctcaacccctctgtggcggcgggatggaactggccactacttatgtaacgcttgtggcctctatcacaagatgaacggggtcaatcgacctctagtacggccccagaagaggctctcctcaagtcgaagggccggactctgctgtacgaattgtcataccactaacacaacattgtggagacgcaacagtgagggtgaaccagtgtgcaatgcatgcgggttatacatgaagttgcatggcgtgccccgccccctggccatgaagaaggaaagtattcagacgcgcaagagaaaacctaaaacaatagccaaagcacgcggcagcagtgggtccacacgcaatgcaagcgcttctccctccgctgtcgcttcaacggatagcagcgctgccacatccaaggccaaaccgtcgctggctagtcccgtatgcccaggaccatccatggctcctcaggcttctggccaggaggacgactcgcttgcccctggccacttagaatttaagtttgagccagaggacttcgcctttccatctaccgcaccctcccctcaggctggtctcagaggtgccctcagacaggaggcctggtgtgcactcgctttagcttag

SEQ ID NO: 189005 - DNA, 1254 bp, synthetic construct
  misc_feature 1..1254: note = Description of Artificial Sequence: Synthetic coding sequence
  source 1..1254: mol_type = other DNA
accgccaccgccgtgccctgccggcccccctgccccctggtgaagaccactcctggtcggatgtatcagagcctcgccctggctgccagcccccgccaggctgcctacgctgacagtggttcatttttacatgcaccaggcgctgggtcccccatgtttgtgccgccagcacgagtgccttccatgttgagctacctgtcgggatgtgaaccttccccacaaccccctgagctcgccgctagaccaggatgggcccagacagcgacagcggacagcagtgcgttcggacctgggtccccccacccccccgccgctcatccacctggtgctaccgccttcccgttcgctcactccccctctggtccaggtagcggcggttctgcgggagggcgcgacgggtctgcctaccagggggcgctcctgcctcgggagcaattcgccgcccctttaggacgtccagtcggaaccagctattccgccacctaccctgcatacgtttcacctgacgttgcccaaagttggacagctggaccattcgatggctctgtgctgcacggcctacccggacgccgccccaccttcgtgtctgacttcctggaggagttcccaggggaaggccgcgagtgtgtgaactgcggtgccctgtcgaccccgctgtggcgtcgggacggaactgggcattacctttgtaatgcgtgcggcctgtaccacaagatgaacggagtcaaccgcccccttgttaggcctcagaagcgacttagctcaagccgcagagctggcctgtgctgcacaaactgtcacaccaccaacacgaccctgtggcgacgaaatagcgagggagagcccgtgtgtaacgcctgcggtctatatatgaagcttcacggagtgcccaggccgctcgctatgaagaaagaatcaatccagacgcgcaaaagaaaacccaaaactattgctaaggctcgcggatccagcgggagcaccaggaatgctagcgcctccccaagtgctgttgcttctactgacagctctgccgctacctccaaagcaaaacctagcttggcttcccctgtatgcccaggaccttccatggccccacaggccagcggccaagaagacgattcgctggctcctggccatctcgagtttaagttcgagccagaggattttgctttccctagcaccgcaccatcccctcaggctggcctccgtggcgccttgcgtcaggaggcatggtgtgctcttgctctagcctag

SEQ ID NO: 189006 - DNA, 1788 bp, synthetic construct
  misc_feature 1..1788: note = Description of Artificial Sequence: Synthetic coding sequence
  source 1..1788: mol_type = other DNA
atggccctgaccgacggcggctggtgcctgcccaagcggttcggcgccgcgggtgccgatgcttccgactcccgcgcgttccctgctcgcgagcccagcacgccaccctcaccaatctcatcctcctcttcctcttgctcacgcgggggcgagagggggccaggaggtgcttccaattgcgggaccccacaacttgatacagaagcggcagccggacctcccgccaggagcttactgctgagtagttacgcatcgcaccccttcggcgcgccacatgggccctctgccccgggagttgctggccctggcggaaatctaagttcttgggaagacctgctgttgtttacagatcttgatcaggctgccactgctagtaagcttctgtggagctctaggggcgctaaactgagtccttttgcccccgaacaacctgaagagatgtaccagacactggcagcgctgagcagtcaggggcctgccgcatacgatggagcacctggtggctttgtccatagcgctgcggcagcagccgcggccgcggccgccgctagttctccagtgtatgtaccgacaacacgagtgggaagcatgcttccggggctgccttatcatttgcagggttctggctcaggacccgcaaaccatgctggcggcgctggtgcccatcctggctggccacaggcatctgctgatagcccgccttatggcagtggggggggcgccgctgggggcggagccgcgggcccaggtggcgctggaagcgctgccgcacacgtcagcgcccgcttcccttactctccgagtcccccgatggccaacggagcagctcgagaacccggcggctatgccgctgctggcagcgggggcgcgggcggagtcagcggcgggggatctagcctcgccgcaatgggggggcgggaacctcagtattcatccttgagcgctgctagaccgttgaacggaacttaccaccatcatcaccatcaccatcaccaccaccctagcccttacagcccatacgtgggcgctcccctcactccggcctggcctgccgggcccttcgagactccggtcctgcattctctccagtcgcgcgccggagcccccctgcctgttccaagagggccaagcgccgatctgctggaggacttaagcgagagtagggagtgcgtgaactgcgggagcatacagacacctctttggaggagggacgggaccggccactatctatgtaatgcgtgtgggttatattctaagatgaacgggctctcaagaccactcataaagccccaaaagcgcgttccatcatccagacgacttggcctaagctgcgcgaactgccacactactacaactaccctctggcgaagaaatgcagagggggagccagtgtgtaacgcttgcggcttatacatgaaactccatggtgtgccgcggcctctggcgatgaagaaggagggcatccaaacaaggaagcggaagcccaagaatatcaacaaaagcaaaacctgcagcggcaattcaaacaacagtattcccatgactcctacgagcacatcctctaattcagatgattgctccaaaaacacctccccaaccacacagccaactgctagcggggccggcgccccggttatgaccggtgctggcgaaagcactaatccagaaaactcggagttaaagtactctggtcaggatggactgtatatcggagtatcactcgcctctcccgccgaagttacatccagcgttcggcctgacagctggtgtgcgctggccctcgcttag

SEQ ID NO: 189007 - DNA, 8016 bp, synthetic construct
  misc_feature 1..8016: note = Description of Artificial Sequence: Synthetic coding sequence
  source 1..8016: mol_type = other DNA
atggccgccgacacccaggtgagcgagaccctgaagcggttcgccggcaaagtgaccactgcatctgttaaggaacggcgggaaatcctgagtgaactcgggaaatgtgtcgctggcaaggacctgcccgagggcgctgtgaagggcctttgtaagctgttctgccttaccctgcaccgataccgcgatgccgcttcccgaagggcactccaggcggccatccagcagcttgccgaagcccagcccgaggccacagccaagaatctgctacactcacttcagtcctctgggattggcagtaaagcgggcgttcctagtaagtcatccggatctgcagcattgctggccctcacctggacttgtttgctagtacgcatcgtatttccatcccgcgcaaagagacagggcgatatatggaacaaactcgtggaggtgcagtgcctgcttttgttggaggtcctcgggggcagtcataagcacgcagtggatggtgctgtgaagaaacttaccaagctctggaaggagaacccaggcttggtagagcaatatttgagtgccatcctgagtttggagccaaatcagaattacgccggaatgcttggcctgctagtgcaattttgcacatctcataaggagatggacgttgtaagccaacacaaatctgccttgctggacttttatatgaagaatatccttatgtcaaaggttaaaccacccaagtacctcctggatagctgtgctcctttactgagatacctaagtcatagcgaattcaaagacttaattctgccaaccattcagaagtccctgctgcggtctcctgaaaatgttattgagactatttctagcctgctggccagcgttaccctcgatttatcccagtacgccatggacatagtgaaaggcctagccggacacctgaagagcaattcaccgcgcctgatggacgaagctgtgttggctctaaggaatttagcccgccagtgtagtgatagctcagcgatggagagcctgaccaaacaccttttcgccattttaggcggctcagagggcaaactcaccgtggtcgcccagaagatgagtgtcttgtccggcattggcagcgtgagccaccacgtagtgtccgggccctcttcccaagtcctgaatggcattgtggctgaattgttcattcccttccttcaacaggaggtccatgagggaaccctggtacacgcagtgagcgtccttgctttgtggtgcaatcggttcaccatggaagtgcccaaaaagctgaccgaatggtttaagaaagctttttcactaaagacatcgacaagcgccgtgaggcacgcgtatttgcagtgcatgctcgcatcataccggggggatactttgctgcaggcgttagatctactccctctgctgattcagaccgttgagaaggccgcctcccagagcacacaagtgccaacgattactgagggagtcgcagctgcgctgctcctcctaaaactgtcggtggccgactcccaggctgaggccaagctatctagcttctggcagctgatagtcgatgagaagaagcaggtgtttacatccgagaaattcttggttatggcatccgaagatgcactatgcactgtgttacatttaaccgagcgcctgttcctcgaccaccctcacagactgaccgggaataaagtgcagcaataccacagagctctggttgcagtgctgcttagcagaacttggcatgttaggaggcaggctcagcagactgtgcgcaagcttctgtctagtctcgggggttttaagctggctcacgggctcctggaagaactgaagacagtgctctcaagccacaaagtgcttccactcgaggcactggtgaccgatgcaggagaagtgacagaagccggcaaagcctatgtgcctcctcgggttttgcaggaagccttgtgtgtgatatctggcgttcccggtctgaagggagacgtcaccgatactgagcagctggcccaagaaatgctgatcatatcgcaccatccttcccttgtggcagtccaaagcgggctgtggcccgcgctgctggctagaatgaaaatcgacccagaagcctttatcacaaggcacctggaccaaataataccaaggatgacaactcagtccccactgaaccagtcctctatgaatgccatgggatcactgtctgtactgtctcccgatagggtgttgccgcagctcatctccactattaccgccagtgtccaaaatcccgccttgcgtttagttaccagggaagagttcgccattatgcagaccccagcgggcgagctgtacgacaagagtatcatccagtccgcccagcaggactcgatcaagaaagctaacatgaaacgcgagaataaggcctacagtttcaaagagcagatcatcgaactggagctgaaggaggaaattaagaagaaaaagggaatcaaagaagaggtacaactgaccagtaagcagaaagaaatgctgcaggcccagctcgaccgtgaagctcaagttaggcgacgcctgcaggagctggacggagagcttgaagccgctctcggtctgttagatataatactcgccaaaaacccgagcggtctaacccagtacatccctgttttggtagattcctttctgcccctgttaaagtcgccactggctgcccccaggatcaagaacccatttttatctctcgccgcctgtgtgatgccatccagacttaaagcattgggaaccctggtctcccatgtaacgctccggctgctcaaacctgagtgtgtgcttgacaaaagctggtgccaagaagaactcagcgtggccgttaaacgggctgtgatgctgttgcatacccatactatcacatcacgcgtcggtaaaggagaacctggcgcagcaccactctctgcccccgccttttccctcgtttttcctttccttaagatggtgctgacagaaatgccgcatcattctgaagaggaagaagagtggatggcacaaatactgcagatcctgaccgtacaggcccaactcagggcctctccgaacacgccccccggacgggtcgatgaaaatggcccggagctgctgcctcgcgttgcaatgctccgactcctgacctgggtcattggaacgggttcccctagactgcaggtactggcctctgacacactgacaactctgtgcgcttcttcaagtggcgacgacggctgcgcttttgcggagcaggaagaggtggacgtgctgctttgcgctctgcagtccccctgtgcatccgtgcgggagacagtgctccgaggactcatggaattgcacatggtactccctgccccagataccgacgagaagaacggactgaacctgcttcgccgactttgggtggtcaaatttgacaaagaggaagagatacggaagttagctgagaggctttggtctatgatgggattggatctccagccagatctttgctctctcctgatcgacgatgtaatctaccacgaggcggctgtgcgacaggccggtgcagaagccctgtcccaggctgtggccagatatcagcggcaagccgcggaggtgatgggacggctgatggagatttatcaagaaaagctctaccgcccgccccctgtcttggatgctctcgggagggttatttccgaaagtccgcccgaccagtgggaagcgaggtgtgggcttgccctggccctgaataaactgagccaatatctggactccagtcaagtgaagcccttgttccagttttttgtcccagacgcactgaacgataggcacccagacgtgcgaaagtgtatgctggacgcagccctcgccactctcaatacacatggtaaagagaatgtgaacagtttgctaccagtcttcgaggagttcctgaaaaatgcacctaacgatgccagctatgatgctgtgcgccagtcagttgtggtgctgatgggctcactggccaaacacctggataaatccgatcctaaggtgaagccaatcgttgcaaaattaatcgcggctttgagcacacctagccagcaagtccaggagagcgtcgcgtcatgcctgccaccactggtgcctgccattaaggaggatgcgggcggaatgatacagcgattaatgcaacagttgctggagtcggacaaatacgctgaacgaaaaggtgcggcgtacggcttggccgggctggtaaagggactcgggatcttaagcctcaagcagcaagaaatgatggcggcgctaacggatgccattcaagacaaaaaaaacttccggagaagggagggcgccctgtttgccttcgaaatgctgtgcacgatgttaggcaaattatttgagccgtatgtggtgcacgtcctgccccacctgcttctgtgtttcggtgatggcaaccaatatgttcgggaggcggccgacgattgtgccaaggctgttatgtcaaatctgagcgcgcatggtgtgaagctggtgttgccctcgctgctggcagcgctcgaagaggagtcttggaggaccaaggccggttctgtggagttgctgggcgcgatggcatactgcgcacccaagcagctatccagctgtctgcccaatatcgtgcctaagctgactgaagtgttaacagatagtcatgtcaaagttcagaaggccgggcagcaagcattgaggcaaattggctcagtgatcagaaaccctgagatcttagcaatcgcgccagtactactggatgcgctgacggatccttctagaaaaacccagaagtgtctccagacactgcttgacacaaagtttgtccactttatcgacgctccttctctggctctaattatgcccatcgtccaacgagcgttccaggaccggtctaccgacacccgcaaaatggctgctcagatcataggcaacatgtatagcctgaccgatcagaaagatctggcaccataccttccttcagttacccccggattgaaagctagccttctcgaccctgtgccagaagttcggacagtgagcgcaaaggccctgggtgctatggtgaaggggatgggtgagtcgtgttttgaggatttattaccatggttgatggagactttgacttacgaacagtcttctgtggataggtcaggagctgcccaggggctagcagaggttatggcaggcctcggcgtggagaagctggaaaaactgatgccagagattgttgcaactgcctctaaggtagacatagctccacacgtaagggatgggtatattatgatgttcaactacctgcccattactttcggggacaagttcaccccatatgtcgggcccatcatcccatgtatcctgaaagctctggctgatgagaatgagtttgtgcgtgacaccgctctgcgagcaggccagagagtcatctctatgtatgcagagactgctatagctttgctcctgccacagcttgaacagggactcttcgatgacctgtggcgaatccggttcagtagcgtgcagttactcggagacttgctattccatattagcggggtaactggcaagatgactaccgagaccgcctctgaggacgataacttcgggaccgctcagtctaacaaggctatcattacggccctgggtgtggaaaggagaaaccgcgtattagccggcctgtacatggggagaagcgacacgcaactggtggtgcggcaggctagccttcacgtctggaagatagttgtgtcaaacacaccccgcacattacgtgagatcctgcctaccctctttgggctgctgttgggctttttagcctcaacttgcgccgataaaagaactattgcagcgcgtactctaggtgatctcgttagaaaactgggtgagaaaatattgccagagatcattcccatcttagaagaggggctgaggtctcagaaaagcgacgagagacaaggggtctgtatcgggctttctgagatcatgaagagtaccagccgcgatgccgttctgtatttctctgagtcccttgtgcctactgccaggaaagcattatgcgatcccttagaggaggtccgcgaggccgccgctaaaaccttcgagcagcttcattccaccattgggcaccaagcactggaagatatcctgccatttctgctgaaacagttagatgacgaggaagttagcgaatttgcactcgacgggctcaagcaggtaatggccatcaaaagtagggtagtgctgccctacctggtgccaaaactgaccactcccccagttaacacaagagtccttgcatttctctcttcggtggctggcgacgccttgacgaggcatcttggggtcatcctgcccgccgtcatgttagcactcaaagaaaagctgggaacccctgacgaacagcttgagatggctaactgtcaagctgtcatcctcagtgtggaagacgacacaggccacagaatcataattgagtatctcctggaggctacacgctccccggaagtgggtatgaggcaggcagcagccattatactcaacatctattgttctcgatcaaaggctgactacacctctcatcttcggagtctcgtgtcaggcttgattaggctgtttaacgactcatccccggttgtcctggaggagagctgggacgctcttaacgctattacgaagaaactggacgctggaaatcagctggcactaatcgaggagctgcacaaggagattaggcttatcggcaacgagagcaaaggggagcacgttccgggcttttgcctcccgaagaagggtgtgacctctattctccctgtgcttcgggaaggcgttctcactggctcgcctgaacaaaaggaagaggccgctaaggccctgggtttagtaatcagattgacatccgctgacgccctgagaccctcagtggtgtccatcactggacccctcatccggatattgggagataggttctcatggaatgtgaaagcagccctactcgagaccctgtcccttttgctcgccaaagttggtatagcactgaagccttttcttcctcagctgcagacaacatttaccaaagcactgcaggacagcaatcggggcgttaggcttaaagcggccgatgctctgggcaagctgatttcaattcacataaaagtggaccctctctttacggaactgttgaatgggataagagcaatggaggaccccggcgtaagggacactatgctccaggctctgcggttcgtgatccagggggccggagctaaggtggacgccgtgattcgcaaaaatattgtatctttgctcctgtctatgttaggacatgatgaggacaacacacggatttcaagcgctggttgtcttggcgagctgtgcgcattcctaacggaagaggaattgagcgctgtactgcagcagtgtctcttagccgacgtctcaggtatcgattggatggtaagacatggcaggtccctggcattgtcagtcgcagtgaacgtagcgccggggaggttgtgtgccggccgttattcttctgatgtgcaggaaatgatcttaagtagcgccactgctgaccgaatccccattgctgtaagtggagtcagagggatgggattccttatgcggcatcatatcgaaaccgggggaggtcagctccctgcgaagctgagttccctctttgtgaagtgtctccaaaatcccagctcagacatcaggctagtggccgagaagatgatctggtgggccaacaaggatccactgcctccgttggacccccaagctataaagccgattctaaaggcattactggataacactaaagataaaaacaccgtggttagagcctactcggaccaggccatcgtcaatctccttaaaatgagacagggggaggaggtgttccagtcgctcagcaagatcttggacgtggcgtccctggaagtgctaaatgaagtcaatcgaaggtctcttaaaaagctagcctcccaggctgactccacggagcaggtggatgacacaattttgacctag

SEQ ID NO: 189008 - DNA, 1443 bp, synthetic construct
  misc_feature 1..1443: note = Description of Artificial Sequence: Synthetic coding sequence
  source 1..1443: mol_type = other DNA
atggcccagcacgacttcgcccccgcctggctgaacttccccaccccaccgtcgtccacaaaggtcttgacgagttcactgaagagctctcttaacttcgagaagcacagtgaaaactttgcctggacagaaaaccgttatgatgtgaacaggcgtcgacataacagtagcgatggctttgattctgctatcggaagacccaatggcgggaatttcggaaggaaagagaagaacggctggcgcacacatggcagaaatggcactgagaatattaaccaccgcggggggtaccatggaggatcctctcgttcaaggagctcaatattccacgccgggaagagccaggggctgcacgagaataatattcccgacaacgagacagggcgaaaggaagacaaaagagagaggaaacagtttgaggccgaggattttccctccctgaacccagaatatgaacgggaacctaatcacaacaagtccttggctgcaggggtgtgggagtatcctccgaatccaaagtccagggccccacgcatgttggtcattaaaaaaggaaacacgaaggaccttcaactgtccggattccccgttgtcggcaatctgccctctcagccggtcaagaatgggaccgggccttctgtgtacaaagggctggtgccaaagcctgcagcaccccccacaaagcctactcagtggaagtcgcagacaaaagagaacaaggtcggcaccagcttcccacacgagtcaacctttggggtagggaacttcaatgccttcaaatccacagcgaaaaattttagccccagtacgaacagtgtaaaggagtgcaacaggtcgaacagttcatcaccagttgataagcttaatcagcaaccgagactgacgaaactgacaaggatgcgaactgacaaaaaatcagagttccttaaagcccttaagagggaccgcgtggaggaggagcacgaggacgaatcgagagctgggtcagaaaaagatgatgacagcttcaatttgcacaactctaatagcactcaccaggaaagagacataaataggaactttgatgagaatgagatcccacaggagaacgggaacgctagcgtgatttcccagcaaatcattcggagttctactttccctcagaccgacgttctgtcttcctctctggaggccgaacacagactgcttaaggagatgggctggcaggaagatagtgagaacgacgagacatgcgctcctctaactgaagatgagatgagagaatttcaggttatctccgaacagctgcagaaaaacggcctgcgcaagaatggtattctcaaaaatggactgatttgtgattttaagttcgggccttggaaaaatagcacattcaaacccactactgagaatgatgataccgagacctcctcaagcgacacctccgatgacgacgatgtttag

SEQ ID NO: 189009 - DNA, 1482 bp, synthetic construct
  misc_feature 1..1482: note = Description of Artificial Sequence: Synthetic coding sequence
  source 1..1482: mol_type = other DNA
atggcccagcacgacttcgcccccgcctggctgaacttccccaccccacctagcagcactaaaagcagtctcaactttgaaaaacattccgaaaatttcgcctggacagagaataggtatgatgttaacagacgtaggcataacagcagcgacggttttgactccgcaatcggcagacctaatggagggaacttcggccgaaaggagaagaacggctggcggactcatggacggaatggaaccgagaacataaaccaccggggcggctaccacggcggatcttcccggtcgcggtcgtcaatatttcatgcgggtaaatcacagggcctgcacgaaaacaatattcccgataatgagactggcaggaaagaggacaaacgcgagaggaaacaatttgaggccgaagactttccttccctcaatcccgagtacgagagagaacccaaccacaacaaatccttggctgcgggtgtctggggactgcatgcgcaaacccacacatacccgacaaagaaaatctctcaggcccctctgctggagtaccctccgaatccaaagtcccgggcccccagaatgctggtgattaaaaaaggcaacacgaaggacttacagctgagtggatttccggtggtgggaaacctgccgtcccaacctgtgaagaacggaaccgggcctagcgtgtacaaaggattagtgccaaaaccggcagccccacctacgaagcccacccaatggaaatcccagacgaaggagaataaggtagggacatcattcccgcacgagtcaactttcggggtgggcaatttcaatgcatttaagtcgacagctaagaatttttctccgagcacaaatagtgtcaaagagtgcaaccgctccaactcatccagccccgttgacaagcttaatcagcaacctcgcctcacaaaactgacacgcatgaggaccgacaagaagagtgagttcctgaaagccctcaagagagatcgagtcgaggaagagcacgaagatgagagccgggcaggcagcgagaaagacgatgactcattcaatttgcacaactccaacagcacccaccaggagagggacattaacagaaactttgacgagaacgagattcctcaggagaacggaaatgcttctgtgatatcacagcagatcattagatcatcaacatttccacagacagatgtcctgagcagtagtctggaagcagagcatcgcctcctgaaggagatgggttggcaggaggactcagagaacgacgagacttgtgcgcccctgaccgaagacgagatgagagaatttcaggtcatctccgagcagcttcagaagaacgggctcagaaagaatggcatccttaagaacggactgatctgcgactttaagtttggtccttggaagaactccaccttcaaaccgactaccgagaatgacgataccgagaccagctcatccgacacaagcgacgatgacgacgtctag

SEQ ID NO: 189010 - DNA, 1482 bp, synthetic construct
  misc_feature 1..1482: note = Description of Artificial Sequence: Synthetic coding sequence
  source 1..1482: mol_type = other DNA
atggcccagcacgacttcgcccccgcctggctgaacttccccaccccgcctagcagcaccaaaagctctctgaattttgagaaacattctgagaacttcgcctggaccgaaaatcgttacgacgtcaaccgcaggagacacaactcttccgacgggttcgacagtgcaatcgggaggcccaacggcggaaatttcggccggaaggagaaaaatggatggagaacccatggcagaaacggtaccgaaaacattaaccaccgcggcggatatcatggaggaagctctagaagcaggtccagtatctttcatgcgggaaaatctcagggacttcacgaaaacaacattcctgacaatgagaccggcaggaaggaagacaagagggaacggaaacagttcgaagcagaagattttccatccttgaatcctgagtacgagagagagcctaaccataataagtctcttgccgccggcgtgtggggtttgcatgctcagacgcacacataccctacaaaaaagatcagccaggcaccgttattggagtatcctcctaatccgaaaagtcgcgcgcctcggatgctcgtgataaagaaggggaataccaaggatctgcaactgtccggatttcccgtggtgggaaacctgccttcgcagcccgtcaagaatggtactggtccttcagtgtacaagggcctggtaccaaagccagccgcccccccaaccaaacctacccagtggaagtcacagacaaaggagaataaggtgggtacctcctttccccatgagagtactttcggcgttggcaattttaacgcatttaagtctacagcaaaaaacttcagccctagtaccaacagcgtgaaagagtgcaatagaagcaactcctcctctcctgtggataagttgaatcaacagcctcggctgactaaacttacacggatgcggacagataagaaatccgaattcctcaaagcactgaaaagggatcgcgttgaagaagagcacgaagacgaatccagagccgggagcgagaaagacgatgacagcttcaacctccacaacagcaattcaacccaccaggagcgggacattaatcggaacttcgacgagaacgagattccccaggagaacggtaatgcatctgtgatttcccagcagatcatcaggagttccacttttccccaaaccgatgtgctgtcttcctctctggaagccgagcatagactcttaaaagagatgggttggcaagaggattccgaaaatgacgagacctgcgctccacttactgaagatgagatgcgcgaattccaggttataagtgagcagctccagaaaaacggattaaggaagaacgggatcctgaaaaacggcctgatttgcgactttaagttcgggccatggaagaactcaactttcaaacctacaactgagaacgacgataccgagacctcctcaagcgacacttccgatgatgatgatgtctag

SEQ ID NO: 189011 - DNA, 1422 bp, synthetic construct
  misc_feature 1..1422: note = Description of Artificial Sequence: Synthetic coding sequence
  source 1..1422: mol_type = other DNA
atggcccagcacgacttcgcccccgcctggctgaacttccccacccccccgtcttctaccaagagcagtctgaactttgagaagcatagtgagaacttcgcgtggactgagaatcgatatgacgtgaacaggcgaaggcacaactccagtgatggctttgactcagcgatcggacgtccgaacggagggaacttcggaaggaaggaaaaaaatggatggcgcacgcacggcaggaacgggacggagaatatcaatcaccgcggggggtaccacggggggtccagtcgctctcgaagtagcatcttccacgccggtaaaagtcagggcttgcatgaaaataacatacctgataacgagacggggcggaaggaagacaagcgcgagaggaagcaattcgaggcagaggacttcccgtccctcaaccccgagtacgagcgcgaacctaatcacaacaagtccctggccgctggtgtctgggagtatccgcccaaccccaagtcacgagctcccaggatgctcgtgataaagaaggggaataccaaagacctccagctgtctggtttcccagtcgtcggcaatctgcccagtcagccagtgaagaatggcaccgggcccagcgtgtacaaggggctggtgcctaaaccagctgcccctcctacgaaaccaacccagtggaagagtcagaccaaggagaataaagtaggaaccagctttcctcacgaatcgacatttggtgtcggcaatttcaatgcttttaagagcacggcgaaaaatttttcccccagcaccaattcggtgaaggagtgcaatcgatcaaattcatcatcaccagtagacaagctgaatcagcaaccccgattgacaaaactgactagaatgcggactgacaaaaaatctgagttcctcaaggccctgaaacgcgatcgggtcgaggaagaacatgaggacgagtcaagagcggggagtgagaaggatgacgatagctttaatctgcataactccaacagtactcaccaggagcgagacatcaatcggaattttgacgagaatgaaatacctcaggagaacggcaacgcgagcgtgattagccagcagatcattagatcttcgacctttccacaaacagatgtgctatcttcttcactagaagccgagcaccggctgttgaaggagatgggctggcaggaggattcggagaatgatgaaacctgcgctcccctcacagaggacgaaatgagagaatttcaagttatcagcgagcagcttcagaaaaacggactccgaaagaatggaatattgaaaaatggcctgatctgcgacttcaagtttggaccctggaaaaattccacttttaagccgacaaccgagaacgacgataccgaaacttcttcgagtgacacctctgatgacgatgatgtctag

SEQ ID NO: 189012 - DNA, 1398 bp, synthetic construct
  misc_feature 1..1398: note = Description of Artificial Sequence: Synthetic coding sequence
  source 1..1398: mol_type = other DNA
atggcccagcacgacttcgcccccgcctggctgaacttccccaccccaccgagtagtacaaaggtgctgacttccagtctgaaatcttcactaaactttgaaaagcactctgagaatttcgcctggaccgagaataggtatgatgttaaccgtagacgtcataatagctccgacggttttgacagtgccattggtcgtcccaatgggggcaatttcggccgaaaggaaaagaatggctggcgcacacatggtcgcaatggcaccgagaatataaatcaccgtgggggttatcatggaggttcttcccgctcacggtcttcgatttttcacgctggaaaaagtcagggcctacatgagaacaatattcctgataacgagactggccgcaaggaggataaacgggagcgaaagcaattcgaggccgaagactttcccagcctgaatcctgaatatgaacgggagccaaatcataataagtccctggcagctggagtatgggagtatccacccaatccaaaatcccgcgctcctcggatgctagtgattaagaaggggaacaccaaggacctccagctgagcggttttcccgtcgtgggtaacctgccttctcagcccgttaaaaacggcactggcccttcagtgtacaaaggcctcgtacctaagccagctgccccacctacgaaaccgacgcagtggaagagccagacaaaggagaacaaggttggcacatcttttccccacgagagtactttcggggtaggaaattttaacgcattcaagtctactgccaagaacttttccccttccactaattctgtgaaagaacagcctcggctaactaaacttacgcgcatgcggaccgataaaaaaagcgagtttctgaaagctctgaagagggatagggttgaagaggaacacgaggacgaaagtcgtgcagggagtgagaaggatgacgattcattcaatctgcataattctaattcgacacaccaggaaagagatatcaatcgaaactttgacgagaatgagattcctcaagagaacggtaacgcgagcgtgattagccaacagattatccgcagctctactttcccacagaccgatgtcctgagttccagcctggaggcggaacaccgattactgaaagagatggggtggcaggaggacagtgaaaacgatgaaacatgcgctcctctgaccgaagatgaaatgcgcgagtttcaagtgatttctgagcagctacaaaagaacggcctccgcaagaatggaatccttaaaaacggactgatctgcgatttcaaattcgggccctggaagaattcaacattcaaacctacaactgaaaacgacgatacggagacaagctcttctgacactagcgacgacgatgatgtttag

SEQ ID NO: 189013 - DNA, 909 bp, synthetic construct
  misc_feature 1..909: note = Description of Artificial Sequence: Synthetic coding sequence
  source 1..909: mol_type = other DNA
atgctggtgatcaagaagggcaacaccaaggacctgcagctgagcggctttcccgtggtagggaatctcccgtctcagccggtgaagaacggaaccggcccaagcgtgtacaaggggctcgtgccaaagccggccgcacctcccactaagccaacccagtggaaaagtcagactaaggagaacaaggtggggaccagtttcccgcacgagagcacctttggcgttggcaatttcaatgccttcaaatctacggccaagaacttttctccaagtacaaactccgtgaaggagtgcaaccgcagtaactccagcagccctgtggataaactcaatcaacagccccgactgactaaattgacgcgcatgaggactgataaaaagtccgagttcttaaaggctctgaaacgcgaccgtgtggaggaagagcacgaggacgaatccagggcggggagtgagaaggacgacgactcattcaatttgcacaattccaacagtactcaccaagaaagggacatcaacagaaactttgatgagaatgaaatccctcaggaaaatggcaacgcctcagttatatctcagcagattatcaggagctctacattcccacagactgatgttctgtcctcaagcctggaggcggagcacaggctgttgaaagagatgggatggcaagaggattccgagaatgatgagacctgtgcccccctcactgaggacgagatgcgggagttccaagtgatcagcgagcagcttcagaaaaacggactgcggaagaacggcatattgaagaacggcttaatctgcgacttcaaattcggtccctggaagaattctacattcaaacctactaccgagaatgacgacacagaaacaagcagtagtgacacctcggacgatgacgacgtctag

SEQ ID NO: 189014 - DNA, 1443 bp, synthetic construct
  misc_feature 1..1443: note = Description of Artificial Sequence: Synthetic coding sequence
  source 1..1443: mol_type = other DNA
atggcccagcacgacttcgcccccgcctggctgaacttccccacccccccttcctcaacgaaggtcttgtcaaatactctgaagagcagcctgaacttcgaaaagcactcagagaattttgcctggacagagaacagatatgatgtgaacagacgcagacacaacagcagcgatgggttcgattcagctatcggtagacctaacggtggtaacttcggtaggaaggaaaagaatgggtggcggactcacggtaggaatgggaccgaaaatataaaccaccgagggggatatcacggtggttcaagccgctcaagaagctcaatctttcatgcaggaaagagtcaaggacttcatgagaacaacatcccggacaacgagactgggcgaaaggaggacaaaagggaacgcaaacagttcgaggccgaggattttccctccctgaatcccgagtacgagcgagagccgaaccacaacaagtccttagccgcgggagtctgggagtacccccccaatccaaaaagccgcgccccacgaatgctcgtgatcaagaaagggaatacaaaggacttgcagctatctggatttcctgtagttgggaatctgcctagccagcccgtgaaaaatggtactggcccgtccgtctataaaggcctggtgcccaagcccgccgccccgccaactaagcctacccagtggaagagtcaaacaaaggaaaataaggttgggacctcctttccacacgaatcaacattcggcgtggggaacttcaatgcattcaagtcaacagccaaaaacttctctccaagtacaaattccgtcaaagagtgcaacagaagtaatagctcctcccctgtagataagctcaaccagcagccccggctcacaaaactgactagaatgaggactgacaagaaaagtgaattcctgaaagccctcaagcgcgaccgcgttgaggaggagcatgaggatgagtctagggccgggagtgagaaagatgacgacagcttcaatctacacaattctaattccacacatcaagagagagatattaatcgcaatttcgatgaaaacgaaatcccacaagagaatggcaatgcgtccgtcatcagccagcagattattcgcagcagcacctttcctcagactgatgtgctctctagctctctggaggccgagcataggctgctcaaggagatgggctggcaggaggatagtgagaatgacgagacgtgtgcaccgttaacagaagacgagatgcgagaatttcaggtgattagtgagcagctgcaaaagaatggcctgagaaaaaatggcattctgaaaaatgggctaatctgcgatttcaagttcggcccttggaaaaactcaacgttcaagccaaccaccgaaaacgatgacaccgagacctcgtcttcggatacttccgacgacgatgacgtgtag

SEQ ID NO: 189015 - DNA, 1383 bp, synthetic construct
  misc_feature 1..1383: note = Description of Artificial Sequence: Synthetic coding sequence
  source 1..1383: mol_type = other DNA
atgttcctggccaccctgtacttcgccctgcccctgctggacctgctcctgtcggctgaggtcagcggaggcgataggctggactgtgtcaaggcctctgaccagtgtttgaaggagcaaagttgctccacgaaataccgcaccctcaggcagtgcgttgcaggaaaagaaacaaatttctctttggcttctggtctggaagctaaggacgagtgccgatctgcaatggaagctctgaagcaaaagagtttgtacaattgtaggtgtaaaagggggatgaagaaagaaaaaaattgccttaggatctactggagcatgtaccagagcctgcaaggaaacgatctcctcgaagactctccctacgagcccgttaattctagactctctgatatctttcgcgttgtaccgtttatttctgtcgagcacattcccaaaggtaacaactgcttagatgccgctaaggcttgtaatctcgatgatatctgcaagaagtaccggagcgcctatatcacaccgtgcactacatctgtgagcaacgacgtatgcaatcggagaaaatgtcataaagctctccgtcagtttttcgacaaggttccagctaagcactcctatggcatgttattctgcagctgcagggatattgcctgtacggagagaagaaggcagacaattgttcccgtgtgcagctacgaggaaagggagaagcctaattgtttgaatctacaagactcatgcaaaaccaattatatctgtcgatctcgcctggcagacttttttacaaactgccagcctgaaagtaggagcgtgtcctcatgtctcaaggagaattatgcagactgcctattagcctattccggcctgatcgggaccgtgatgacccccaattacattgacagctcttctctttccgtggccccctggtgcgactgctctaacagtggtaatgatctggaggaatgcctgaagttcctcaacttcttcaaagacaatacatgcctaaaaaacgcgatacaggcctttggtaacggcagcgatgtgacggtgtggcagccagcattcccagtccagaccaccacagccacgaccacaaccgcactaagggtgaagaataaacctctgggtccagccggcagtgaaaatgagattcccactcatgtgctccctccttgcgcaaatttgcaagctcagaagctgaagagcaacgtgtctggcaacacgcacctctgcatctcaaatgggaactacgaaaaagaggggcttggtgcatcttctcacatcaccaccaaatccatggccgctccaccatcatgtggactgtcacccttgctggtgctcgttgtgacagccctgtccacacttctgtccctcacagagacatcgtag

SEQ ID NO: 189016 - DNA, 1383 bp, synthetic construct
  misc_feature 1..1383: note = Description of Artificial Sequence: Synthetic coding sequence
  source 1..1383: mol_type = other DNA
atgttcctggccaccctgtacttcgccctgcccctgctggacctgctcctgtccgcggaagtgtccgggggggaccggcttgactgcgtaaaagcgagtgatcagtgcctgaaggagcagagctgttctacaaagtatagaaccttgcgccagtgcgttgcggggaaagagaccaactttagcctggcctcgggtctggaagctaaggatgagtgccggagtgccatggaagccttgaaacagaagagtctttacaattgcagatgcaagagaggcatgaagaaggaaaagaactgcctcaggatatactggtcaatgtatcagagccttcaaggcaacgacctgctggaagacagcccttacgaacccgtgaacagccgcttaagcgacatctttcgcgtcgttcctttcatttccgtggagcacattcctaaaggaaacaactgtttagatgccgcaaaggcttgcaacctggatgacatatgcaaaaaataccgctccgcttatattaccccatgcactactagtgtatctaatgacgtgtgtaacagaaggaagtgccacaaagcccttcgacaatttttcgacaaggtccccgcaaaacactcctacgggatgttgttttgctcttgtcgagatatagcgtgtaccgagaggagacgtcagaccattgtgccagtgtgctcctatgaagagcgtgaaaaaccaaactgtttgaacctgcaggattcttgcaaaacgaattacatttgtagaagccggttggctgattttttcactaactgccagccagagtctcgttccgttagcagttgcctcaaagagaattacgctgactgcctcctcgcctatagcggcctcatcggcacggttatgacgcccaactatattgactccagctccctgagcgtggccccctggtgcgactgtagcaactcagggaatgatttggaggaatgcttaaaattcttgaattttttcaaggataacacatgcctcaaaaacgccatccaggcattcgggaatggatcggacgttacggtatggcagccagcatttcctgtacagacaacaacagccactactaccacggccttacgggtgaagaataagccactggggcctgcaggctcggaaaacgaaattcccacacacgtcttgcctccatgcgccaacttacaggcccagaagctcaagtctaatgtgagtggaaatacccacctatgtatatccaatggcaactacgagaaagagggactgggagcctcttctcacattactacaaagtctatggctgcaccgccgtcgtgcgggcttagtccactgctggtcctggtagtgactgcactgtctacgctactgtccctgacagagaccagctag

SEQ ID NO: 189017 - DNA, 1383 bp, synthetic construct
  misc_feature 1..1383: note = Description of Artificial Sequence: Synthetic coding sequence
  source 1..1383: mol_type = other DNA
atgttcctggccaccctgtacttcgccctgcccctgctggacctgttgctgtcagccgaggtttctggaggagatagactggactgtgttaaggcttcagaccagtgcctcaaggaacagagctgtagtaccaagtataggacactcaggcagtgcgtggctggcaaggaaaccaatttctcacttgcgagcggactcgaagccaaggatgaatgtcgaagtgccatggaggctcttaaacaaaaaagcctttacaactgtcgatgtaagcggggcatgaaaaaggagaaaaactgcttacgtatttactggtctatgtatcaaagcctgcaggggaacgatctccttgaagactctccatacgagcctgtgaactcacggctcagtgatattttccgggtcgtcccattcattagtgtggaacatattccaaagggcaataactgtttagatgccgctaaagcttgcaaccttgatgatatatgcaaaaagtaccggtctgcctacataaccccgtgcaccacctccgtgagcaacgacgtgtgtaatagacggaaatgccacaaagccttacgccaattcttcgacaaggtccccgccaagcattcatacggcatgctcttttgctcatgcagggacattgcttgtaccgagcgaagaaggcagacaatcgtcccagtctgcagctacgaagagcgggagaaacccaactgcctcaatttacaggattcttgcaaaactaactatatctgcaggagtcggcttgcagacttcttcacaaactgtcagcccgaatcgcggtcggtctccagttgcctgaaggaaaattatgccgactgcttactggcctacagtggtctaatcggtacagtgatgactcccaactacatagatagtagttctctgtcggtggcaccctggtgcgactgtagtaatagtggcaatgacttagaagagtgcctcaaattcctcaacttttttaaggataatacgtgtctcaagaacgcaatacaggcctttggtaatggctcagatgttacagtctggcagccagctttccccgtgcagaccacaacagccactactaccaccgccctgagggtaaaaaacaaaccgcttggtcccgctggcagcgagaatgagatccctactcacgtgttgcccccctgcgccaatttacaggcgcagaagctcaagtctaatgtttcaggaaacacccatctgtgtataagcaacgggaattacgaaaaggagggcctgggcgcttcatcacacattacgacaaagtccatggcagctcctccctcctgtggcctttcacccctgcttgttctagtggttaccgccctgtctaccttgttgtctctgacagagaccagctag

SEQ ID NO: 189018 - DNA, 1398 bp, synthetic construct
  misc_feature 1..1398: note = Description of Artificial Sequence: Synthetic coding sequence
  source 1..1398: mol_type = other DNA
atgttcctggccaccctgtacttcgccctgcccctgctggacctgctcctaagtgcagaggtcagcgggggagacagactggactgtgtgaaagcctcagaccagtgtctgaaagaacagtcttgcagtacaaagtaccgaacgctccgtcagtgtgtggcggggaaagaaaccaactttagcttggcctctggcttggaggcgaaggatgaatgtagaagcgcgatggaggctcttaagcagaagtcactttacaactgcagatgcaagcgaggaatgaaaaaggagaaaaactgcttgagaatctactggtcaatgtatcaatcgctgcaggggaatgatttacttgaagacagcccgtatgagcctgtcaatagcaggctcagcgatatcttccgggtggtgcctttcatctctgacgtattccagcaggtggagcatataccaaaaggcaacaactgtttagacgccgctaaagcgtgcaatttagatgacatctgcaagaagtatcgctcggcatatattactccgtgtactacatctgtgagtaacgacgtttgtaacagacgcaagtgtcacaaggctttgcgtcagttcttcgacaaagtaccagccaagcacagctatggcatgttgttctgcagttgtagagatattgcgtgcacagaacggagaaggcagactattgtgcccgtgtgttcctatgaggagagggagaagccaaattgtctgaatttgcaggattcttgcaagacaaactatatttgcagaagtagactagcagatttctttactaattgccagcctgagtcgcgcagtgtatccagctgtctgaaagagaactatgctgattgcctgctcgcttactccggacttattggaaccgtcatgaccccaaactacatcgatagtagtagtctcagcgtcgctccatggtgcgattgttccaattctggtaatgaccttgaggagtgcctaaagtttttaaactttttcaaggacaatacttgcctgaagaacgccatacaggcatttggcaatgggagcgatgtcacagtctggcagccggcttttcctgtgcagaccacgaccgccacaacaactacagctctaagggttaaaaacaagcctctgggccctgcaggatccgagaacgagatccctacccacgtgttacccccttgcgcaaatcttcaagcccagaaactgaaatccaacgtatctgggaatacacacctgtgtatctcaaatggcaattacgagaaggagggactcggggcaagtagccacattactaccaaatctatggctgctccacccagttgcggcttgtcacccttgctggttctggtcgtgactgccctgtcaaccttgctgtccttgacagagactagctag

SEQ ID NO: 189019 - DNA, 1035 bp, synthetic construct
  misc_feature 1..1035: note = Description of Artificial Sequence: Synthetic coding sequence
  source 1..1035: mol_type = other DNA
atgcaggagggcaagttctggaagggcatggccgagaccggcatgtggggttgtggcgaatggatccctgtagagcatatccccaaaggaaacaactgtctagacgcagccaaggcctgtaacttagatgacatatgtaagaagtaccgatccgcctatataaccccctgcactacatcggtgagtaacgatgtgtgtaacagacgaaagtgccataaggcactgaggcagttttttgataaagttccggcaaaacacagttacggtatgctcttctgctcctgtcgggacatagcttgcaccgaacgacggagacaaaccatagtcccagtgtgcagttatgaagagcgagagaagccaaactgcctgaacctccaagacagttgtaaaaccaattatatctgcagaagtcgactagccgacttctttacaaattgccagcctgagtcccgctctgtttcaagctgtctgaaagaaaactatgcagattgcctgctggcttattctgggcttatcggcacagttatgacacccaattacattgatagttcttctctgagcgtggcgccctggtgcgactgttcaaactcgggcaatgaccttgaagagtgcctgaagtttttgaacttctttaaagataatacttgcctcaagaatgcgattcaggcgtttggcaacgggtcagatgtaacagtctggcaacctgctttccctgtgcagaccaccactgccaccaccaccacagccctgcgggttaagaataagccgctgggccccgcggggtccgaaaacgagattcctacgcacgttttgcccccttgcgccaatcttcaggctcagaagctgaagtccaatgtgtccggcaatacacacttatgcatcagcaatggcaactacgagaaggaaggtctaggagccagttctcacataacgacaaagagcatggcagcaccgccctcctgcgggttatcgcctctgctggtcctcgtcgtaacagccctgtcgaccctcctgtcactcactgagactagctag

SEQ ID NO: 189020 - DNA, 1080 bp, synthetic construct
  misc_feature 1..1080: note = Description of Artificial Sequence: Synthetic coding sequence
  source 1..1080: mol_type = other DNA
atgatcctggccaacgtgttctgcctgttcttcttcctgggcgaggagttctacgaggcatctccatacgagcccgtcacaagccggctatcagatattttccggctcgcctctatattttcaggcaccggagccgatcccgtggtgtcagcaaagtccaatcactgtctggacgcagctaaagcctgtaacctgaacgacaattgtaagaagctccggagcagctatattagcatttgtaaccgggagatatcaccaacagagagatgcaaccggaggaaatgccataaagccctgcggcagtttttcgatcgggtgccaagcgaatatacatacagaatgctgttttgcagttgccaggatcaggcctgcgccgaacgaaggagacagacaattctcccttcctgctcctatgaagacaaagagaagcccaattgcctagatctgaggggagtctgtcggacagatcacctgtgtaggtctaggttagctgacttccatgcaaattgccgcgcctcatatcagaccgtcacatcgtgccccgccgataattaccaggcctgtctcggaagttatgccgggatgattggcttcgatatgactccaaactacgtggactcttcaccaacggggatagtcgtctctccctggtgcagttgtcgcggctcaggcaatatggaggaggagtgcgagaagttcctgagggattttaccgagaatccctgtctgagaaacgcaatccaggctttcgggaatggaaccgatgtcaatgtaagccccaaaggccctagcttccaggcaactcaagcaccccgggtggaaaaaaccccttcgctaccagacgacctttccgactccacttctctgggcacttcagttatcactacatgcactagcgtgcaagagcaggggcttaaggcaaataactccaaagagctgtcaatgtgttttaccgaactgacaacaaacatcatcccgggtagtaacaaggtcatcaagcccaattccgggccctcacgtgccagaccttccgcagccttaactgtcttatccgtcctgatgttgaagctcgccctctag

SEQ ID NO: 189021 - DNA, 1395 bp, synthetic construct
  misc_feature 1..1395: note = Description of Artificial Sequence: Synthetic coding sequence
  source 1..1395: mol_type = other DNA
atgatcctggccaacgtgttctgcctgttcttcttcctggacgagacactacggagcttggcttcaccgtcaagtcttcaaggtcctgaattacatgggtggagacctcccgtagactgcgtaagagccaacgaactctgtgctgctgaatccaactgttcaagtcggtatcgcacactgcggcagtgcttggccggtcgagatcgcaacacaatgttagctaataaggagtgccaagctgcactggaggtcctgcaggagagcccgctgtatgattgcaggtgcaaacggggaatgaaaaaggagctgcagtgcttacagatatactggtccatccacctgggactcactgagggagaagaattttacgaggccagcccttatgaacccgtgacatcaaggctatcggatatcttcaggctggcttcaattttctccgggaccggtgccgatccagtggtgtcagccaagagcaaccactgcctggatgccgccaaagcctgtaacctgaatgacaactgcaaaaaactgcgaagctcgtatatttcgatatgcaacagagagatctcacctactgagcgatgcaatcggagaaaatgtcataaggccttgaggcagttctttgacagggtgccctccgagtatacatatcgcatgctattttgttcctgccaagaccaggcttgtgcagagagaagacgccaaaccatcctgccaagttgctcatacgaggacaaagagaaacctaactgtttggatttgagaggcgtctgcaggacagatcacttatgcaggtccaggctggccgactttcacgccaactgtagagcgtcttaccagacagttactagctgtccagcagacaattatcaggcctgtcttggaagctatgctgggatgatcggcttcgatatgaccccgaactacgtcgatagctccccgaccggtatcgtcgttagcccatggtgctcgtgtcgagggagcgggaatatggaggaggaatgcgagaagtttctccgtgactttaccgagaatccatgtctgcgcaacgccatccaggctttcggtaacggcactgacgtcaatgtgtcacccaagggcccttccttccaggctactcaggcacctagagtcgagaaaactccgagcttgcctgacgatttgtccgacagtacctcccttggtaccagcgtcattacaacttgcacaagtgtacaggagcagggccttaaagcaaacaactctaaggagctgtctatgtgctttactgagttgacaacaaacattatcccaggtagtaacaaggtgattaaaccaaattccggcccttcgcgagcccgaccaagcgctgccttgaccgtgctttccgtgctgatgctcaagttggctctgtag

SEQ ID NO: 189022 - DNA, 996 bp, synthetic construct
  misc_feature 1..996: note = Description of Artificial Sequence: Synthetic coding sequence
  source 1..996: mol_type = other DNA
atgatcctggccaacgtgttctgcctgttcttcttcctgggcaccggcgctgatccagttgtgagcgctaagagtaaccactgcctggacgcagcaaaggcatgcaacttgaatgataactgtaaaaagctgaggtcctcctacattagcatatgcaaccgggagatctcccccaccgagaggtgcaaccggcgaaagtgccataaggccctgcgccagttctttgaccgtgtgccgtccgagtatacgtatagaatgctattctgttcgtgtcaggatcaagcatgtgcggaaaggaggagacagacaatcctgccttcatgttcttatgaagataaggagaaaccaaactgtctggacctacggggcgtgtgtaggactgaccacctgtgtagatccagactggcagattttcacgctaactgtcgagcatcctaccagacggtcaccagctgcccagccgacaactaccaagcatgcctgggcagttacgcaggtatgattggctttgatatgacccccaactatgttgattcctccccaaccggtatcgtcgtctctccctggtgtagctgccgcggaagcggcaatatggaggaagaatgcgagaaatttctccgcgactttactgagaacccttgtttacgaaacgcgattcaggcatttggcaacgggactgatgtcaacgtttctcccaaggggccgtcctttcaggccacccaggcccctcgcgtggaaaagaccccttctctgccagacgacctgtccgactccacctctctcggcacgtcagtgatcaccacttgcaccagcgtgcaggagcagggcctgaaggctaacaacagtaaagagctgagcatgtgtttcactgaattgaccaccaacattatccccggaagcaacaaggtaataaagcctaacagcggaccttctagggccaggccaagcgctgccctgaccgtgctaagtgttctcatgctaaaacttgcgctgtag

SEQ ID NO: 189023 - DNA, 798 bp, synthetic construct
  misc_feature 1..798: note = Description of Artificial Sequence: Synthetic coding sequence
  source 1..798: mol_type = other DNA
atgatcctggccaacgtgttctgcctgttcttcttcctggacgagaccctgcgctcattagcctcccctagcagtctgcagggccccgagctgcatggatggcggccccctgtggactgcgtgcgggccaacgaactgtgcgctgcagaatcaaattgtagctccaggtataggactctccggcaatgcctcgccggaagggacaggaatacgatgctggcgaacaaggagtgccaggccgcgctggaagtcttgcaagagtctccactgtacgactgtagatgcaaaagagggatgaagaaggagctgcaatgtctgcagatctactggtccattcatctggggctaactgaaggcgaagagttctatgaagcgagtccctacgaacctgtgacctcacggctgagcgacatcttcaggctggcctcaattttttctggtacgggcgcagatccggtcgtcagtgcgaaatctaatcattgccttgatgccgctaaagcttgcaatttaaatgacaattgcaagaagctaaggtcgagctacatcagtatttgtaatcgtgagatctctcccacagaaaggtgtaatcgccggaaatgtcataaggctctcaggcaattttttgatagagttccttctgaatacacctatcgcatgctcttctgttcatgtcaggaccaagcgtgtgcggaaagacggcgccagactatcctgccctcctgcagctacgaagataaagaaaagccaaattgcctggacctccgcggtgtttgtagaaccgatcatttatgcaggtag

SEQ ID NO: 189024 - DNA, 1395 bp, synthetic construct
  misc_feature 1..1395: note = Description of Artificial Sequence: Synthetic coding sequence
  source 1..1395: mol_type = other DNA
atgatcctggccaacgtgttctgcctgttcttcttcctggacgagacccttagaagcctggcgtccccctcatctctgcaggggccagagcttcacggctggcgccctccagtggactgtgtccgagccaacgaactctgtgctgccgagtctaattgttcttcacggtacagaaccctgaggcaatgtctggccggaagagacagaaataccatgctggccaacaaggagtgccaggcggctcttgaagtactccaggaatcaccattgtacgactgtagatgcaaacgcggcatgaagaaggaacttcagtgtctccagatctactggtccatacacctagggctgacggagggagaggagttctacgaagcctccccgtacgagcccgtaaccagcagactttcagacatcttccgtttggcttcaattttctcagggactggggctgacccagtagttagcgccaagagtaaccactgccttgacgccgcgaaggcctgcaatctgaatgacaactgtaagaaactgagaagctcttacatttctatttgcaatcgtgagatatcaccgaccgagaggtgcaaccggcggaagtgtcacaaagcgcttagacagttcttcgaccgagtccctagtgagtatacatacaggatgttattctgcagttgccaggaccaggcatgcgctgagcggaggcggcagaccattttaccatcttgttcatacgaggataaggagaagcccaattgtctcgacttacggggggtgtgtcggactgatcacctgtgtaggtcccggttggctgactttcacgccaattgcagagcgtcttaccaaacagtgacatcatgccccgcggacaactaccaggcctgccttgggtcctacgccgggatgattggctttgacatgacccccaattacgtcgattccagccctacaggcatcgtggtgagtccctggtgcagctgccgcggctccggaaacatggaagaagagtgcgaaaaattcctcagggactttacagaaaacccctgtctgcggaacgccatccaggcttttggcaacgggacagacgtcaacgtgtctccaaaagggccatccttccaggcgacccaagcacctagggtggagaagactccaagcttaccagacgacctcagcgattctacctcactgggaactagtgtgatcaccacctgtacatctgtccaggagcaaggcttgaaagctaacaactcaaaagagttgtctatgtgctttacagaacttaccactaatatcatacctggctctaataaggtgattaagccgaactccggaccttctagggccagaccctcagccgccctgacagtgctcagcgtgctcatgcttaaactcgcattatag

SEQ ID NO: 189025 - DNA, 1203 bp, synthetic construct
  misc_feature 1..1203: note = Description of Artificial Sequence: Synthetic coding sequence
  source 1..1203: mol_type = other DNA
atggtgcggcccctgaacccccggcccctgccccccgtggtgctgatgttgttactactcttgccccccagcccattgcctctggccgcaggcgatccgctcccaactgaatctagattaatgaactcgtgcctgcaggctcgccggaagtgtcaggcagatcccacttgcagcgcagcttaccatcacctggactcatgtacctcttcgatctccactcctctgcccagcgaagagccttcggtcccagccgattgccttgaggcggcacaacagctcagaaactcctccctcatcggctgtatgtgccaccgcaggatgaaaaaccaagttgcatgtctggacatttactggacagttcatagggcacgatctctgggtaactatgagctggacgtgagtccctatgaggacacagtgacctcaaaaccttggaaaatgaacctttccaagttgaatatgctgaagccagatagcgacttgtgtctgaaatttgccatgctgtgtacgctcaatgataaatgtgatagactccgcaaggcgtacggggaggcctgtagtggtccccattgtcagcgacatgtttgcctcaggcagctactgacctttttcgagaaggctgctgagccacacgcccagggactgctgctgtgtccatgtgccccaaatgacaggggctgcggcgaaagacgcaggaatacaattgccccgaactgtgcgctacctccagtagcccccaactgtctcgagctgcggagactctgcttcagcgatcctttatgcaggtctagacttgttgatttccagacccattgtcatccaatggatattctgggcacatgtgcaactgagcaatctaggtgcctgcgagcttacctgggacttattgggacagcgatgacgcctaatttcgtgagcaacgtgaataccagcgtggccctgagctgcacatgtagaggttctggaaaccttcaagaggaatgcgagatgttggagggcttcttctcgcataacccctgtctgactgaagctattgcggccaagatgaggttccattcacaactgtttagtcaggactggccccatcccaccttcgctgtcatggcccaccagaatgaaaaccccgcggtaaggcctcagccctgggtacccagtctgttttcctgtacattgccattaatactgctgctatccttatggtag

SEQ ID NO: 189026 - DNA, 1110 bp, synthetic construct
  misc_feature 1..1110: note = Description of Artificial Sequence: Synthetic coding sequence
  source 1..1110: mol_type = other DNA
atggtgcggcccctgaacccccggcccctgccccccgtggtgctgatgctcttactgcttttacccccctccccactccccttagcggccggcgatccactgccgactgagtccagactcatgaattcttgcctacaggcacgaaggaagtgccaggcagaccccacttgcagcgccgcttaccatcatctggactcatgcacctcctctataagtacacccctgccctctgaggaaccaagcgtgcctgccgattgtctggaggctgcccagcagcttcgcaattcctctctgatcggatgcatgtgtcataggaggatgaaaaaccaggtggcatgcctcgacatctactggacagttcatagagccaggagcctcgattctgacctgtgcctaaaattcgctatgctatgcacactgaatgacaaatgcgacagattacgtaaggcatacggcgaagcctgctccgggcctcattgtcagcgccatgtctgtctgcggcagctgctgacatttttcgaaaaggcagccgaaccccacgcacaaggcttattgctgtgtccatgcgcccccaacgatcgtgggtgcggcgaacggcgtcggaacactattgcccccaattgcgccctcccacccgtggcccccaattgtttggagcttcgaagactgtgcttctcagacccgctatgccgatctaggctcgtagatttccagacccactgccacccgatggatatccttggaacctgtgccaccgagcaatctcgctgtttacgcgcctatctcggcttgattgggactgccatgactccaaacttcgtcagcaatgttaacacatctgtggcactgtcatgcacctgcagaggcagtggaaaccttcaggaagaatgcgagatgctggaagggttctttagccacaatccttgcttgacggaagctattgcggctaagatgagattccacagccagttgttctcacaagattggccgcaccctacctttgcagtaatggctcaccagaacgaaaatcccgcagtgcggccacaaccatgggttccttccctattctcctgcacattacccctgattctcctgctgtccttgtggtag

SEQ ID NO: 189027 - DNA, 2136 bp, synthetic construct
  misc_feature 1..2136: note = Description of Artificial Sequence: Synthetic coding sequence
  source 1..2136: mol_type = other DNA
atggagagcggcgccgtgctgctggagagcaagagcagccccttcaacctattacatgaaatgcatgaattgagattgctagggcatttgtgcgacgtgacagtcagcgtcgagtaccagggcgtgaggaaagacttcatggcacacaaagccgtattggcagcaacatcgaaattcttcaaggaggtttttttgaacgaaaagtctgtggacggcacaaggacaaacgtgtacctgaatgaggtgcaggtggcagatttcgcgagcttcctcgaatttgtgtataccgctaaggtacaggtggaagaggacagggttcagagaatgctggaagtggcggaaaaactgaaatgcctggatctctccgagacttgtttccagcttaagaaacagatgttagagtcagtgcttttggaactgcagaatttctcagaaagccaggaagtcgaggtgagctccgggtcacaagtttctgccgctcccgcaccacgtgcatctgtcgcgacagacgggccgcacccatccgggcttaccgactctttagactatcctggagagagagctagcaatgggatgtcaagtgatctaccaccaaaaaagtctaaggacaagctggataaaaagaaggaagtggtgaagcccccatatcctaaaattcgacgggcatccggtagacttgcgggcagaaaagtcttcgtggagattccaaaaaagaaatacacccgtaggctgagagagcagcagaagactgctgagggcgatgtcggcgactacaggtgtccgcaggaccagtcacctgaccgcgtgggcactgagatggagcaagtcagcaagaatgaggggtgccaggcaggcgccgaactggaagaactatctaaaaaagcaggccctgaggaagaagaggaggaagaagaagaagatgaggagggagaaaagaaaaagtccaatttcaaatgctcgatctgcgagaaggcatttctgtatgaaaagtcctttctcaaacattccaaacaccgccatggcgtggccactgaagtcgtgtaccgttgtgacacttgcggccagacctttgctaaccggtgtaatttaaagtctcaccagaggcacgtgcacagttctgaaaggcactttccttgtgaactgtgtggcaaaaaattcaagagaaaaaaggatgtcaagcgccacgtcttgcaggtacatgagggggggggggagaggcaccgatgcggacagtgcggaaaaggccttagttcaaagacagccttgcgtctgcacgagcgcacacacactggagacagaccgtacggctgtacagagtgtggcgcacggttttcccaacccagcgccctgaagacccacatgcgtatccacacaggcgagaagccatttgtctgcgacgaatgcggggcccgcttcacccagaaccacatgctgatctaccataagagatgccataccggcgaaagaccatttatgtgcgaaacatgtgggaagagctttgcaagcaaggaatatctcaagcaccacaatagaattcacaccgggtccaagcccttcaagtgcgaagtttgttttaggacatttgctcagaggaactcactttaccaacatattaaggtgcatacaggcgaaaggccatattgctgtgatcagtgcggaaagcagttcacacagctcaacgctctgcaacgtcatcgtcggatccacaccggcgaacgccccttcatgtgcaacgcatgtggccgtacattcaccgacaagtccaccctaagacggcatacttctatccatgataagaacacgccctggaagagtttcttagtgattgtagatggcagccctaagaatgacgatggccataagacagagcagccagacgaggagtacgtgagctccaagctaagcgataaattactctcgttcgctgagaacggccactttcataacctggctgccgtgcaagataccgttcccaccatgcaggagaattcctcagcagatacagcatgtaaggccgacgattccgtcgtcagccaagacaccctcctggcaactactataagcgagctgtctgaattaacgccccaaacagattctatgcctacccagttacatagtctgagcaacatggaatag

SEQ ID NO: 189028 - DNA, 2136 bp, synthetic construct
  misc_feature 1..2136: note = Description of Artificial Sequence: Synthetic coding sequence
  source 1..2136: mol_type = other DNA
atggagagcggcgccgtgctgctggagagcaagagcagccccttcaacctgctgcacgaaatgcatgaactacgcctcctggggcacttatgcgacgtaacagtctccgtggaatatcaaggggtgagaaaagatttcatggctcacaaggccgttttagccgcaacttccaagttcttcaaagaggttttcctgaacgagaaatcagtcgatggaactcgtactaacgtgtatctgaacgaggtccaggtggcggactttgcttctttcctggagtttgtgtatacagccaaagtacaagtggaggaggaccgcgtccagcggatgcttgaggtggcagaaaaactgaaatgtctcgacctctccgaaacctgtttccaactaaaaaagcagatgcttgaaagcgtgctgctcgagctccagaacttttcagagagccaggaggttgaagttagtagtggatcgcaggttagcgccgcgcctgctccaagggccagtgtagccactgacgggccccacccatccggcttgacagactcattggattacccaggcgaacgcgcctcgaacggaatgtcgagcgatctgcccccgaagaaatcaaaggataaactagacaagaagaaggaagtggtaaagccaccttatcctaagattagaagggcatcaggacgactggccggccggaaagtgtttgtggagattccgaagaaaaaatacacacgccggttacgggaacagcaaaagaccgctgagggcgacgtcggtgattataggtgcccccaggatcagtcaccggatcgggtgggtacagaaatggagcaggtctccaaaaacgaaggttgtcaggccggggccgagctcgaagaactctctaagaaagccgggcctgaagaggaggaagaagaggaagaggaggatgaggagggcgaaaagaagaagtccaattttaaatgttccatctgcgagaaggcctttctgtacgagaaaagctttctcaagcatagtaagcacaggcacggggtcgctaccgaggtcgtctataggtgtgacacttgtggacagacgttcgcaaacagatgcaatctgaaatcccaccagcgacatgtccatagcagcgagcgacactttccctgcgagctttgtggcaaaaagtttaagaggaaaaaggacgtgaagcgacacgtgctccaggtgcacgagggaggaggcgagaggcatcgatgcggccagtgcggcaaggggctgagtagcaagaccgcacttcgcctgcatgagaggacccatactggagatcgcccatatggatgtaccgagtgcggggccaggttttctcagccgagcgccttaaagacccacatgcgcattcacacgggggagaaaccctttgtgtgcgatgaatgcggcgcacggttcacccaaaaccacatgctgatctatcataagagatgtcacacaggagagcgaccttttatgtgcgagacctgtggcaagtcgtttgcaagcaaggaatacctgaaacatcataatagaatccatacaggatcgaaaccattcaagtgcgaagtgtgtttcaggacgttcgctcagcgcaatagtttataccagcacatcaaagtgcacacaggcgagcgcccttactgttgcgaccagtgcggaaaacagtttacacagctgaacgcactccagcgccaccgccgcatccacacgggtgaaaggccattcatgtgcaacgcctgtggacggaccttcacagataagtcaacactgcgtagacacacttccattcacgacaagaatacaccctggaaatccttcctcgtcatagtggatgggtctcccaagaacgacgacggacataaaaccgagcagccagatgaggaatacgtctcgtccaaactttccgataagctgctgtcatttgccgaaaatggacattttcacaacctcgccgccgtgcaggataccgttcctacaatgcaagaaaatagctccgccgatacggcttgtaaggcggatgatagcgtcgtgtcgcaagacaccctgctggcgacaaccatttctgaacttagcgagctaaccccacaaaccgacagcatgcccactcagttacactccctaagcaacatggagtag

SEQ ID NO: 189029 - DNA, 147 bp, synthetic construct
  misc_feature 1..147: note = Description of Artificial Sequence: Synthetic coding sequence
  source 1..147: mol_type = other DNA
atggagagcggcgccgtgctgctggagagcaagagcagccccttcaaccttctgcacgagatgcacgagcttagattgctgggccatctgtgcgatgtgactgtgagcgttgaataccagggggtcagaaaagacttcatggcttag

SEQ ID NO: 189030 - DNA, 663 bp, synthetic construct
  misc_feature 1..663: note = Description of Artificial Sequence: Synthetic coding sequence
  source 1..663: mol_type = other DNA
atgtgcgagacctgcggcaagagcttcgccagcaaggagtacctgaagcatcataacaggatccacactgggagcaaaccctttaaatgcgaagtgtgttttcgtaccttcgcccaaagaaactctctctatcagcacataaaagttcataccggagagagaccctactgctgtgaccagtgcggtaagcaattcacccagctgaatgcattgcagcgacatcgcagaattcatactggtgagcggccttttatgtgtaacgcttgcggcagaaccttcaccgacaaatccacgctccgccggcacacttccattcatgataagaatacaccctggaaatctttcttggtcattgtcgacgggagccctaagaacgatgacggacataaaaccgaacagcccgatgaggagtacgtgtcttctaagctgagcgataagcttttatcttttgctgaaaacggccacttccacaatctggccgccgtccaggacacagttcctaccatgcaggaaaactcgtctgctgataccgcatgcaaggccgacgattcagtggtctctcaggacacactgctggctactactatctctgaactgagtgaactgacaccccagacagatagtatgccgacccagctgcactcactctccaatatggagtag

SEQ ID NO: 189031 - DNA, 708 bp, synthetic construct
  misc_feature 1..708: note = Description of Artificial Sequence: Synthetic coding sequence
  source 1..708: mol_type = other DNA
atgctgatctaccacaagcggtgccacaccggcgagcggcccttcatgtgcgaaacatgcggaaagtctttcgcctccaaggagtacctaaaacatcacaaccggattcatacgggaagcaaaccgttcaaatgcgaggtctgcttccgaacctttgcacaacggaattcactataccaacatattaaggttcataccggcgaaaggccatactgttgtgaccaatgtggtaagcaattcacacagctgaacgccttgcagcggcaccgccggattcacactggagaacgccccttcatgtgtaacgcctgtggcaggaccttcaccgacaagtctaccctgcggcgacacactagcattcatgataagaatactccctggaagtcttttctggtgattgtggacggaagtccaaaaaatgatgatggacataagactgagcagcctgacgaggagtacgtgtcttctaagctgagcgacaaactgctgtcctttgctgaaaacggccacttccacaacttagctgccgtacaggatacggttcctacaatgcaggagaattctagtgccgataccgcatgtaaggccgacgactccgtggtgtctcaagatacattactggccacaacgatcagtgagctgagcgagttgaccccacagaccgactccatgcccacacaactgcacagtttaagcaacatggagtag

SEQ ID NO: 189032 - DNA, 1254 bp, synthetic construct
  misc_feature 1..1254: note = Description of Artificial Sequence: Synthetic coding sequence
  source 1..1254: mol_type = other DNA
atggacgaggagtacgacgtgatcgtgctgggcaccggcctgaccgaatgtattctgtccggtatcatgtccgtgaacgggaagaaggtgctgcacatggacaggaatccatattatggcggggaatctagcagcattactccacttgaggagctttataagaggtttcagcttcttgagggcccccctgagtctatgggacggggtagggactggaacgtggatctgatccctaagttcctcatggccaatggccagctcgttaaaatgctgctttacaccgaagtcactagatatctggattttaaagtggtcgaggggtcttttgtgtataagggaggcaagatttataaagttccctccacagagaccgaggcacttgcttccaacctcatggggatgttcgagaacgacccgaagacatttgaaggcgttgatccccagaccacttcaatgcgggatgtttatcgaaaatttgaccttggacaggatgtgatagactttacaggccatgcacttgccctgtatagaaccgacgactacttagaccagccatgcctcgaaactgtaaacagaattaagctgtactctgagagccttgcccgatacggaaagagcccttacttgtaccctttgtacggcctcggagagctgccacagggctttgccagattgagtgccatctacgggggaacctatatgctcaataagccagtcgacgacattatcatggagaatggtaaggtggtcggagtcaagtccgaaggtgaggtggcaaggtgtaagcagctcatctgcgaccccagttacattccggaccgagttaggaaagccgggcaggtgatccggatcatttgtattctatctcatccaatcaaaaataccaacgacgctaattcatgtcagataattattccgcagaaccaggtgaacagaaagtccgatatctacgtgtgcatgatctcatacgcgcataatgttgccgctcaggggaagtacatcgctatcgcctcgaccacggtggagacaacagatccagagaaggaggtggagcccgcactagaactgctggagcctatcgatgacggctgtgagagccaagtgttttgttcctgctcatacgatgccaccacacactttgagaccacatgcaacgacataaaggacatctacaagcgcatggccggcacagcgtttgatttcgagaacatgaaacgaaagcaaaatgatgttttcggggaagctgagcagtag

SEQ ID NO: 189033 - DNA, 1344 bp, synthetic construct
  misc_feature 1..1344: note = Description of Artificial Sequence: Synthetic coding sequence
  source 1..1344: mol_type = other DNA
atggacgaggagtacgacgtgatcgtgctgggcaccggcctgaccgagtgtatccttagtgggataatgagtgtcaatgggaagaaggtcctccacatggaccggaatccttactatggaggggagtccagcagtataactcccttggaagagctgtataagcgcttccagttattggaaggacctccggaaagcatggggagaggtcgtgactggaacgtggatttgataccaaaattcttgatggccaacggacagttagttaagatgctgctatacaccgaagtgaccaggtacctggactttaaggtcgtggagggtagcttcgtctataaggggggcaagatatataaggttccaagcactgaaacagaagcccttgcatcgaatcttatgggaatgtttgagaagcggcgcttcagaaagttcctggtttttgtggccaacttcgacgaaaacgacccaaagactttcgagggtgtggaccctcagaccacatccatgagagatgtctaccgcaagttcgaccttggccaagacgtgatcgacttcactggccacgctttggccctatacaggacggatgattatctggatcagccatgcctcgaaacggtgaatcggattaagctttactcagaatccctggctcgatacggcaagtccccctatctttaccctctgtatggcctcggcgaactgcctcagggatttgcccggctctccgccatttacggcggcacctacatgctcaataagccagtggacgacatcatcatggaaaatggaaaggtggtgggtgtaaaatctgaaggcgaagtagcaaggtgcaagcagctgatctgcgacccttcctatatcccggatcgagtgcggaaggccggtcaggtgattagaatcatctgtatcctgagccatcccatcaagaatactaacgatgccaactcatgccagatcataattcctcagaatcaggtgaatcgtaagagcgatatctacgtctgtatgataagctatgcccacaatgtggctgcccaggggaaatatatagcaatcgcttctacaacagtggaaaccaccgacccggagaaggaggtcgaacccgctcttgaattgcttgagccaattgaccagaagtttgtagctatctcggatctctacgagcccattgacgatggctgtgaatctcaggtgttctgctcgtgcagttacgatgccacaacacattttgaaactacatgtaacgatattaaagatatctataaacgcatggctggtactgccttcgacttcgagaacatgaaacggaagcagaatgatgtgtttggggaagccgaacagtag

SEQ ID NO: 189034 - DNA, 447 bp, synthetic construct
  misc_feature 1..447: note = Description of Artificial Sequence: Synthetic coding sequence
  source 1..447: mol_type = other DNA
atgagcctgggcaagcggaagcccagcaacttctacctggccaactttctgggaaaggagtgcatacttagcggcattatgagcgtcaacggaaagaaggtgctccatatggatcgcaacccatattatggcggcgaaagcgccagtataaccccactggaagatctttataagcgctttaaaatccccggatctccgcctgaatccatgggccggggccgggattggaatgtcgacctgatccccaagttcctcatggctaatgggcagctggtcaagatgcttttgtatactgaagtcacccgatacctcgacttcaaagttacagaaggcagctttgtctacaaaggggggaagatctataaggtgccgagtactgaagccgaggccctggcctcgtccctcatgggcctcttcgaaaagcgaaggttcaggaaatttctatag

SEQ ID NO: 189035 - DNA, 1350 bp, synthetic construct
  misc_feature 1..1350: note = Description of Artificial Sequence: Synthetic coding sequence
  source 1..1350: mol_type = other DNA
atgagcctgggcaagcggaagcccagcaacttctacctggccaactttttggggaaggaatgtattctctccggcataatgagcgtaaatggcaagaaggtgctgcacatggacagaaacccctattacggaggagaatctgcctccattactccactcgaagacctgtacaagcgattcaagatccctggaagtccccccgaatcgatgggacgcggacgggactggaacgtcgacctaatcccgaaattccttatggccaatggacagctcgtgaaaatgctgctgtacacagaagtgacccgatatcttgactttaaagtcactgagggcagcttcgtatacaaaggtggcaaaatttataaggttcctagcacagaggcggaagcactggcttcgtctctgatgggccttttcgagaagcggagattccgcaaattcctcgtctacgtagccaacttcgacgaaaaggaccccaggaccttcgaagggattgatcccaagaaaaccactatgcgcgacgtgtacaagaaattcgatctgggtcaggacgtcattgactttaccggacacgcgttggctttgtaccggacagatgattatctggaccagccttgctacgaaaccattaaccgcataaaactgtacagcgagtctctggctcgctacgggaagagcccctatttatatcctctgtatgggctgggtgagctgccccagggctttgcgcggttgagcgccatttacggcgggacttacatgttgaataaaccaatcgaagagatcatagttcagaacggtaaggtgattggtgttaagagtgaaggggaaatcgctaggtgtaaacagctaatttgcgatccgtcctacgtcaaagatcgtgtcgaaaaggtcggacaagtcattcgtgtgatctgtatcttgtcccacccaataaaaaacacaaacgacgcgaactcgtgccagattattattccccagaaccaagtgaaccgcaagtccgacatctatgtgtgcatgataagcttcgcacacaacgtggctgcccaggggaaatacattgcgatcgtgtctacaaccgttgaaacaaaagagccagaaaaagagattagaccggctctggagctcctcgagcccattgagcagaaattcgtaagtatttcagatctactggtgcccaaggacctggggactgagtcccagatcttcatcagccggacctatgacgcgacaactcacttcgaaaccacctgtgacgatattaaaaacatttataaacgaatgacaggtagtgaatttgacttcgaagaaatgaaacgaaaaaaaaacgacatctacggtgaggactag

SEQ ID NO: 189036 - DNA, 627 bp, synthetic construct
  misc_feature 1..627: note = Description of Artificial Sequence: Synthetic coding sequence
  source 1..627: mol_type = other DNA
atgcgggacgtgtacaagaagttcgacctgggccaggacgtgatcgactttactgggcatgccttggcactgtaccgcacagatgattatttagaccagccatgctatgagactattaaccgtattaaattatattccgagagcttggctaggtatgggaagagcccgtacttgtacccactgtatggcttgggggaactgccccagggtttcgctcggctttccgccatctatgggggaacctatatgctgaacaaaccaatcgaggagataatagtgcagaacgggaaggtgatcggagtcaaaagcgaaggagaaattgccaggtgcaagcagttgatatgcgatcccagttatgtcaaggatagagtggagaaggtgggccaggttattcgggtgatctgcattttatcccaccctatcaaaaatacaaacgatgcgaacagctgccagatcataattccacaaaaccaggtaaatcggaagtctgatctgttagcatccgtcactagttggtaccagaaaacatgggaacagaaggccagatctttgtttcccgcgcacatgatgccaccactgatcctccgccagcgtgtgatgactctgaagacctctatcagggggtag

SEQ ID NO: 189037 - DNA, 1203 bp, synthetic construct
  misc_feature 1..1203: note = Description of Artificial Sequence: Synthetic coding sequence
  source 1..1203: mol_type = other DNA
atgaacgaggagtacgacgtgatcgtgctgggcaccggcctgaccgagtgtattctgagcgggataatgtcagtaaacggaaaaaaagttctacatatggaccgcaacccttactatggcggcgagagtgcctctatcaccccactggaagacctgtacaaacgcttcaagatcccgggatcccctccagaatccatgggccgggggagggattggaacgtcgatctgattcctaagtttctgatggcaaacggcctgatgggactgtttgagaaaagacgctttcgcaaatttcttgtgtacgtagcgaactttgatgaaaaggacccaaggacttttgagggcattgatcctaaaaaaacaacaatgagggatgtctacaagaagttcgatttgggtcaggatgtgatagacttcacagggcacgccctggccttatataggactgatgattatctggatcagccatgctacgaaaccatcaacaggattaagctttattccgagtcactcgcccgctatggcaaaagcccctacctgtatccactgtacggtctcggggagcttcctcagggcttcgcccgactctccgcgatctacggaggtacctacatgctgaacaagcctatcgaagagattatcgtccagaatggcaaggtaatcggggtgaaatccgagggcgaaattgccagatgcaaacagcttatatgtgatccaagttacgttaaagaccgcgtggaaaaagtcggacaggtaatcagggtaatctgtatcctgagtcatcctattaaaaataccaatgacgcgaattcatgccaaatcataatcccccagaatcaggtgaatagaaagtctgatatctacgtgtgtatgatctcctttgcacacaacgtggctgcccaaggtaaatacatcgcaatcgtctcaaccactgtagagaccaaagagccggagaaggaaattcggccagcgctggaactcttggagcccatcgagcaaaaattcgtatccatatcagatctgctggtgcctaaggatcttggcacagaaagtcagatctttattagtaggacctatgatgctaccacccacttcgaaaccacctgcgacgatataaagaacatctacaagcggatgacggggtccgagttcgatttcgaggagatgaaacgaaagaagaatgatatttacggcgaagattag

SEQ ID NO: 189038 - DNA, 1338 bp, synthetic construct
  misc_feature 1..1338: note = Description of Artificial Sequence: Synthetic coding sequence
  source 1..1338: mol_type = other DNA
atgaacgaggagtacgacgtgatcgtgctgggcaccggcctgaccgagtgtattttatctggcatcatgagtgttaacggcaaaaaggtgttacatatggacagaaacccttactacggaggagaatccgcctcaatcactcccctggaggacctgtataagcgcttcaagatcccggggtctccacctgagagtatggggcgcgggcgcgattggaacgtagatttaatacccaagtttctcatggccaacggacagcttgtgaagatgctgctctatactgaggttacacggtatctggactttaaggtgacagagggatcttttgtctacaagggcggcaaaatttacaaggtgccgtccactgaggcagaagcactggcatccagtttaatggggctgttcgagaagcgcaggttccgaaagttcttggtgtatgtggcaaatttcgatgagaaggacccacgcacatttgagggaattgaccctaaaaagaccaccatgcgggacgtatataaaaaatttgacctggggcaggacgttattgatttcacgggacatgcccttgctctataccgcactgacgactatctggatcagccgtgttatgaaactataaatcggattaaactgtacagcgaatccttggcacgctacggcaaatccccatatctgtatcccctgtacgggttgggggaactgcctcaagggttcgcccggctctccgctatatacggcggtacttatatgctgaataagcccatagaggaaattatcgtacagaatggaaaagtgataggagtaaaatccgagggggagatagcccggtgcaagcagctaatctgtgacccctcgtatgtgaaagatagggtggaaaaggttggacaagttattcgggttatttgcattctgagccaccctatcaagaacacgaacgatgcaaactcttgtcagatcattattccccaaaatcaggtcaatagaaagtcggacatttacgtctgtatgatatccttcgcccacaatgtggccgctcaggggaaatacatagctattgttagcacaaccgttgagaccaaagagcctgaaaaagagatccgtcctgcacttgaattactggaacccatagagcaaaagttcgtctctatttcagatctcctggtacccaaagatctcggaaccgagtcccagatcttcatttctcgaacgtatgacgccacgacacattttgagactacttgcgatgacattaagaacatttacaaacgtatgactggaagcgagtttgattttgaagaaatgaagcggaaaaaaaacgacatctacggggaggactag

SEQ ID NO: 189039 - DNA, 468 bp, synthetic construct
  misc_feature 1..468: note = Description of Artificial Sequence: Synthetic coding sequence
  source 1..468: mol_type = other DNA
atgaacgaggagtacgacgtgatcgtgctgggcaccggcctgaccctgtataagaggttcaaaataccgggatccccgccagaaagtatgggacgggggagagattggaacgtagacctgatccctaaattcctgatggcaaatgggcagctggtgaagatgctgctgtacacggaggtcacacgctacctggacttcaaagtcacagaagggtcctttgtttataagggtggaaagatctacaaagtgccctccaccgaagcggaagctctggccagctcactcatgggcttgtttgaaaaacgcaggttccggaaattcctcgtatacgttgcaaacttcgacgagaaggaccctcggacctttgaaggcatcgatccaaagaagacgactatgagagatgtctataagaaatttgatctgggccaggatgtgattgatttcaccggtcatgcgctcgctctctag

SEQ ID NO: 189040 - DNA, 612 bp, synthetic construct
  misc_feature 1..612: note = Description of Artificial Sequence: Synthetic coding sequence
  source 1..612: mol_type = other DNA
aagaagttcgacctgggccaggacgtgatcgacttcaccggccacgccctcgcattgtatcggacagatgactatcttgaccagccctgctacgagacgattaaccgcattaagctctattccgagtctctggcacgctacggcaaatccccgtacctctacccactttatggactgggagagttaccgcagggatttgcccgactaagtgccatctatggcggcacgtacatgttgaataagcctattgaagagatcatagtccagaatggaaaggtgataggcgttaaatctgagggagagattgctcgttgcaaacagcttatctgtgatccttcgtacgtcaaagacagggtagagaaggtgggacaagtaatcagggtgatctgtatcctgtcccatcctatcaagaacacaaacgatgcgaattcatgtcagatcatcatacctcaaaaccaggtgaacagaaagagcgacctgctggcttcagtgacttcctggtatcagaagacttgggagcagaaggcaaggagcctcttcccagctcacatgatgccaccgctgattctgcgccagcgggtcatgactttgaagacttccattcgaggttag

SEQ ID NO: 189041 - DNA, 792 bp, synthetic construct
  misc_feature 1..792: note = Description of Artificial Sequence: Synthetic coding sequence
  source 1..792: mol_type = other DNA
atgaacgaggagtacgacgtgatcgtgctgggcaccggcctgaccgagtgtatcctgtcagggatcatgagcgttaacgggaagaaggttctgcatatggataggaacccatactacggaggagagtcggcatccatcaccccccttgaggatctctataagagattcaagatcccaggtagtccgcccgagtctatggggcggggaagggattggaacgtggacctgattccgaagttcctgatggcaaatgaggtgactcggtacctcgactttaaggttaccgaaggcagtttcgtatataagggaggcaagatttataaagttccatctacagaggctgaagctcttgcgagctcactgatggggctgttcgagaagcggaggtttcgtaaatttctggtatatgttgctaatttcgatgaaaaagatccgaggacattcgaggggatcgacccaaaaaagaccactatgcgggacgtctacaagaaattcgacctgggacaggatgtgatagatttcacgggtcacgccctggcattgtaccggacagacgattacctggaccagccttgttacgaaacaattaataggataaagttatattccgagagcctggctcgctatgggaagtcgccttacctctatccattgtacgggctcggcgaactccctcaaggattcgcgagactgagcgccatttatggaggtacctacatgcttaataagccaatcgaagagatcatcgtgcagaatggaaaagtaatcggagtgaagtccgaaggggaatag

SEQ ID NO: 189042 - DNA, 1119 bp, synthetic construct
  misc_feature 1..1119: note = Description of Artificial Sequence: Synthetic coding sequence
  source 1..1119: mol_type = other DNA
atggcccacgcccccgcccggtgccccagcgcccggggcagcggcgacggcgaaatgggcaagccacgtaatgtggctctgattacagggatcacaggccaagacggaagctacctcgccgagttcttactcgagaagggctacgaggttcacgggatcgtccggagatcatctagtttcaacacgggtcgcattgaacacctgtataaaaacccccaagcccatatcgagggcaatatgaagctgcactacggcgatttaaccgacagcacttgcctggtgaagataataaatgaagtcaaacccaccgagatttacaatttaggggcacagagccacgtgaagatctctttcgacctggccgaatacacagcagacgtggacggcgttggaacactgcgcttactggacgcagtcaaaacgtgcgggctcattaatagtgttaagttttaccaggcatctactagcgaattatacgggaaagtgcaggagatccctcagaaggaaactacccccttctatcccagatcaccatacggggctgcaaaactttatgcatactggatcgtggtgaattttcgggaggcctataatcttttcgccgtgaacggcatcctgttcaaccatgagtctccccgccgcggagccaatttcgttacccgtaaaatttccagatcagtagctaaaatttacctcggccagttagagtgcttctcactcggcaatttggacgcaaagagggattggggtcatgccaaggactatgtggaagctatgtggctgatgctgcagaacgacgagcctgaagactttgtaattgctaccggggaggtccacagtgtgagggaattcgtggagaaaagcttcttgcacattggaaagacaatcgtttgggaaggtaaaaacgagaatgaagtgggccgctgtaaggaaaccggaaaggtgcatgttaccgttgatttaaagtattataggcctacagaagtggactttctgcaaggcgactgtacaaaagcgaagcaaaagctgaattggaagccacgagtcgccttcgacgaactggtccgtgaaatggtacacgcggatgtcgaattaatgcgaacaaacccaaatgcctag

SEQ ID NO: 189043 - DNA, 1029 bp, synthetic construct
  misc_feature 1..1029: note = Description of Artificial Sequence: Synthetic coding sequence
  source 1..1029: mol_type = other DNA
atgtgcaagatggacggcagctacctggccgagttcctgctggagaaagggtacgaggttcacggcatagtgaggagatcatccagttttaacaccggaagaatcgagcacctatacaagaacccccaggctcacatcgaagggaatatgaagcttcattatggggatcttaccgactccacatgcctggtgaagatcattaacgaggtcaaacctacagaaatctacaacctcggggcccagtcacatgtcaaaataagtttcgatctggcagagtataccgccgatgtagacggtgtggggacccttaggctgctggacgcggtcaagacatgtgggctaattaatagcgtgaagttctatcaggcaagtacatccgaactgtatggcaaagtacaggaaattccgcagaaagagacaacaccattttacccaaggtcaccgtatggggccgctaaactgtacgcttactggatagtggtaaacttccgggaagcatacaatctgtttgctgttaacggcatcctgttcaaccacgagagcccaaggcgtggggccaatttcgtcacccggaagatctcccggagcgtggccaagatctatctcggccagctcgagtgcttcagcttgggtaatctggacgccaagagagattgggggcatgctaaagattatgtcgaggcgatgtggcttatgctccagaacgatgagccagaggattttgtgatcgcaacaggcgaggtccactccgtcagggagttcgtggaaaaatcctttctgcacatcggtaagaccatcgtttgggaaggaaaaaatgaaaatgaagtggggagatgtaaggaaaccggcaaagtgcacgtgacagttgatctgaaatactatcgcccaaccgaggtcgactttctccagggtgactgtacaaaggccaagcagaaactgaactggaaacctagagtcgccttcgatgaactcgtgcgagagatggtgcacgccgatgtcgagctgatgcggaccaaccctaacgcgtag

SEQ ID NO: 189044 - DNA, 2196 bp, synthetic construct
  misc_feature 1..2196: note = Description of Artificial Sequence: Synthetic coding sequence
  source 1..2196: mol_type = other DNA
atggtggtggagcaccccgagttcctgaaggccggcaaggagcccgggctccagatatggcgcgtggagaaattcgacctcgtgcctgttcccaccaatttgtatggggatttttttacaggcgacgcttatgtaattctcaagacagtccagcttaggaatgggaacctccagtacgatcttcactattggctcggtaacgaatgctctcaagacgagtctggtgccgccgccatcttcaccgttcagctggatgactacctcaatgggcgagcagtgcagcacagggaagtacagggcttcgagtctgccacgtttctgggatactttaaaagtggcctgaaatacaagaaaggtggagttgccagtgggttcaagcacgtggtgcccaacgaagttgtcgtgcagaggttgttccaggtgaaagggcgtagagtcgtgagggccactgaagttcctgtgtcatgggaaagttttaataacggggactgtttcattctggacctgggcaataacattcatcagtggtgtggctccaatagtaatagatacgaacggctaaaagcgacccaagtcagcaaaggtatccgcgacaatgaaaggtctggccgcgccagggtccacgtaagtgaagaggggacggaacccgaggccatgctgcaggtgcttggacccaaacctgcgctacctgcgggaacagaggatacagcgaaagaggacgcagccaacaggaaactggccaagctttacaaagtgtctaacggggctgggacaatgagtgttagcttggtggctgacgagaatccctttgctcagggtgcccttaaatctgaggactgtttcatcctggatcacggaaaagatggcaagatctttgtatggaaaggaaagcaagcaaacactgaagagaggaaagctgctctcaagaccgctagcgacttcataacgaaaatggactacccaaagcagactcaggtttctgttctacccgaggggggagaaacgcctctcttcaaacagttttttaaaaactggcgtgaccccgaccagaccgatggcctaggtctgagctatctctcatctcacatcgccaatgtcgaaagagtgccattcgacgcagcaacattgcatacttcaacagccatggcagcccagcatggaatggacgatgacggtacaggacagaagcagatatggcgtatcgaaggctccaacaaggttcccgttgaccctgccacttacggacaattttacggcggtgactcttacattatcctctataattatcggcacggagggcgccaggggcagattatatacaactggcaaggtgcgcaaagcacccaagatgaggtagctgcttctgcaatcttgacggcccaactggatgaagagctgggcgggacaccagttcagagtagagttgttcaagggaaagagcctgctcacttgatgtccctcttcggaggaaaacccatgattatttataaggggggcacttcacgggaggggggtcagactgccccagcaagcacccgcctcttccaggtgcgcgcgaattccgcaggcgctacccgagctgtagaggtgctgccaaaagcaggagcattgaactctaacgacgcctttgtgctcaagacgccctcagctgcctatctgtgggtgggtacgggggcgtcggaagcagaaaaaacgggagcacaggagctgttgcgggtgctaagggcacaaccagttcaggtagctgagggcagtgaacccgacggattttgggaggcactggggggcaaggctgcttacagaacatctccacggctgaaggataaaaaaatggacgcacacccacccaggctgttcgcgtgctctaacaaaataggcagattcgttattgaggaggtgcccggagagctgatgcaggaggacctggcgaccgacgacgtgatgctgctggatacttgggaccaggtgttcgtctgggtgggaaaggattctcaggaggaggagaagacagaggcactcacatctgccaagagatacatcgaaaccgatcctgcaaacagggatagacgcacccctatcacagttgtgaagcaaggctttgagcccccctcgttcgtgggctggtttctggggtgggacgacgattactggtctgtcgatcccttagacagggctatggctgaactggcagcatag

SEQ ID NO: 189045 - DNA, 2196 bp, synthetic construct
  misc_feature 1..2196: note = Description of Artificial Sequence: Synthetic coding sequence
  source 1..2196: mol_type = other DNA
atggtggtggagcaccccgagttcctgaaggccggcaaggagcccggactccagatctggcgcgttgagaagtttgatcttgttcccgtgcccacaaacctatatggcgacttctttacaggcgatgcttacgtgatattaaagaccgtgcaactgaggaatggaaatctacaatacgacctccattattggctgggtaatgaatgttctcaggacgagtcgggcgccgccgcgatcttcacggtgcagctcgacgattatctgaacggacgggctgtgcagcacagggaggtgcaggggttcgagtcagcaactttcctgggctacttcaaaagtgggctcaaatacaagaaaggtggggtggcaagtgggttcaaacacgtggtgcctaatgaggtcgttgtgcagagactgtttcaggtgaaaggtcgaagagttgtgcgggcaactgaggtccccgttagttgggaatcttttaataatggggactgcttcattctggacctgggaaacaacatccaccagtggtgtgggtctaacagtaaccggtacgaaagactgaaggcgactcaagtctccaaaggcattcgtgataacgaaagatctgggcgcgctcgcgtacatgttagcgaggaaggcacagagcccgaagctatgctgcaggttctcggaccaaagcctgctttgccagctggcacggaggacactgcaaaagaggacgccgccaatcgaaagctcgctaaattgtacaaggtctcaaatggggccggcactatgtcagtgagcctggtagccgacgagaatccatttgcccagggcgctctaaagagtgaggattgtttcatcctcgaccatggtaaggatgggaagatatttgtttggaaggggaagcaagcaaacacagaggaacgtaaggctgccttaaagaccgcatctgacttcattaccaagatggattacccgaagcagacccaggtctcagtcctccccgagggcggagagactcccctcttcaaacagttcttcaaaaattggcgggatcccgaccagacagatggattaggacttagctacctgagctcacacattgccaatgttgagcgcgtgcctttcgacgccgctaccctgcacacctccaccgctatggcagcacagcacggcatggacgacgacgggactggtcagaagcagatttggcgcatcgagggcagcaacaaagtgccggtggacccagcgacctacggacaattctatggtggagactcgtacataatcctttataactacagacatggtgggcgacaaggccaaatcatttacaactggcagggcgcccagtctacccaagatgaggtcgctgcttccgcaatcttaacagcacagctcgatgaggaactgggcggtacacctgtgcaaagtcgtgtcgtgcagggaaaagaacccgcacacctcatgtccctcttcggcgggaagccgatgatcatctacaaagggggcacaagccgggagggcgggcagaccgcccccgcctccacgaggctgttccaggtgcgcgcaaattcagccggggctaccagagccgttgaggtattgcctaaagctggagctctcaacagcaacgacgcattcgtgctcaagacgccctcagctgcctacctgtgggtgggaactggcgccagcgaggccgagaaaacgggagctcaggaacttttgagggtgctgagggcccagcccgtgcaggttgccgaagggtccgagcctgacggattctgggaggccctgggcggcaaagccgcttatcgcacttcgccgagactgaaagacaaaaagatggatgcccatcctccacgcttgtttgcctgctctaacaaaatcggcagattcgtgatcgaagaagtgcccggtgaactcatgcaggaagacttggcaaccgacgacgtgatgctgttagacacgtgggaccaggtcttcgtttgggtcggtaaagactcgcaagaggaggagaaaactgaggccttaacttctgcgaagcgttatatcgaaacagatcctgccaatagagacagaaggactccaattactgtggtcaagcagggtttcgagccaccctcatttgtgggctggttcctggggtgggatgatgactattggagcgtggatcctctggaccgtgccatggcagaacttgcagcctag

SEQ ID NO: 189046 - DNA, 2349 bp, synthetic construct
  misc_feature 1..2349: note = Description of Artificial Sequence: Synthetic coding sequence
  source 1..2349: mol_type = other DNA
atggccccccaccggcccgcccccgccctgctgtgcgccctgagcctggcactctgtgctttatccctcccagttcgggcagccaccgccagcagaggcgcttcccaggccggcgcccctcaggggcgcgtaccggaggcccggcctaactctatggtggttgagcaccccgagtttctgaaggccggcaaggagccgggcctccagatctggcgggtcgagaagttcgacttggtgccagtccccaccaatctgtacggtgattttttcactggagacgcctatgtgatcctcaaaacagtacagttgaggaacggtaatttgcagtatgatcttcactactggctcggcaacgaatgttcccaggatgagtccggcgctgccgcgatttttacagtccagctggatgactatcttaacggacgcgcagtacagcacagggaggttcagggatttgagtctgctaccttcctgggctattttaagtccggtcttaaatacaagaaaggtggagtcgcctcgggtttcaaacatgtggtccccaatgaggtagtggtgcaaaggctgtttcaggtgaagggccgacgggttgtccgggccacagaggtcccagtgagttgggagagctttaataacggggattgtttcattcttgacctgggaaataatattcaccagtggtgcggctcaaactccaaccgttatgaacggctgaaagccacccaggtgtcgaaaggcattcgagataacgagaggtcaggcagggcccgcgtccacgtcagcgaggaaggcactgaacctgaagccatgctgcaagtcttgggccctaaacccgcgctacctgcaggcactgaggataccgccaaggaagacgcggctaaccgcaaattggccaaactgtacaaagtttctaatggggctggcacgatgagcgtatccttagtggccgatgagaaccccttcgcccagggtgcccttaagtcagaggactgtttcatcttggaccatggaaaagatggcaaaatctttgtatggaaggggaagcaagcgaacactgaagagcgtaaggccgcgcttaaaactgcctcagactttatcactaaaatggactacccaaagcaaacccaggtgtctgttctgcccgagggtggtgagactccacttttcaagcagtttttcaaaaattggcgcgaccctgaccagacagacgggctcgggctttcctacctatcttctcatattgccaacgtggaacgcgtcccctttgatgctgctactctgcacacttcaaccgccatggcagcgcagcacgggatggacgatgacggtacaggtcaaaaacagatctggaggatcgaaggctccaataaggttcctgtcgaccctgccacttatgggcagttctatggtggcgactcctatatcatcctttataattaccggcacgggggtcgccagggccagattatctataactggcagggggcccaatcaactcaggacgaggtcgctgcatcagccattctgactgcccagctcgatgaagaactgggagggactccagtacagtctagggtggtgcagggtaaagaaccagcccacctcatgagtctctttgggggaaaaccgatgatcatctacaagggtggcacttcacgcgagggaggccagacggccccagccagcacacgcctgttccaggtgagagctaattccgctggggcgactagagccgtggaggtactgcccaaggcaggcgccttgaatagcaacgatgcatttgtcttgaagactccatcagctgcctatctctgggtggggacaggcgcatcagaggccgaaaagacaggtgcccaggagctgctacgggtcctccgcgcccagccagttcaggtggcagagggatcagaacccgatgggttttgggaggccctcggtggtaaggccgcttacaggacttccccacgtctgaaagacaaaaagatggatgcgcacccccctaggctgttcgcctgcagcaacaaaattggacgatttgtgattgaggaggtcccaggtgagctgatgcaggaggacctggccaccgatgacgtcatgttattggacacatgggatcaagtctttgtgtgggtggggaaggattcccaagaagaagagaaaactgaggccctaacctctgctaagcgatatatcgagactgatcctgccaatagagataggaggacacctatcactgtcgttaagcaagggttcgaacctccttcctttgttggttggtttctcggctgggacgacgattattggagtgtggaccccttggacagggccatggccgagctggcagcgtag

SEQ ID NO: 189047 - DNA, 2196 bp, synthetic construct
  misc_feature 1..2196: note = Description of Artificial Sequence: Synthetic coding sequence
  source 1..2196: mol_type = other DNA
atggtggtggagcaccccgagttcctgaaggccggcaaggagcccggacttcagatctggagagtggaaaaattcgatttagtaccagtgccgaccaatctgtatggagacttctttactggggacgcgtacgtgattcttaagaccgtacagctgagaaatggcaacctgcagtatgacctccactattggctgggcaatgaatgtagtcaggacgagagcggagccgctgcaatattcacggtccagttagatgactatcttaacgggagagctgtacaacatcgagaggttcagggcttcgagagcgctacttttttggggtactttaagagcggccttaagtacaagaaaggcggggtcgcttccggtttcaaacatgtggtgcctaacgaagtggtcgtacaaagattgtttcaggtgaaaggccgcagagtcgtcagggccaccgaagtgcctgtttcctgggaatcttttaacaatggtgattgttttattctggatctggggaataacatccatcagtggtgtggctcgaacagtaaccgatacgagcgcttaaaggccacccaggtgtccaagggcattcgtgataatgaacgttccggccgcgcgcgtgttcacgtgtctgaagaaggcacagaaccagaggctatgttgcaggtgctcggccccaaacccgccctgcccgcaggcacagaggacaccgcaaaagaagatgctgccaaccgcaaacttgccaaattgtataaggtgtccaacggcgctggtacaatgagtgttagcctcgtggcggacgagaacccatttgcacagggtgcgctcaaaagcgaagattgtttcatcctggaccacggaaaagacggcaaaatcttcgtgtggaagggcaagcaggccaatacagaggaacgtaaggccgctcttaagacagccagcgattttattaccaaaatggattaccccaagcagactcaggtttccgtcctcccagaaggcggcgaaacccctctctttaagcagttttttaagaactggcgggatcccgatcagacagacggcctcggactctcatacttgtccagtcacattgcgaatgtcgagagggtgcctttcgatgcggctacactgcacacttcaaccgccatggctgcccagcatggcatggacgacgacggcactgggcagaagcagatttggcggattgaggggagtaataaggttccggtggaccccgcaacttacgggcagttttacggaggggactcctacatcattctgtataactatcgccatgggggtcgtcagggtcaaatcatctacaactggcagggggcacagagcacacaggatgaagtcgctgcttctgctatacttaccgctcagttggacgaggagcttggcggtacacccgtgcagtcccgggtagtgcagggaaaagaacccgcccacctgatgagccttttcgggggtaaaccaatgatcatctataagggtggaacctcgcgcgaaggcggacagaccgccccagcttctaccagattgttccaagtccgcgcgaatagcgccggcgctaccagagccgtggaggtgttgccaaaggccggcgctctgaactccaacgacgcctttgtgctaaagactccctcagctgcctacctgtgggtaggaaccggggcctccgaggccgagaagaccggagcccaagaactgctgagggttctgcgcgcgcaaccggtccaggttgcagagggcagcgagcccgatggtttttgggaagctctaggcggcaaagccgcctaccggacctccccaagactgaaggataagaagatggatgcgcatccccccaggttattcgcatgttccaataaaattggtagattcgtcatcgaggaagtcccaggggagcttatgcaagaggacctggctacagacgatgtcatgctgctcgacacctgggatcaggtttttgtgtgggtgggtaaggacagtcaggaggaggaaaaaaccgaggcactcaccagtgcaaaacgatacatagagaccgaccctgccaatcgagatagacgtactcctatcacagtggtgaagcagggtttcgagccaccaagtttcgtcggctggtttctggggtgggacgacgattattggagcgtcgatccattggatagagcaatggcagaactggcagcatag

SEQ ID NO: 189048 - DNA, 2148 bp, synthetic construct
  misc_feature 1..2148: note = Description of Artificial Sequence: Synthetic coding sequence
  source 1..2148: mol_type = other DNA
atggtggtggagcaccccgagttcctgaaggccggcaaggagcccgggctgcaaatttggagagtggagaagtttgatgcatacgtgatcctgaagactgtgcagctgagaaatggcaatctgcaatatgacttgcactactggctcggcaacgaatgtagccaggacgagagcggcgctgctgccatttttaccgtccagctggacgattacctaaatggccgggccgttcagcacagagaagtacaaggcttcgagtcggctaccttcctcggctacttcaagtccggcctgaaatacaaaaaggggggtgtggcctccggcttcaaacacgttgtgccaaatgaggttgttgttcagagactatttcaggtaaaagggcgacgcgtggttcgagctacagaagtgccagtgagctgggaatcctttaacaatggcgactgctttattctagatcttggaaataatatacaccagtggtgtggatctaattccaaccgctacgagcggttaaaggcaactcaggtgtccaagggcattagggataatgaacgaagcggcagagccagggtgcatgtgtccgaggagggaacagaaccagaggccatgttgcaggtgttgggaccgaaacctgcgctgcccgcaggcaccgaagatacagcaaaagaagatgccgccaacagaaagcttgcaaaactttacaaagtgtctaatggagccggaactatgagcgtatcgctggtcgccgatgagaacccatttgcacaaggcgcattgaagagcgaagactgttttatcctggaccatggaaaagacggcaagatctttgtctggaagggaaagcaagcgaatacagaggaacggaaagcggcactgaaaaccgcctctgattttatcactaagatggattatccgaagcagacccaggtgtccgtgctgcccgaaggaggagagactcccctgtttaaacagttttttaagaactggcgagatcccgaccagacggacggcctgggactgagctacctgagcagccatattgccaatgttgagagggtgcccttcgatgctgctacgctgcatacttctactgcaatggccgcccagcacggtatggacgacgacggaacaggacagaagcaaatctggagaatcgaaggaagcaataaggttcccgtggatccggcgacatatggtcagttttatgggggagatagttatattatactatacaattaccgccatggtggcaggcaggggcaaattatttacaattggcagggtgcacaatcaacgcaagacgaagtggcagctagcgctatcttaacagcccagttggacgaggagctgggcgggactccggtgcaatccagggtcgtgcaagggaaggagccagcccatctgatgagcttgttcggagggaagccgatgatcatatataaggggggaacatcaagagaaggcggccagaccgcccctgccagcacccgactttttcaggtccgcgccaactccgccggtgcaactcgggctgtggaagtgttacccaaagcaggagccctgaatagtaatgatgcgttcgtcttgaaaacacccagcgcagcctatctgtgggtgggaacaggggcttccgaggctgaaaaaactggcgcccaggagctgctacgtgtgctgcgcgcccagcccgtccaggtggccgaaggaagtgagcccgacggattttgggaggctcttggagggaaggccgcctataggacatcacctcggctgaaagacaaaaagatggatgcccatccccctcggctcttcgcctgctctaataaaatcggccgctttgtaatagaggaggttcctggtgagctgatgcaggaagatctggcaacggacgacgtcatgctccttgacacatgggaccaggttttcgtgtgggttggtaaggactcccaggaggaagagaagacagaggcactaacatcagccaagagatacatcgagacagaccctgccaatcgggacagacgaaccccaattactgtggtgaagcagggtttcgagcccccatcatttgttggctggttcctgggatgggacgatgattactggagcgtcgaccctctggacagggcaatggctgagttggctgcttag

SEQ ID NO: 189049 - DNA, 2229 bp, synthetic construct
  misc_feature 1..2229: note = Description of Artificial Sequence: Synthetic coding sequence
  source 1..2229: mol_type = other DNA
atggagaagctgttctgctgcttccccaacagcatggtggtggagcaccccgagtttctgaaggctgggaaggagccagggctgcagatctggcgggttgagaagtttgacttggtgccagttcctaccaatctgtacggggattttttcaccggagatgcatacgtgatattgaagacggtgcagcttaggaatggaaacttgcaatatgacctccactattggctcgggaatgagtgtagccaggacgagtctggcgctgcagcgatctttacagttcagctggatgattatttgaatggtcgggctgtgcagcatcgtgaagttcagggctttgaatcggccacttttctgggatacttcaaatctggattaaagtacaagaaagggggcgtggccagcggcttcaaacatgtcgttcccaacgaagttgtggtccaaagactgttccaagttaagggaaggagggtcgttagagcaacagaagtccccgtttcctgggagtcttttaacaacggcgactgcttcatcttagacctcggcaacaacatccaccaatggtgcgggtctaatagcaaccggtacgaacgcttgaaagcaacacaagttagtaagggaattagagacaacgagagatccgggagggcccgcgtgcatgtttcagaggaaggcaccgaaccggaggctatgctacaggttctgggcccaaagcccgccctgcccgccggcaccgaagacacggcgaaagaggacgccgccaatagaaaactggccaaattatataaggtcagtaatggggccgggacgatgagcgtctctctcgtagccgacgagaatcctttcgcacaaggcgcgctgaagtccgaggactgctttattcttgaccacggcaaagacggaaagatcttcgtgtggaaagggaaacaggccaacactgaagaaaggaaagctgcactgaaaactgctagcgatttcatcaccaagatggattaccccaaacaaacccaggtgtctgtgcttcctgagggcggggaaacacctctctttaaacagttctttaaaaattggcgagacccggaccagaccgatggcctgggcctgtcgtatctgagttcgcacatcgccaatgtcgaaagagtaccattcgacgccgccacgctgcacacaagtaccgcaatggccgcacagcacggaatggatgacgatggaacagggcaaaaacagatctggcggatcgagggctctaataaggtcccagttgaccccgccacatatggccagttctacgggggcgattcctacatcatcttatacaattatagacacggcggtagacaaggccagatcatctacaattggcagggcgcacagtccacccaggatgaagtggccgcctccgccatcctgaccgcacaattagacgaagaactgggaggcacccctgtgcaatccagggtcgtccagggaaaggagcccgcccacctgatgtctctgttcggtggtaagccaatgataatatacaagggcggaacctcacgggaggggggacaaactgcccctgcaagcactcgattgtttcaggtgagggcaaattctgccggcgctacccgggccgtggaagtgctgccaaaagccggggcgttgaactccaacgatgcatttgtgctcaaaacacctagcgcagcatacttatgggttggcacaggcgcatccgaggccgagaagactggagctcaggaattgctgcgggttctgagagcacagcccgtgcaggtggcggaggggtccgagcccgatggtttctgggaggctcttggcggcaaggctgcctatcggacctcaccccgactgaaggacaagaagatggacgcacaccctcccagattgtttgcctgctctaacaaaatcggacggtttgtcatcgaggaagtgcccggagagctaatgcaagaagatttggccaccgatgatgtcatgctgctcgacacttgggatcaggttttcgtttgggtgggtaaggactctcaggaggaggaaaaaacagaagctctaacctccgctaaacggtatatagagactgatccagcaaacagggaccgaagaacacccattacagtcgtcaagcaggggtttgagccccccagtttcgtgggctggtttctaggttgggatgatgattactggtccgtcgatcccttggatagagcaatggcagaactcgcggcatag

SEQ ID NO: 189050 - DNA, 2196 bp, synthetic construct
  misc_feature 1..2196: note = Description of Artificial Sequence: Synthetic coding sequence
  source 1..2196: mol_type = other DNA
atggtggtggagcaccccgagttcctgaaggccggcaaggagcccggcctgcagatatggcgcgttgaaaaattcgacctggtccctgtcccaacaaacctctacggagacttttttacaggggatgcatacgtcatcctcaagaccgtccagttaagaaacggcaacctgcagtatgacctccattattggctgggcaacgagtgctctcaggacgaatcgggcgcagcagcgattttcactgtacagctggacgactacctgaacggccgtgccgtgcaacaccgcgaagttcaggggttcgaaagcgctaccttcctcggctattttaaaagtggactcaaatataaaaaaggcggcgtcgcatccggtttcaagcatgtggtgccaaacgaagtcgtcgtgcagaggctctttcaagtcaagggaagaagagtggttagagcaacagaggttcctgtttcctgggaatcgttcaataatggcgattgttttatcctggatctggggaacaatatccatcaatggtgtgggagcaacagcaatcggtacgaaagactcaaggctacccaggtgtccaaaggtattagggataacgaaaggtctgggagagctcgggtgcatgtgagcgaggagggtaccgaaccagaggctatgttgcaggtcttaggcccaaagccagcactgccagctgggacagaggacacggctaaagaggacgcggctaaccgcaagctagccaagctctataaagtctcaaatggcgctggtaccatgagtgtgagcctggtagcagacgagaatcctttcgcgcaaggagccctgaagagcgaggattgcttcatcctggatcatggaaaagacggaaaaatcttcgtgtggaaaggaaaacaggcaaacacagaagaacggaaggcagcacttaaaactgcaagtgacttcattaccaaaatggactatccaaagcaaactcaggtgagcgtgttgcccgagggaggagagacacctctgtttaagcagttctttaagaattggcgcgaccccgatcagaccgacggcctcggactctcctacctctcgagccacattgccaacgtggaacgcgtcccatttgatgcggcaacacttcacacttccactgcaatggccgcccaacatggcatggacgacgacgggaccggccaaaaacaaatctggagaatcgagggctctaataaggtccccgttgatccagccacctatggccagttctatggaggtgactcctatatcattctctataactatcggcacggcggtcggcaaggtcagatcatctacaattggcaaggcgctcagtccacccaggacgaggtggctgcctctgctatcttgactgcccagctagacgaagagctgggtggaacaccagtgcagtccagagtggttcagggtaaggagcctgctcatttgatgagccttttcggcgggaagcccatgattatctacaaggggggcacaagcagagagggcggacagactgcgcctgcctcgactcgactattccaagtgcgggctaactcagccggagctacacgggccgtcgaggtcctgccaaaggcgggagcccttaattctaacgacgcgtttgtgctaaagacccctagtgctgcgtacctgtgggtcggcaccggagcctctgaggctgaaaagactggcgctcaggaactgctcagggtcttacgcgcccagcctgtacaggtggctgagggaagcgagcctgatgggttttgggaagctctgggcggaaaggcagcgtacagaacctctccccgactgaaagataagaaaatggatgctcaccccccccgcctttttgcatgcagtaacaaaatcggccgctttgtgatcgaagaagtccctggagagttgatgcaggaagaccttgcaaccgacgacgtgatgctcttggatacatgggaccaagttttcgtgtgggtgggaaaagatagccaggaggaggaaaagacagaggccctgacgtcagcaaagaggtacatcgaaaccgatcctgcaaaccgcgatcgccgcaccccaataaccgtggttaaacaagggtttgaaccaccttcattcgtgggttggttcctgggatgggatgatgattattggtcagtggaccccctggaccgggccatggccgagttagctgcatag

SEQ ID NO: 189051 - DNA, 783 bp, synthetic construct
  misc_feature 1..783: note = Description of Artificial Sequence: Synthetic coding sequence
  source 1..783: mol_type = other DNA
atggtggtggagcaccccgagttcctgaaggccggcaaggagcccggcctgcaaatttggcgagttgagaagttcgatttagtccctgtcccaacgaacctttacggtgacttctttacaggggacgcatatgtgatcctgaaaaccgttcagctgagaaatggaaacctgcaatacgacctccactactggcttgggaacgaatgctctcaggatgagagtggagctgccgcgatcttcaccgtccaactggatgattacttaaacggaagggccgtccagcaccgcgaggtgcaaggcttcgaatctgcaacatttctgggatattttaagagtggtttgaagtacaagaaggggggtgtggcctctggattcaagcatgttgtacctaacgaggtggtggtgcagaggctttttcaggtcaaaggacgacgggtagtgagagctactgaagttcccgtcagttgggagagtttcaacaatggagattgctttattcttgacctcggaaacaacattcatcagtggtgtggaagtaattctaatcggtatgaaaggctaaaggcaacccaggtctcaaaggggattcgcgacaatgagcgttcaggcagagcccgcgtacacgtgagtgaagaggggactgagccggaagctatgctccaggtacttggtcccaagccagccctgcctgcaggcacagaagatactgcaaaggaagacgcagcaaataggaaattagcgaagttatataaagtctcaaacggtgctggcactatgtcttag

SEQ ID NO: 189052 - DNA, 2229 bp, synthetic construct
  misc_feature 1..2229: note = Description of Artificial Sequence: Synthetic coding sequence
  source 1..2229: mol_type = other DNA
atggagaagctgttctgctgcttccccaacagcatggtggtggagcatcctgagtttctcaaagccggcaaggagccagggctgcaaatttggcgggtcgagaagttcgacctggtaccagttccaacgaatttatatggcgatttttttacaggtgatgcttatgtgatcctgaagactgtccagctgcgcaatggaaacttgcagtatgacttgcactactggctgggtaacgaatgctcccaggacgagagcggcgctgccgcgatcttcactgttcagcttgatgactacctgaacgggagggcagttcagcaccgggaagtgcaaggtttcgagtccgccacatttctcggctacttcaagtcaggcctgaaatacaaaaaaggaggggtggcaagcggcttcaaacatgtggtccccaatgaagtcgtggtgcagcgtctgttccaggttaaaggtcgccgcgtcgtgagggccacagaggtcccagtttcttgggaatctttcaacaacggggattgttttattctcgatttggggaataacatccaccaatggtgtgggagcaatagcaataggtatgagagactgaaggctactcaggtgtctaaggggattcgcgacaacgagcgaagtgggcgcgcccgcgtccatgtgagcgaagagggaaccgagcccgaagcaatgctccaggtgctgggaccgaagccagcactgcccgctggtaccgaggatacagccaaagaggacgcggctaaccggaaactggccaagctttataaggttagcaatggtgccggcactatgtctgtgtctcttgtggccgatgagaatccttttgcgcagggcgccttaaagtcggaagactgtttcatcctggatcatggaaaggatggtaagatattcgtgtggaaggggaagcaggccaatacagaggagagaaaggccgccctcaaaacagcctccgactttatcactaaaatggactacccgaagcagactcaggtgtctgttctgccagaggggggcgaaacccctttgttcaaacagttttttaagaactggagagatcccgatcaaactgacggcctagggctctcctaccttagttctcacatcgccaacgtcgagcgagtcccgttcgatgcggctacccttcacacgtccacagccatggcggcccagcatggaatggacgacgatggaactgggcagaagcagatctggcgcatcgagggttcaaataaggttccggtggaccccgcaacatatgggcaattctatgggggtgactcatacatcatcctgtacaactacagacacggtggccgtcagggccagatcatatataattggcagggtgcccagagcactcaggacgaggttgctgcgtctgctatcttgacagcccagctggacgaagagctgggcgggacgcctgtgcagtccagggtggtgcaggggaaagaaccagctcatctgatgtctctgttcggcggcaagcccatgattatttacaaaggaggcaccagcagggagggcggacagactgctccagcttcaacgcgattattccaggtccgagcaaactccgcaggcgccacacgagccgttgaggttctcccaaaagcaggagctttaaactctaacgatgcattcgtgctgaagacaccctcagccgcctatctttgggtcgggacaggcgcatcagaagccgagaaaactggggcccaggaactcctcagggtcctcagggcccaacctgtccaagtggccgagggctccgaacccgatgggttctgggaggccctgggaggaaaggctgcctataggacttcaccacggctgaaagacaaaaagatggatgcccatccaccacgactgtttgcttgctcaaacaaaataggcagattcgtgattgaagaagtcccaggcgagttgatgcaagaagatctcgccactgatgatgtgatgctcctggacacttgggatcaggtgttcgtatgggtcggcaaggattcgcaagaggaggaaaagactgaggcgctgacatctgctaagcgctacatcgagactgaccctgcaaatagggatagaaggacgcctataacagtcgtgaaacagggattcgaacctccatcatttgtggggtggtttttgggctgggatgacgactactggtccgttgacccgctggatcgagctatggccgagctggcggcatag

SEQ ID NO: 189053 - DNA, 2196 bp, synthetic construct
  misc_feature 1..2196: note = Description of Artificial Sequence: Synthetic coding sequence
  source 1..2196: mol_type = other DNA
atggtggtggagcaccccgagttcctgaaggccggcaaggagcccgggctgcagatctggcgggttgaaaagttcgatcttgtgcctgtgccaacgaacctttacggtgattttttcactggtgatgcctacgtgatactcaagactgtacagcttagaaacgggaacctgcagtatgatcttcactactggctgggcaacgaatgctcccaggatgaatccggagccgctgctatattcaccgtacagctcgatgattatcttaatggtcgcgccgtccagcaccgcgaggtgcagggattcgaaagcgccactttcttaggttattttaaaagcggactgaagtataagaaaggcggggtcgcttctgggttcaagcatgtcgtccccaacgaagtcgtggtgcagaggttgttccaggtgaaagggagacgagtagtgcgcgccaccgaggtgccagtcagctgggagagttttaataatggtgattgttttattttagatcttggaaacaatattcaccagtggtgcggctccaattcaaaccggtacgagaggctgaaagctacccaggtgtcaaagggcatcagagataacgaaaggtcgggacgagcccgcgttcatgtctcagaagagggtacagagcctgaagcaatgctccaggttttgggccctaagcctgctttaccagcaggaactgaagatactgcaaaggaagacgcggccaaccgtaagctggccaaactgtacaaagtgagtaacggagccgggacaatgtctgtgtccctggttgctgatgaaaacccctttgcccaaggtgccttaaaatccgaggactgttttatcctggaccatggtaaagatggaaaaatcttcgtgtggaaaggcaagcaggccaatactgaggaaaggaaagccgcgctaaagacagcgagtgacttcattacaaagatggattatcccaaacagacacaagtaagcgtcctgccggagggaggtgagacgccacttttcaagcagttctttaaaaattggcgagacccggatcaaacagatggcctgggcttgagctatctgtcttctcatatcgctaacgtggaaagagtgccatttgatgccgctaccctgcacacctctactgcaatggccgcacagcatgggatggacgatgacggcaccggacagaagcagatttggagaattgagggttctaataaggtccctgtggaccctgctacctacggacagttttatggcggcgatagctatataatcctgtacaattacagacatggaggccgccaaggtcaaatcatttataattggcagggcgcccagtcaacacaggatgaagttgcggccagcgccatactaactgcacaactggatgaggagctgggcgggacccccgttcaatcgagagtcgtacagggcaaagagccagctcacttgatgtctctcttcggtggaaagcctatgatcatctataagggggggacttctcgcgagggaggacagacggcaccagcttctacccggctgttccaagtccgtgctaatagcgctggcgcaacgcgtgctgttgaggtgctcccaaaggccggagccttgaatagcaatgacgcatttgtattaaaaactcctagcgcagcgtatctctgggttggtactggcgctagtgaagccgaaaagaccggggctcaggaattattgagggttttgcgggcccaacctgtgcaggtggctgaaggaagcgagcctgacgggttttgggaggctctcggtggcaaggcagcctaccgtacctctccccgccttaaggacaagaaaatggacgcccaccccccaagactgttcgcctgtagcaacaagataggccggttcgtcatcgaagaggtgcccggcgagctcatgcaggaagatctggcgactgatgacgttatgctcttagatacgtgggatcaggtgtttgtctgggtgggcaaagattcacaggaggaagagaagaccgaggctctaactagtgccaaaaggtacattgaaacagacccagcaaacagggatcgaaggaccccaatcacagtggtgaagcagggatttgagcccccctccttcgtgggctggttcctgggttgggacgacgactattggtctgttgatcctttggatcgtgctatggcggagcttgctgcctag

SEQ ID NO: 189054 - DNA, 2118 bp, synthetic construct
  misc_feature 1..2118: note = Description of Artificial Sequence: Synthetic coding sequence
  source 1..2118: mol_type = other DNA
atggtggtggagcaccccgagttcctgaaggccggcaaggagcccgggctacaaatctggcgggtggagaaatttgacttagtgccggtgccaaccaacttgtatggagatttttttaccggggacgcgtacgttatcctgaagactgtgcagttgaggaacggcaacttgcagtatgacctccactattggctaggaaatgagtgttctcaggatgagagcggtgcggctgcaatcttcaccgttcaactagatgattatctcaagtacaagaaaggaggagtagcaagtgggtttaagcatgtggttccaaatgaggttgtggttcagcgcctattccaggtaaaggggcgccgggtagtgcgcgccacagaggtgcctgttagttgggaatctttcaataacggagattgttttatactagatttaggcaacaacattcatcaatggtgcggtagtaacagcaatcgatatgagagactcaaagccactcaggtctcgaaaggcatacgggataacgagagaagtgggcgggctcgtgtgcatgtgagcgaggagggaaccgagcccgaggcgatgctccaggtcctgggcccaaaaccggctcttcctgctggaactgaggacaccgcgaaagaagatgccgcaaatagaaagctcgctaaattgtataaggtgagcaacggggccggcacaatgtctgtgtcacttgtcgctgatgagaatccctttgcacaaggtgcactgaagtccgaagattgcttcattcttgaccatggcaaggacggtaagattttcgtgtggaagggcaaacaggccaatacagaagagaggaaagcggccctcaaaaccgcatccgacttcatcaccaaaatggactacccaaagcaaacgcaagtttccgtcctgcctgaggggggggaaactcctctgttcaaacaattctttaaaaattggcgagatccagaccagactgacggccttggactgagctacctaagttcccacatagccaatgtggagagagtgccttttgacgcagccaccctgcatacaagtaccgcgatggccgcccagcatggcatggacgatgacggtacaggacaaaagcagatatggcgcattgaaggctccaataaggtacctgtcgacccggctacctacggacagttctacggaggcgatagctacatcatactgtataactaccgacacggggggcgacaggggcagattatttacaattggcagggagctcagtctacccaggacgaagtggcagctagcgcaatcctgacagctcaactggacgaggagctaggaggcacacccgtgcagagtagggtcgtccaagggaaggaacccgcccacttgatgagcctgttcgggggtaagcctatgattatctacaaaggtggcacatcaagggagggaggccaaaccgcgcctgcaagcacccgcctgttccaggtgagagctaattctgcaggggccacgagagctgtggaagttttgcccaaagccggggcccttaacagtaacgacgctttcgtgctgaagaccccatccgccgcctatttgtgggtcggaactggggcttcagaagccgaaaagaccggtgctcaggagttgctgagggtcctgcgtgcacagccggtccaggtggcagaggggtccgaacccgatggcttctgggaagccttggggggaaaagcagcttacagaacttcccccagactgaaagataaaaaaatggatgctcatccccccagactcttcgcctgctcaaacaaaatcggtagatttgtgatcgaggaggtgcctggagaactcatgcaagaggaccttgccacggatgacgtaatgctcctggatacctgggaccaggtcttcgtatgggtagggaaagatagccaggaagaagagaagacagaggctttgaccagcgccaaaagatatattgaaaccgaccccgcgaacagagatcgtcgaactccgattaccgtggtgaagcaaggttttgagcccccttcttttgtgggatggtttctgggatgggacgacgattattggtcggtggaccccctggaccgcgccatggccgaactggccgcctag

SEQ ID NO: 189055 - DNA, 2220 bp, synthetic construct
  misc_feature 1..2220: note = Description of Artificial Sequence: Synthetic coding sequence
  source 1..2220: mol_type = other DNA
atgcccctgtgcacccccaacagcatggtggtggagcaccccgagttcctgaaggccggtaaggaacctggtctacagatctggcgtgtggagaagttcgacctcgtgcccgtgcctacaaacctctatggcgatttttttacaggtgatgcgtatgtgatcctgaaaactgtccagttgcgtaatgggaatctgcagtatgatcttcattattggttaggtaacgaatgctcacaggatgaatcaggggccgctgcaattttcactgtgcagttggatgactacctcaacgggcgcgcggtccagcatagggaagttcaggggttcgagtcggcaaccttcctgggatacttcaagtccggattgaagtataagaaaggcggagttgctagcggatttaagcacgtggtgccaaatgaggtggtagtccagaggctgtttcaagtcaagggcaggcgagtggtgagagccactgaagtgcctgtctcttgggagagctttaacaacggggactgtttcatcctcgaccttggcaacaatatacatcagtggtgcggcagtaacagcaacagatacgagaggctcaaggcaacccaggtcagtaaaggaatccgggacaatgaacgaagcgggcgcgcacgcgtacatgtgtcggaagagggcactgagcccgaggcaatgctgcaggtgttgggacccaagcccgccctgcctgccggtaccgaggatactgccaaggaggatgccgctaataggaaactagctaagttgtacaaggtgagcaacggcgccggcacaatgagcgtgagtctggtggctgacgagaatccatttgcccaaggcgccttgaaatccgaggactgctttatcttggaccacggtaaagacggaaaaatttttgtctggaaaggaaaacaagctaataccgaagagcggaaggccgctttaaagacagccagcgactttatcaccaagatggactatcctaagcagacacaggtatctgtcctaccagagggaggagagacacctttatttaagcagttttttaagaactggagagacccggatcagactgatggcttgggcttatcatatctgagctcacacatcgctaacgtggagcgggtacctttcgatgcggcaacactccacacgtccacagccatggccgcacagcacggcatggacgacgatgggaccggtcagaagcagatctggaggattgagggctctaacaaggtgcctgtggaccctgctacctatggccagttttacggaggagactcttacatcatcctctacaattaccgccacggcggccgccagggccagattatctacaattggcagggcgcacagagcacccaggatgaggtagcagcctcagctatccttacagcccagctggacgaggagctgggggggacccctgtgcaatctcgcgttgtgcagggaaaggagccagctcacctgatgtcactgtttgggggaaagcccatgataatctacaaaggtggaacctcgagggaaggtggccaaaccgccccagcgagcacacgcctattccaggtgagggcgaatagcgctggcgctacgagagccgtagaggtgttgccaaaggccggagcccttaatagcaatgatgccttcgtgctcaaaaccccaagcgcagcctatctgtgggtgggaaccggagcctcagaggcggagaaaactggggctcaggagctgctgagggtcctgcgtgcccaaccagtccaggtcgctgagggatccgaaccagacggcttctgggaggccttaggcggaaaggccgcatataggacatcccccaggctgaaggacaaaaaaatggacgctcacccacctagactgttcgcgtgttcgaacaaaatagggcgattcgttatcgaagaggtgccgggcgagctcatgcaggaagatctggccaccgatgatgtgatgctactggatacctgggaccaagttttcgtgtgggttgggaaagatagccaggaggaagagaagaccgaggctctgactagcgcaaagaggtacattgaaaccgaccctgctaaccgggacagaagaacacctattaccgtagttaagcagggctttgagcctccctcattcgtgggctggtttctgggctgggacgatgattattggagtgttgaccctctcgacagagctatggccgagttagcggcttag

SEQ ID NO: 189056 - DNA, 4527 bp, synthetic construct
  misc_feature 1..4527: note = Description of Artificial Sequence: Synthetic coding sequence
  source 1..4527: mol_type = other DNA
atgggccaggagccccggaccctgccccccagccccaactggtactgcgcccggtgctctgacgctgtccctggcgggctctttgggttcgcagctcgaacgtctgtcttccttgtccgcgtgggtccaggagctggcgaatcccctggcaccccaccttttcgcgtaataggggagttggtgggccacactgagcgcgtgtcaggattcactttctctcaccaccccggccagtacaatctttgcgctacttccagtgatgacggcacagtgaagatctgggatgtggagactaaaacagttgtgacggaacacgccctgcaccaacataccattagtaccctgcattggtctccccgagtcaaggatttgatcgtcagcggggacgaaaagggagtcgtgttctgctactggttcaaccggaacgactctcagcatctgttcattgagcctcgtacaattttctgtctgacttgttctcctcaccatgaggatctcgtggctatcgggtacaaagatgggatcgtggtgatcattgacataagcaaaaaaggggaggtgatccaccgtcttcggggacatgatgatgagatccattcgatagcgtggtgtcctctgcctggcgaggactgtctgagcattaaccaggaggagaccagcgaggaggcagaaatcacaaacggcaatgccgtcgctcaagcgcccgtgaccaagggttgctacctcgcgactggcagcaaggatcagaccatccggatatggagttgtagcaggggccgaggcgtgatgattttaaaactacctttcttgaagaggcgaggaggaggaatcgatcccacagtgaaggagcgactttggttaacattacactggccctcaaatcagccaacccagctcgtgtctagctgcttcggcggggaactacttcaatgggacctcacccaatcctggcggcgtaaatatacactgttcagcgcaagtagcgaaggacaaaaccattctcgtatagtgttcaacttgtgtcccctgcaaaccgaggacgacaaacaattactcctgagcacgtctatggatagagatgtcaagtgctgggacatcgcaactctggagtgcagctggacactgccaagcctgggggggtttgcctactctctcgccttcagctcagtcgacattggtagcctggccattggtgtgggggacgggatgatccgtgtctggaacaccttatccatcaagaacaactacgatgtcaagaatttctggcaaggtgtgaagagtaaggtgacagcactgtgctggcaccccacgaaggagggatgcctggctttcggcaccgatgacgggaaggtggggctttacgatacttacagcaacaagccacctcagatttcctctacataccacaagaaaaccgtgtatacactggcttggggccctcccgtccccccgatgtccctcggcggtgaaggcgacagaccttcccttgctctttatagttgtggtggcgaagggattgtgctgcaacacaacccgtggaagctttctggtgaggccttcgacattaacaagctgatacgggacacaaactcaattaagtacaaattgccagtgcacactgagatcagttggaaggctgatggcaaaattatggcgctcggtaatgaggacggctcaatcgagatctttcagattcctaacctcaaactgatatgtacaattcagcaacatcataaattggtgaacacgatctcctggcaccacgaacatggtagtcaacccgagctgtcctacttgatggcaagcggatcgaacaacgccgtgatctacgtacacaaccttaaaaccgtgatcgagtcgtcccccgagtctccagtcactattaccgaaccctaccggactctaagcggacataccgctaaaatcacctcagtggcctggtcaccgcatcacgatggcagactggtgtcagcgtcttatgacgggactgcccaggtatgggacgctttgagagaggagcctttgtgcaacttccgcgggcatagaggcagactcctctgcgtagcgtggtccccattagatcctgactgtatctattccggcgccgacgacttttgtgtgcataaatggcttacatccatgcaggaccattccagacctccacagggcaagaaaagtatcgagctggaaaagaagcgcttgagccagccaaaagccaagcctaagaagaagaagaaaccaaccctccgcacacccgtgaagctcgagagcatcgacggaaatgaggaggagagcatgaaagagaatagcggacctgtcgaaaatggagtgtctgatcaggaaggcgaagaacaggctagagaacccgagcttccatgtgggctcgccccagctgtaagtagggaacctgttatctgtaccccagtctcaagcgggttcgaaaagagtaaggtcactattaataacaaggtaatcctattgaagaaggagcccccgaaagaaaagcctgagactctgattaaaaagagaaaggccaggagtctgcttcccctgagcaccagtctggaccacagaagtaaggaggaactgcatcaagactgcctggtgctggcaactgcgaaacactccagagagcttaacgaggacgtctccgccgatgtggaagaacggttccaccttgggctcttcacagaccgcgctaccctttatagaatgatcgatatcgagggaaagggccacttggaaaatgggcaccctgaactttttcaccagctcatgctttggaagggtgatctcaaaggcgtcctccagaccgcggccgaacgtggcgagctcactgacaacctagtcgctatggcaccagctgctggatatcacgtttggctttgggctgtggaggccttcgccaaacagctatgcttccaggatcagtacgtaaaagcagccagtcacctccttagtattcacaaagtgtatgaggccgttgagctgcttaaaagtaatcatttttaccgggaagctattgctatcgctaaggcccgactccggcctgaagatcccgtgcttaaagatttgtacctgagttggggaacagtgctggaacgcgacggacactatgcagtggcagcgaagtgttacttgggcgccacttgtgcttatgacgcggccaaggtcctggccaagaagggcgacgccgcctcgctgagaacggcagccgaactcgcagccatcgttggcgaagatgaattaagcgcttcgctggcactgagatgtgcccaggagctattacttgccaacaattgggtgggggctcaggaggctctccagctccacgaatctctacaggggcagagactggtcttctgcctgctcgaacttctgagccgtcacttagaagagaagcagctctccgaagggaaaagttcctccagctaccacacatggaacactgggaccgaaggaccctttgtagagagagtcaccgctgtgtggaagtccatcttctcactcgacaccccagaacagtatcaagaagccttccagaagctgcagaacataaagtacccttcagccacgaataacaccccagccaaacagctactgttgcacatttgccacgatctgacgctcgccgtcctcagtcagcagatggcttcgtgggatgaggccgtacaggcattgttacgcgccgtagtcagatcatacgactcaggtagcttcaccattatgcaggaagtctactcagcattcctcccagatggttgcgatcatttgcgcgacaagctgggtgatcaccagtcccccgctacacccgcatttaagagtcttgaagcattttttctgtatggccgcctgtatgaattctggtggagtttgagccgcccttgcccaaacagctcagtttgggtgcgcgctggacataggacactgagtgttgagccatcacagcagcttgacaccgcctccacagaggagacagatccagagacctcgcagccagaaccgaatcgacctagcgaactggatctccggctgacagaggagggggagaggatgctctctacctttaaggaactgttcagcgaaaaacacgcatccctccaaaactcccagcggacagtcgctgaagtccaagaaacattagctgaaatgatccgccagcaccagaaaagtcagctgtgtaagtctacagccaacggccctgacaagaacgagcccgaggtggaagcagagcagcccctgtgttcatcacaatcccagtgtaaggaagaaaaaaacgaacctctctcactgccggaactgaccaagaggttaacagaggctaatcagagaatggcaaagttcccagaaagtataaaagcatggccatttccagatgttcttgagtgctgcctggtactgctactgattcgatcccactttcctgggtgtcttgcgcaagaaatgcagcagcaagcgcaggaactcttgcagaaatatggtaataccaaaacctacaggcgacattgtcagactttttgcatgtag

SEQ ID NO: 189057 - DNA, 396 bp, synthetic construct
  misc_feature 1..396: note = Description of Artificial Sequence: Synthetic coding sequence
  source 1..396: mol_type = other DNA
atgcagacccccgtgaacatccccgtgcccgtgctgcggctgcccagggggccggatggattctcccgcggtttcgcacccgatgggagacgcgcaccgttgcgccctgaggttcctgagatccaggagtgcccaatcgcacaggaaagcctggaatcccaggaacagcgggccagagcggctcttagggaaagatatcttcggtccctactggccatggtggggcatcaagtgtcttttacgctgcacgagggggtccgcgtggcagcccattttggtgctaccgacttagatgtagcaaatttttacgtgtcacaattgcaaacccccatcggcgtacaagccgaggccctgcttagatgttcagatataattagttacacatttaagccatag

SEQ ID NO: 189058 - DNA, 396 bp, synthetic construct
  misc_feature 1..396: note = Description of Artificial Sequence: Synthetic coding sequence
  source 1..396: mol_type = other DNA
atgcagacccccgtgaacatccccgtgcccgtgctgcggctgcccagaggccccgacggtttttctcgcgggtttgctcctgacggccgaagagctcccctgcgacccgaagtgccggagatccaggagtgtcccatagcacaggaatcccttgagagccaggagcaacgtgctcgggccgccctgcgggagaggtatctgaggagtctgctcgcaatggtaggccaccaagtctcttttactttgcatgaaggagtcagggttgctgcccatttcggcgcgaccgacctggatgtagcgaacttctatgtatcccaattgcagacaccgatcggcgtccaagccgaagccctccttcgctgctccgacataatctcctatacattcaagccatag

SEQ ID NO: 189059 - DNA, 2913 bp, synthetic construct
  misc_feature 1..2913: note = Description of Artificial Sequence: Synthetic coding sequence
  source 1..2913: mol_type = other DNA
atggacgccgccgagcccggcctgccccccggccccgagggccggaaaaggtattcagatatttttaggtctcttgacaacctggaaatttcattgggcaatgtcacactcgaaatgctggcgggcgatcctctcttatcagaagatccagaacccgacaagactcctacagccactgtgaccaatgaagcgtcttgctggtcaggccccagccctgaggggcccgtccctctcactggagaagagctcgatctgagactcatccggaccaaaggtggcgtcgacgctgctttggagtacgcaaagacctggtctcggtatgcaaaagagctcctagcttggacagagaagcgggcctcctacgagctggagttcgcaaaatcaaccatgaaaattgctgaagccgggaaggtgtccatccagcaacaatctcacatgccgctgcagtacatatatacattgttcctggaacacgatctctctctgggaaccctggccatggaaacagtggctcaacagaaacgagactactaccaacctctggccgctaaacgcaccgagatcgaaaagtggagaaaggagtttaaggagcagtggatgaaggaacaaaaaaggatgaatgaggctgtgcaggctctgagaagggctcagcttcagtacgtgcagcggtctgaggacctgagagccaggtcgcagggaagccctgaagattccgcccctcaggctagcccgggccctagcaaacagcaggaaaggcggcggcgctcaagagaagaggcccaggccaaagctcaggaggctgaagcactgtaccaagcctgcgtgagggaagctaacgcccgacaacaggacctcgagatagcaaagcagcgaattgtatctcacgtgcggaagctggtgtttcaaggtgatgaggtgttgagacgcgtcacactgtctttgttcggcctcaggggcgcccaagccgagcggggccccagagccttcgccgcattagcggaatgttgtgccccatttgaaccaggtcagagataccaagagtttgtccgggcccttcggcccgaggccccacccccacccccaccagcttttagtttccaggaatttctgccatcacttaattcgtcccctctggacattagaaaaaagctgtcaggcccacttccgcccaggctcgatgaaaatagcgcggagcccgggccttgggaggatcccggcactggctggcgttggcagggcacgcccggccctactcccggatccgatgtggattctgttggcggcggtagtgaaagccgatccctggattcccccacttcatcaccgggagctgggactcgacaattggttaaagcctcttctactggaacagaatcgtcagatgactttgaggagagagatcccgacctaggtgacgggctcgaaaatggccttggcagtccgttcgggaaatggacactctccagcgcggcgcaaacacaccagctaagacgtttgaggggccctgccaagtgtcgagagtgtgaggcattcatggtctccgggaccgaatgcgaagaatgttttctgacctgccacaagcgctgtctggagaccctcctaatcctgtgtggacaccgcaggctgccagccagaacaccactgtttggagtggattttctgcagctcccccgcgatttcccggaggaggtacctttcgtcgtgacaaaatgcaccgctgaaatcgaacaccgcgcattagacgtgcagggtatctaccgggttagcgggagtcgcgtgagagtcgaacgattgtgtcaagctttcgagaatggccgcgcgctggtcgaactctccgggaactccccccacgacgtgagttcagtcctgaagcggttcctgcaggaactcaccgagccagtcattcccttccatttatacgacgcttttatttcactagctaaaaccctgcacgctgacccaggagacgacccaggaactccatccccctccccagaggttattcgctccttaaaaaccctgcttgttcagctgcctgacagcaactataacacccttagacacctcgtggctcatctctttagggtggccgcgcggttcatggagaacaaaatgtctgctaacaaccttgggatcgtcttcggaccgactctgctgcggccacccgacggtcctagagcagccagcgccattcccgtgacttgtttgcttgatagcgggcatcaggcacagctggttgagtttctcattgttcactatgagcaaatcttcggcatggatgagctgccccaggccaccgaacctcctccgcaagactccagccctgccccgggcccccttaccaccagttctcagcctcccccgcctcacctcgatcccgattcacagccacctgtgctggcttctgatcctggacccgacccccagcaccactcgaccctggaacagcaccctacagcaacacctaccgagattccaaccccacagagtgaccagcgggaggacgtggccgaagacactaaagatggcgggggcgaagtctcatcccagggtccggaggatagtctgctgggtacccaaagccgaggccacttttcccgccagcccgtgaaatatccgaggggcggagtcaggccggtgactcaccagctgtcttcactcgctctggtggcctccaagctatgcgaagagacccccatcacgtccgtcccgagaggatctctgagaggtcgtggaccatcacccgcggcggcatcacctgaaggcagtcctttgaggcgaacaccactacccaagcacttcgagatcacccaagaaactgccaggctgctgagtaagcttgattccgaggcggtaccacgtgctacctgttgtccggacgtccagccagaagaggcggaggaccacttgtag

SEQ ID NO: 189060 - DNA, 2826 bp, synthetic construct
  misc_feature 1..2826: note = Description of Artificial Sequence: Synthetic coding sequence
  source 1..2826: mol_type = other DNA
atggacgccgccgagcccggcctgccccccggccccgagggccggaaaaggtactcagacatattcaggagccttgacaatctcgaaatttccctgggaaacgtcacgttggagatgttggccggcgatccattactaagcgaagaccccgaaccggacaagacccccacggctacagttactaatgaggcatcttgttggtccggcccaagtccagaaggccccgttcctctcaccggcgaggaattggacctcaggctgatcaggactaagggaggagtcgacgctgcattggagtatgctaagacttggtctcgatacgcaaaggaattgttggcgtggactgaaaagcgggcaagctacgaactcgaattcgccaagagtaccatgaagatcgccgaggccgggaaggtctccattcagcagcagtcccatatgccacttcagtacatttacactctgtttctggagcatgatctgagtctagggactctggccatggagacagtcgcacaacagaagagagattactaccaacctttggccgcaaagcgcaccgaaattgagaagtggaggaaggaatttaaggagcagtggatgaaagaacaaaaacgtatgaacgaggcagtgcaggctttgaggcgagcccagctgcagtacgtgcagcggagtgaagaccttagggccagatcccaaggtagccccgaagattctgcacctcaggcatctcctggaccctccaaacagcaggaacgcagacggcgctctagagaggaggcgcaggctaaggctcaggaagccgaggccctctaccaggcctgcgtccgggaagccaatgcgaggcaacaggatctggagatagccaagcagaggattgtatcccacgttaggaagctggtgttccagggcgacgaggtgttgcgacgggtgacattgtccttgttcggactgcggggcgcccaggcagaacggggtccccgtgccttcgccgcactggccgagtgttgcgctcctttcgaaccaggtcagcgttaccaggaatttgtgagagccctcaggcctgaggctcctccacctccaccaccagctttttcgtttcaagagtttctgccctctctcaactcgtctccacttgatattagaaagaagttatccggaccactgccacctcgacttgacgaaaactccgcagaacccggtccctgggaagatcctggtaccggctggcggtggcagggtcccaccccaggcagtgacgtggattcagtaggtggaggatccgagtcccggagcctggattcaccaacctcaagtcccgacctgggagacggtctcgaaaatgggctgggctcaccgttcggcaagtggacactctcatctgcagcccaaacccatcagctgagaagactgcgaggtcccgctaagtgtcgcgagtgcgaggctttcatggtgtcagggacagaatgcgaggaatgcttcctcacctgccacaaaagatgcttagagaccctgctcattctgtgcggacacagaagactgcccgcccgtacgccacttttcggagtcgactttctgcagctgccaagagatttcccagaggaggtgcccttcgtggtgaccaagtgcacagcggagattgaacacagagccctcgacgtgcaggggatctacagagtgtccgggtctagagtaagagtcgaacggctgtgccaagcctttgaaaatgggcgggccttggtggaattgagcgggaactcaccccatgacgtgtcaagcgttcttaagcgctttttacaagagttgacagagcctgtgatcccattccacctgtacgacgcgttcatcagtctcgccaaaacattacacgcggaccccggcgacgacccgggaacgcctagtccctcgccggaggtcattagatctcttaagactctactcgtacaattgcccgatagtaattataacacactccgccacctggttgcacaccttttcagagtagctgcccgtttcatggaaaataagatgtctgccaataatctcggtattgtgttcgggcctactctgctgcgccctcctgacggaccccgagcggctagcgccatacctgtgacttgccttctcgactctgggcaccaggcccagttagtggagtttctgatcgtgcactatgagcagattttcgggatggacgagcttccacaagctacagaacccccgccacaggactccagtcccgctccaggaccactgaccaccagtagccagcctcctcctccacacctcgatcctgactctcagccacctgtcttagctagcgaccctggaccagacccacagcatcattccactctggagcagcatcccaccgctacccccaccgaaataccaaccccccaatccgatcagcgggaggacgtggctgaagatacaaaagatggcggaggcgaggtgtcctcccagggtccagaggactcactcttgggaacacagagcagaggacacttctcaagacagcctgtgaagtacccgcggggcggagtccggccggtgacacatcagctttcatcgctcgctctggtagcctctaagctctgcgaggagactcccattacgtctgtgccaagagggtcgctccgtggacgcggcccgagccctgctgcggctagtcccgagggctccccactcagacggacacccctccccaaacactttgaaatcacccaggaaacagcgcgtcttctgagcaaacttgactctgaggcggtgcctcgagcgacttgttgtcccgacgttcagcctgaagaggcggaggaccacctgtag

SEQ ID NO: 189061 - DNA, 1005 bp, synthetic construct
  misc_feature 1..1005: note = Description of Artificial Sequence: Synthetic coding sequence
  source 1..1005: mol_type = other DNA
atgaacaccatcctgccctgccaggaccagtacttcgtgggcggccagagctacaactgcccctattcgactactaccagtgagtcctccgtggacgtgtctactgaaacatgggtgagcttctgggctgctgggctgctcgacaatcgagaactgcagcaggcccctcaggcgcaagagtccttctccgatagcaacttcccccttccggacttgtgtagctgggaggaggcacagctgtcatcgcagctgtaccggaacaaacagctacaggacaccttagtacagaaggaagaggagctagctcgtttgcacgaagagaataatcaccttagacagtacctcaactccgctctcgtcaagtgccttgaagagaaggccaagaaactccttagtagcgatgaattctctaaggcatatggtaaatttagaaaaggtaagcggaagtccaaagagcagagatatagtcccgcagagattccgcaccccaaaaatgcaaaaaggaatctgagcagcgagtttgccaactgtgaggagcaggccggtcccccagtggatccttgggtcttacagaccctcggcctgaaagatctagacacaatagacgacacatcttccgctaattactccgcactggctagccacccaagacgcgtggcatcaacctttagccagtttcctgatgacgccgtggactacaagaacatcccccgggaagatatgccgattgattataggggggaccgcacgacacctcttcatagtactgccactcacggggaggattttcacatcttaagtcagctaagcaatccccctgttggactcaaaaccttgccctattatacagctcacgtctccccaaacaagaccgagatggccttcagtacctccctgtccccccactgtaatgtcaagacccatagcttccaccaggggcaggcgtttgtcaggagggacgaggaagggggatggaagtttacctgggtaccaaagcagagctag

SEQ ID NO: 189062 - DNA, 2727 bp, synthetic construct
  misc_feature 1..2727: note = Description of Artificial Sequence: Synthetic coding sequence
  source 1..2727: mol_type = other DNA
atgggcgtgaacgacctgtggcagatcctggagcccgtgaagcagcacattccgctgcgtaatcttgggggcaaaaccatagccgtggatctctcgctctgggtctgcgaagcccagaccgtgaagaaaatgatgggttccgtgatgaagccgcaccttagaaatctgttcttcagaatcagttacttaacacaaatggatgtgaagttagtcttcgtgatggaaggagagccacctaaattgaaggccgatgtcatctcaaaaaggaaccagtcccgatacggatccagtggtaaatcttggtctcaaaaaacaggccgctctcactttaaatccgttctccgtgagtgtctccacatgcttgagtgcctgggtattccctgggtccaagcggccggagaggcagaagctatgtgcgcttacctgaatgcaggagggcacgtggatggctgccttaccaacgacggagatacattcctctatggcgcccagaccgtgtacaggaactttacaatgaatacgaaggatccccacgttgactgctatactatgtcctcgattaagtccaaacttggtttggacagggatgctctcgttgggctagccattctcctggggtgcgattacttgcctaagggggtgcctggggtgggcaaggaacaggcacttaaactgatccagatcctcaagggacagtctctgctgcagcggtttaaccgctggaacgagactagctgtaactcgtcaccacaattattagtgacaaagaaactcgcacattgcagcgtgtgctcccaccctggatcccccaaagaccacgagaggaacggatgccgcctctgtaagtccgataagtattgcgaacctcacgattacgaatactgttgcccctgcgagtggcatcggaccgagcatgatagacagttatctgaggtggagaacaacatcaagaagaaggcttgctgttgtgagggcttcccgttccatgaggtcattcaggagtttctcctgaataaagacaagttggttaaggtgattcgctaccagcggccagacctcctattattccagcggttcaccttagaaaaaatggagtggcctaaccattatgcgtgtgagaagctgctggttctgctgactcactacgacatgattgaaaggaagctgggatctcgaaattctaaccagctgcagccaattaggatcgtcaaaacacgcattcggaacggagtccattgtttcgagattgaatgggaaaagcctgaacattacgccatggaggacaagcagcacggtgaattcgccctgctgaccattgaggaagagtccctgtttgaagccgcttatcctgaaattgtcgcggtataccagaaacagaaacttgagataaagggaaagaaacagaagagaattaaacctaaggaaaacaacctccccgaaccagacgaagtcatgtcttttcagagtcatatgacgctcaagccaacatgcgaaatcttccacaaacagaacagcaagcttaattctggcatctctcccgacccaactctgcctcaggagtccatatcggcctctctgaattccctcctgttgcccaagaacacgccctgtctgaacgcacaggaacaattcatgtcatcactgcgcccgcttgcaatacaacagatcaaggccgtgtcaaagtccctgataagcgagagctctcagcctaacacgtcaagtcacaatatctcagtcatcgccgacttgcacctgtcgactatcgactgggaggggaccagcttctcaaacagtcccgccatccagaggaatacgttctctcatgatttgaagagcgaggtagaatccgaattaagcgctatcccggatggatttgaaaacatccccgagcagttatcctgcgagtccgaacggtacaccgccaatatcaaaaaggtgctggacgaagacagcgatggtatctcccccgaggagcacctgttgtccggcatcacagacctatgtctccaggacctgcccttgaaggaaagaatcttcaccaagctgtcttacccccaagataacctgcaacctgatgtaaatctgaagactctgagcatcttgtcagtcaaggaatcctgcattgccaacagcggttcggattgtaccagtcatctttcaaaagatctgcctggaatcccgcttcagaatgaatcacgcgattctaaaatcctaaagggcgaccaactccttcaggaagattataaagtgaacactagcgttccctactcggtgagtaacacagtggtgaagacatgtaacgttcggccacctaatacagcgcttgaccactctagaaaggtggatatgcaaacaacccggaagatcctaatgaaaaagtccgtgtgcctggatagacatagtagcgatgagcagtccgcgccagtgttcggcaaagcaaagtatacaacccagcgtatgaagcactcatcacagaagcacaactccagccacttcaaggagagcggccacaataagctgtcttcgcctaagatacacatcaaggaaactgagcagtgcgtgcggagctacgagacagctgaaaatgaggagagttgtttccctgacagtactaagagcagcctgtccagtttgcagtgtcacaagaaggagaacaactccggaacatgtttggacagcccactgcccttgaggcagcgcctcaagctgaggtttcagagcacctag

SEQ ID NO: 189063 - DNA, 2727 bp, synthetic construct
  misc_feature 1..2727: note = Description of Artificial Sequence: Synthetic coding sequence
  source 1..2727: mol_type = other DNA
atgggcgtgaacgacctgtggcagatcctggagcccgtgaagcagcatatcccactgcggaatctcggtggaaagacgatcgcagtcgatctctctctgtgggtgtgcgaagcgcaaacagtaaaaaaaatgatgggatcagtcatgaagcctcaccttcgaaacctgttttttaggatttcatacctgacccaaatggacgtcaagctggtcttcgtaatggaaggggagccgccaaagctcaaagcagatgttattagcaagcgcaaccagtccagatacggcagcagtggaaagtcctggagtcagaaaactggcagatcgcactttaaatccgtgctaagggaatgtctccatatgttagaatgcctggggatcccgtgggtgcaagcggctggcgaagccgaggccatgtgtgcttacctgaacgcaggtggacacgtcgatgggtgccttacaaatgatggcgacacctttctctacggtgcccagaccgtttaccgcaatttcaccatgaacaccaaagacccacatgtggattgctacaccatgtcttccatcaagtctaagttgggtctcgatagagatgctctggtgggactggccattttgttggggtgtgactatctccccaaaggcgtgccaggcgtaggaaaagagcaggctctgaagttaattcagatattaaaggggcaatccttgctccagaggttcaacaggtggaacgaaacatcatgcaacagctcaccccaactactcgtgaccaaaaagttggctcactgtagcgtctgtagtcatccaggcagcccaaaagaccacgaacggaacggatgtcgtctgtgcaagagtgacaaatactgcgagccccacgattacgagtattgttgcccatgtgagtggcacaggaccgaacatgacagacaactgagcgaggtggagaacaacatcaagaaaaaggcgtgctgttgcgagggcttccccttccatgaggttatacaggagtttctgctcaataaggataaactagtcaaagtgatcagataccagagacccgacttgctgctgttccagcgtttcacattggaaaaaatggagtggccgaaccactacgcctgcgagaagctccttgtgcttctgacacactatgatatgattgagaggaagctgggatcaaggaattctaatcagctacagccaatccgcatcgtgaagacgagaatccgtaatggtgtgcactgcttcgaaatcgaatgggagaagcccgagcattatgcaatggaggacaagcaacacggggagttcgcactgctgactatagaagaagagtctctgttcgaagccgcctatcctgaaatcgtcgccgtgtaccagaagcagaagcttgagatcaaaggtaaaaaacagaaacgtatcaagcccaaagagaataacttacctgagccggacgaggtcatgtcctttcagtcccacatgaccctcaaacctacctgtgagattttccacaaacagaacagcaagctgaattccggaatcagtccagatccaaccctccctcaggaatccatctctgcttccctcaatagcctattactcccaaaaaatactccctgtttgaatgcccaggagcagtttatgtcctcccttaggcccctggccatccagcagatcaaggccgttagcaagagtcttatcagtgagagctctcagcctaatacaagctcccacaatatcagtgtaatcgccgacctgcatctctctacaatagactgggagggcacgagcttctctaactcgccagctattcagaggaataccttttcacatgatctgaaaagtgaggtggagagcgaactgtcagcaatcccagacggcttcgagaatatcccagagcaacttagctgcgagtcggaacgatacacagctaacatcaaaaaggtcctcgatgaggattcagatggaatcagtccggaggaacatctgctgagcggtattaccgatttgtgcctacaagacctccctttgaaagagagaatctttactaaattatcataccctcaggacaatctccaaccagacgtgaatctcaagacattgtcaatcctctccgtcaaggagtcttgcatcgctaattccggtagcgattgtacttcacacctctccaaagacctgcccgggatcccgcttcaaaatgaaagtcgtgatagcaaaatcctaaagggcgatcagttgttacaggaagattacaaggtcaatacttcggtgccatacagcgtttctaatactgtggtcaaaacttgcaacgttcgccctcccaacactgcgcttgaccattcacgcaaagtagacatgcagaccacccgcaagattctgatgaagaaatccgtgtgcctggaccgccactcttctgacgagcaaagcgcccctgtctttgggaaggctaaatacacaacccagcgaatgaagcatagtagtcagaaacacaactcttcacactttaaggaatcgggtcacaataagttgtcatccccaaaaatccatatcaaagagacagagcaatgtgtgcgatcatacgagactgcggagaatgaggagagctgcttcccagattcaaccaagtccagcctgtcgtctcttcaatgtcacaaaaaagaaaataacagtgggacatgtctggactccccccttccgctccggcagcggctgaagctgcggttccagagcacttag

SEQ ID NO: 189064 - DNA, 381 bp, synthetic construct
  misc_feature 1..381: note = Description of Artificial Sequence: Synthetic coding sequence
  source 1..381: mol_type = other DNA
atgggcgtgaacgacctgtggcagatcctggagcccgtgaagcagcacattcctcttcgcaatctggggggcaagactatcgccgtggatctctcactgtgggtctgtgaggcccaaaccgtgaagaagatgatgggcagcgttatgaagccccatctgagaaacttattttttcgcattagctatctaacccaaatggatgtgaaactggtattcgttatggaaggagagccaccaaaacttaaagccgatgtgatcagcaaacgaaatcagagtcgctacgggagctctggaaagtcatggtcccagaaaaccggccggtcccatttcaagtcagtcttgagggagtgcttgcacatgctcgagtgcctcggcatctag

SEQ ID NO: 189065 - DNA, 282 bp, synthetic construct
  misc_feature 1..282: note = Description of Artificial Sequence: Synthetic coding sequence
  source 1..282: mol_type = other DNA
atgggcgtgaacgacctgtggcagatcctggagcccgtgaagcagcacatccctctccggaacctcggcggaaagaccatcgccgttgatctcagtctctgggtctgcgaggcccaaacggtgaagaagatgatgggctccgttatgaagccccacttgcggaatctcttctttagaattagttacttgactcaaatggacgtcaaactggtgtttgttatggaaggggagcctcctaagctgaaagctgacgtgatttctaagcggaatcagtcaaggtag

SEQ ID NO: 189066 - DNA, 1431 bp, synthetic construct
  misc_feature 1..1431: note = Description of Artificial Sequence: Synthetic coding sequence
  source 1..1431: mol_type = other DNA
atggagtggcccaaccactacgcctgcgagaagctgctggtgctgctgacccattatgacatgatcgagcggaagttggggtcccgaaactctaaccagttacagcccattcgcatcgtcaagacacgaattcgaaatggggtccactgcttcgagattgaatgggagaaacccgagcactatgctatggaggataagcagcacggcgaatttgccttgctgacaatagaggaggagtccctgttcgaggctgcctatcccgagattgtggctgtttaccagaagcagaagttggagataaaggggaaaaagcagaagaggattaagcccaaagaaaacaaccttccagagcccgatgaggtgatgtcctttcagtctcacatgacactcaaaccaacctgcgagatctttcacaagcagaattctaaattgaactcaggtatttcacccgacccgacacttccccaggaatcaattagcgcaagtctcaattctttgcttcttcctaaaaataccccttgtctgaatgcgcaggagcagttcatgtcttcccttcggcctcttgcgattcagcagatcaaagccgtctcgaaatctctgatcagcgaatctagtcagcctaatacttcttcccataatatatctgttatcgctgatctgcatctcagcacaattgactgggaaggcacctctttctctaatagcccagcaatccagcggaacaccttcagccatgatctcaagtccgaggtcgaatctgagttatcagccattcccgatggtttcgagaatattccagagcaactgtcctgtgagtccgagagatacacagctaatattaagaaggtgctggatgaggactccgacggtatctcacctgaggagcacctgctctctgggatcacagatttgtgcctgcaggacctgcctctgaaagagcgaatctttacaaaactgagctatccacaagacaatttacaacctgacgttaatctgaagacactgagtatcctttctgtgaaagaatcatgcatcgcgaacagcggaagcgattgcacttcacacctctcaaaagacctgcctggcatcccactgcagaacgagtccagagatagtaagattctcaaaggtgaccagcttctgcaagaagattataaagtgaataccagcgtgccgtactccgtgagtaacactgtcgtgaaaacatgcaatgtgcgcccacccaataccgccctcgaccatagccggaaggtcgacatgcagaccactagaaagattctcatgaagaagtccgtgtgtctggaccggcattcatccgatgaacagagcgctcccgtgtttggtaaagcaaagtatacaactcagcgtatgaaacactcttcacaaaagcataattcatctcattttaaggagtcggggcacaacgaatag

SEQ ID NO: 189067 - DNA, 1437 bp, synthetic construct
  misc_feature 1..1437: note = Description of Artificial Sequence: Synthetic coding sequence
  source 1..1437: mol_type = other DNA
atggcctgcctgaaccccgtgcccaagctgtaccggagcgtgatcgaagacgtaatcgagggagtcagaaatctgtttgcagaggaggggatcgaagagcaggtgctgaaagatctgaagcagctctgggagactaaggtactccagagtaaagccacagaggacttcttccggaactcaatccagagtcctctctttacgctacaactcccacactcccttcaccaaacactgcagagttccaccgctagtctggtgattcccgcaggtcggaccctgccaagttttacaaccgcagagctgggaacctccaattcttctgccaatttcacctttcccgggtatcccatccatgtgcctgccggggtaactctgcagaccgtgtctggccacctgtacaaggtaaatgtgccgattatggtgactgagacatccggtcgagcaggcatcttgcaacatccaattcagcaggtctttcagcaactggggcagccttcggtgattcaaactagcgtgcctcagctgaatccctggtctttgcaagcaactacggagaaaagccagaggatcgaaacggtacttcagcagcccgccatcctgccctcaggcccagtggatcgtaaacatttagagaacgccacttcagacatacttgtgtcacccggcaacgaacataaaattgtcccagaggctctgttatgccatcaggaatcatcacactacatctcattgcccggggtcgtgttcagtcctcaggtctctcagactaactccaatgtggagtccgtgctctcagggagcgcctctatggcccagaatttgcatgatgagtcactgtccacttcccctcacggcgctctgcatcagcatgtcacggatattcaattacacattctaaagaacaggatgtacggatgcgatagcgtaaagcagcccaggaatatcgaggaaccatcgaatattcccgtgagtgagaaagattctaacagccaggtagacttgagcatccgtgtcaccgacgacgatatcggcgagattatacaagtggacggctctggcgacacgtcctctaatgaggaaatcggcagcactagggacgcggacgaaaacgagtttctcgggaacatcgatggaggagacctcaaagtgcctgaggaagaagctgacagtatttccaacgaagatagcgctactaactccagcgataatgaggacccacaagtaaacatcgtggaagaagacccgcttaatagtggggacgatgtttccgagcaggatgtgcccgacttatttgacactgacaatgtgatcgtatgccagtatgacaagatacacagatcaaagaacaaatggaaattttacttaaaagatggggtgatgtgttttggcggccgggactacgtctttgctaaggccatcggggatgcagagtggtag

SEQ ID NO: 189068 - DNA, 1335 bp, synthetic construct
  misc_feature 1..1335: note = Description of Artificial Sequence: Synthetic coding sequence
  source 1..1335: mol_type = other DNA
atggcctgcctgaaccccgtgctgtgggagaccaaggtgctgcagtctaaagcgacagaggacttcttcagaaattcaatccaatctcccctgtttaccctgcagctgcctcattcactccaccagaccctgcagtcttctactgcgagtcttgttatccccgctggccgaactctgccgtcatttactacggcagagctgggtacgagtaattcttccgccaactttacgttcccagggtacccaatccacgtccccgccggggtgacacttcagacagtgagtggacacctttacaaggtgaatgtgcctattatggtcaccgaaaccagtgggagggccggaatacttcagcaccccatccagcaggtcttccagcaactcggacagccttcagttattcaaacctcagtgccccagctcaatccgtggagtctccaggcgaccaccgaaaagtctcagagaatcgaaacagtgctgcagcagccagcaatactacccagcgggccagttgaccgaaagcatctcgaaaacgctacctctgatatcttggtctcacctgggaatgaacacaaaattgtgcctgaagccctgctgtgccatcaggagtccagtcattatatctcgctacctggcgtggtgtttagcccacaggtctcgcagaccaacagtaatgttgagtcagttctgtccggctcagcctcaatggcgcagaacctccacgacgagtccctgagcacttcaccccacggagccttacaccagcatgtcaccgacatccaactccatatactgaaaaaccgtatgtacggctgtgactccgtcaaacagcctcggaatatcgaggaaccttccaacattcccgttagcgagaaagactcaaattcccaagtagatcttagtattagagtaacagacgacgatataggggagattattcaggtagacggaagcggcgacacttcctcaaatgaggagatcggtagcacccgggacgctgacgagaatgaatttttgggcaatatcgacggaggcgatctgaaggtgccagaagaagaggctgattctatctctaatgaggatagtgcgaccaatagttccgacaatgaggatccccaggttaatatcgtggaggaggaccccctcaattcaggggatgatgtgtcagagcaggacgttcccgatttgttcgataccgacaacgttattgtctgtcaatatgacaaaatccatcgatcaaaaaataaatggaaattttacctgaaggacggcgtcatgtgttttggcggaagggattatgttttcgcaaaagccattggagacgcggaatggtag

SEQ ID NO: 189069 - DNA, 951 bp, synthetic construct
  misc_feature 1..951: note = Description of Artificial Sequence: Synthetic coding sequence
  source 1..951: mol_type = other DNA
atggccagcaccagccggctggacgccctgccccgggtgacctgccctaatcaccctgatgccatcctggtggaagattacagggctggcgacatgatctgtcctgaatgtggcctcgttgtgggtgatcgggtgatcgatgtgggctccgagtggcgaactttttctaacgataaggccaccaaggacccttccagagtgggcgacagccagaatcccctcctttccgatggcgacttgtcaaccatgatcgggaaggggaccggtgctgctagtttcgacgagtttgggaacagcaagtatcagaaccgccgaactatgagcagctctgatcgcgccatgatgaacgccttcaaagaaatcaccactatggctgacagaatcaaccttccacgcaacattgtcgaccgcacaaacaacctattcaagcaggtgtatgaacagaagtctctgaaaggtcgcgccaatgacgcaatcgcctccgcctgcttgtatatagcatgccgacaggaaggggttccccgcacctttaaagaaatttgcgcagtgtccagaatctccaaaaaggaaatcggccgatgtttcaagttgatcctgaaagctctggagacctccgtggacctcataaccactggcgacttcatgtcacgcttttgctccaacctctgcctcccaaagcaagttcaaatggccgctacccacattgcccggaaagccgtcgaactggatcttgtgccaggacgcagtcctatcagcgttgccgcggctgccatctacatggcttcccaggcctccgccgaaaaacgaactcagaaagaaatcggcgatatagcaggagtggccgacgttactattcggcagtcctaccgtttgatttacccacgggcacccgatttatttcccacagattttaagttcgatactcccgtggacaagctgccccaactgtag

SEQ ID NO: 189070 - DNA, 696 bp, synthetic construct
  misc_feature 1..696: note = Description of Artificial Sequence: Synthetic coding sequence
  source 1..696: mol_type = other DNA
atggccagcaccagccggctggacgccctgccccgggtgacctgcccgaaccaccctgacgccatcctcgtcgaggattatagagccggcgacatgatttgcccagagtgtgacagagttattgacgttggaagcgagtggaggaccttttccaacgacaaagcaactaaagatccaagtcgggtaggggatagtcagaacccccttctctcagacggggacctaagtacaatgattgggaaaggcaccggcgctgcttcttttgacgaatttggaaactcaaaatatcagaacagaagaaccatgtcttccagtgacagggcaatgatgaacgcatttaaagaaatcacaacaatggcagaccgtataaatttgccacggaacattgtggaccgaaccaacaatctgttcaaacaggtgtacgagcaaaaaagtctgaaagggagagcaaacgacgccattgcaagtgcatgtctgtacatcgcatgcagacaggagggcgtacctagaacatttaaggaaatatgcgcagtgagccgcatctctaagaaggagattgggagatgcttcaaactaattctcaaggctctcgaaacctccgtcgacctgatcactacgggcgacttcatgagcagattttgtagcaatctgtgtcttcctaagcaggtgcagatggccgcaacccacatcgcctag

SEQ ID NO: 189071 - DNA, 675 bp, synthetic construct
  misc_feature 1..675: note = Description of Artificial Sequence: Synthetic coding sequence
  source 1..675: mol_type = other DNA
gccagcaccagccggctggacgccctgccccgggtgacctgccccaaccatccggatgcaattttagtggaagattatcgtgccggggacatgatctgccccgagtgcgggctcgtggtcggggatcgggtgatcgatgtgggctctgaatggagaactttctcaaacgacaaggcgacgaaggacccctcacgtgtgggcgattcccaaaatcctttgctaagcgacggggacctatccaccatgatcggaaagggtaccggcgctgcttcctttgatgagtttgggaattcaaagtaccagaaccgaaggacaatgagttcgtcagatagggctatgatgaatgccttcaaggagataaccaccatggccgatcgcatcaatctgcccaggaatatcgtcgaccgaacaaacaatttatttaaacaggtttatgagcagaaatccttaaagggtagggctaacgacgccatcgcctcggcctgcctttatattgcttgcaggcaagaaggagtaccacgtacattcaaggaaatatgtgccgtctctcgcattagtaagaaggagattggtcggtgctttaagctgatccttaaggcattggagacatcagtggacctgattacgaccggggacttcatgtcaagaaattggaggtattgttggtgttgttag

SEQ ID NO: 189072 - DNA, 876 bp, synthetic construct
  misc_feature 1..876: note = Description of Artificial Sequence: Synthetic coding sequence
  source 1..876: mol_type = other DNA
atggaccccagcctgctgcgggagcgggagctgttcaagaagcgggctttgtccacccctgtggtggagaaacgaagtgccagcagcgagtcttcaagttctagcagtaaaaaaaaaaaaacaaaggttgaacatggcggttcatccgggtctaaacagaattcagatcatagcaatggctcgtttaacctgaaggctctgtctggcagcagcggctataagtttggtgtcctggcgaaaattgtgaactacatgaagactaggcatcagcgtggggatacccatcccctgaccctcgatgagattctcgacgaaacccaacatcttgacatcggactcaagcaaaagcaatggttgatgaccgaagccctcgtaaataatccaaagatcgaggttatcgatgggaagtatgcatttaagcccaagtacaatgtgagagacaagaaggccctgctgcgcctgttggaccagcacgatcagagaggccttggcggaatactcctggaagatatcgaagaagccctgcccaacagtcagaaggctgttaaagctttgggcgaccaaattcttttcgtgaatagacccgacaaaaagaagatcctttttttcaacgacaaaagctgtcagtttagcgtagacgaggaatttcagaaactgtggcgctcagtgaccgtggatagtatggatgaggagaaaattgaagagtatctcaaaaggcaggggatcagctcaatgcaggaatcaggccctaagaaggtggctccgattcagcgtcggaaaaagcctgcttcccagaaaaagcgtcgatttaagacccataacgagcacctggccggggtgttgaaggactattcagacattactagttccaaatag

SEQ ID NO: 189073 - DNA, 381 bp, synthetic construct
  misc_feature 1..381: note = Description of Artificial Sequence: Synthetic coding sequence
  source 1..381: mol_type = other DNA
atggaccccagcctgctgcgggagcgggagctgttcaagaagcgggctctctctactcccgtggtggaaaagcggagcgcctcctcggaatcatcaagctcctcctctaagaagaaaaaaactaaggtggagcatggtggatccagcggcagcaagcagaacagcgaccactctaatgggagtttcaatctcaaggccctaagcggatccagcggatataaatttggcgtgctggccaaaatagtgaattacatgaagacccggcaccagagaggcgacacccatcccttgaccttagatgaaatactggacgagacccagcacttagacataggacttaagcagaagcaatggctgatgactgaggcactcgtcaactag

SEQ ID NO: 189074 - DNA, 597 bp, synthetic construct
  misc_feature 1..597: note = Description of Artificial Sequence: Synthetic coding sequence
  source 1..597: mol_type = other DNA
atggaccccagcctgctgcgggagcgggagctgttcaagaagcgggccctctccactccggtcgtggagaaaagatcagcctcttcagagagttcatcttcttcctccaaaaagaagaaaacaaaagtggagcatggcggttcttctggatcaaaacagaatagcgaccacagtaatgggtcttttaatctcaaggctttgagcggttctagcggctataagttcggagtcttggctaaaatcgttaactatatgaagacccgccaccagcgaggtgacacacatcccttgaccttggacgaaatcctcgacgagacacagcatttggatattggcttaaagcagaaacagtggctaatgacagaagccttggtcaacaaccctaaaatcgaggtgattgacggcaaatacgcatttaagcccaagtataatgtgcgggataaaaaggcactgctgagacttctggaccaacatgaccaacgcgggctgggtggtatcctactggaagatatagaagaagccttacctaattcccagaaggccgtaaaagctttgggagaccagatcttgtttgtgaacaggcctgataagaaatag

SEQ ID NO: 189075 - DNA, 1554 bp, synthetic construct
  misc_feature 1..1554: note = Description of Artificial Sequence: Synthetic coding sequence
  source 1..1554: mol_type = other DNA
atggccgccctgggccccagcagccagaacgtgaccgagtacgtggtaagagtcccgaagaatacaacgaagaagtacaacatcatggcttttaacgcagctgataaggtaaattttgcaacttggaaccaggcccgacttgaacgcgacctatcaaataaaaaaatttatcaggaagaggagatgcccgagtcgggcgccggctcggagtttaaccgcaaactgagagaagaggcccgccggaagaagtacggtatagttctgaaggaattccggccagaggatcagccttggctcctgagggtgaacggaaagagcggcaggaaatttaaaggcatcaagaaagggggggtgaccgagaatacttcatattacatattcacccaatgccctgatggcgctttcgaggcattccctgtgcacaattggtataactttacacccttagcaaggcacagaacactcaccgcggaggaagccgaagaggagtgggaaagacgaaacaaagtgctgaaccacttttcgattatgcagcagagacggctcaaggaccaggatcaggacgaagatgaagaagagaaggagaagcgggggaggaggaaagcctccgagctgcggatacacgacctcgaggacgatcttgaaatgtccagtgatgcaagcgacgcctctggagaagaaggtggtcgagtcccaaaagccaaaaagaaggctccattggccaagggtggtcgcaagaaaaaaaaaaagaagggttcagatgatgaggccttcgaagactccgacgacggtgactttgagggacaagaggtggactatatgtcagatgggtcctccagcagtcaggaggaacccgagagcaaggcgaaagcgccgcagcaggaagagggaccgaagggggtggacgaacagagcgatagcagcgaagagtcagaggaagaaaagcctcctgaagaggataaagaggaggaggaggagaagaaagccccaactcctcaagagaagaagagaaggaaagactcctccgaagagtctgatagttctgaagagagcgatattgatagcgaagcgtcctcagccctctttatggcaaaaaaaaagacgccgccaaaaagagagcgtaagccatctggaggatcgtctcgagggaactcccgcccgggcactccaagcgcagagggcgggtcaacctcatctacattacgggcggccgccagtaaattagagcagggtaagagggtgagcgaaatgcccgcggcaaagaggctgcgcttggacaccggaccacagagtctttccggcaagtctactccccagcctccttctgggaaaaccacaccaaacagcggtgatgtgcaggtcaccgaggacgctgtccgaaggtatcttactcgtaaacctatgaccactaaggacctactgaagaaatttcagacaaagaagactggtctctcctccgagcagactgttaacgttcttgcccaaattcttaaacgtttgaacccggagcggaagatgatcaatgataagatgcacttttcactaaaagagtag

SEQ ID NO: 189076 - DNA, 1299 bp, synthetic construct
  misc_feature 1..1299: note = Description of Artificial Sequence: Synthetic coding sequence
  source 1..1299: mol_type = other DNA
atggccttcaacgccgccgacaaggtgaacttcgccacctggaaccaagcccgactggaaagggacctctctaacaaaaagatttatcaggaggaggagatgcctgagtctggggctggctctgagtttaaccgaaaactgagggaagaggcgcggcgaaaaaagtatggcatcgtcctcaaggagttccggcctgaagatcagccatggctgctgagagtgaatggaaaatctgggcgtaaacgtaataaggtcctgaatcacttttctatcatgcagcagaggagattgaaggaccaggatcaggacgaagatgaggaggaaaaggagaagagagggcggcgcaaagcttccgagctccgcattcacgatctggaagatgacctggaaatgagttccgacgcttctgacgcctccggcgaggagggaggtagagtccctaaagcaaaaaagaaggctcctctagctaaaggcggacgaaaaaaaaaaaagaagaaaggctccgacgatgaggcattcgaagacagtgatgacggagacttcgaagggcaggaggtcgattacatgagtgacggcagttcatcatcacaggaagaaccggagtccaaggccaaggctccacagcaggaggaaggtccaaagggtgtcgacgagcagagcgacagttcagaggagagtgaagaggagaagcctccagaagaggacaaggaggaagaggaagaaaaaaaagcccctaccccacaagaaaaaaagagacggaaagattccagcgaagagagtgactcttccgaagaaagtgacattgactctgaagcctcttccgctctgtttatggctaagaaaaagacaccgccaaagcgcgagcgaaagcccagcggaggctcaagtcgaggtaactctagaccagggacaccgtccgccgagggaggtagcacgagcagcacactgagggcagccgcctcaaaactggaacagggcaaaagggtgtctgagatgcctgccgcgaagcggctgcggctggacaccgggcctcagagcctttcaggcaagtctactccacagccaccaagcgggaaaactacccccaattccggtgatgtgcaggtcactgaggacgctgtccggcgatacctgacccgaaagcctatgaccacgaaggacctgctgaaaaagttccagaccaaaaaaacagggctgagctctgagcagactgtcaatgtgttggcgcaaattctgaagagactcaatcctgagcgtaagatgattaatgacaagatgcatttctctctgaaagagtag

SEQ ID NO: 189077 - DNA, 384 bp, synthetic construct
  misc_feature 1..384: note = Description of Artificial Sequence: Synthetic coding sequence
  source 1..384: mol_type = other DNA
atggccgccctgggccccagcagccagaacgtgaccgagtacgtggtgagggtgccgaagaatactacaaagaaatacaacatcatggcattcaatgccgcggataaggtgaattttgccacatggaaccaggcacgcttagagagagatctgtccaataaaaagatctaccaggaggaggagatgccagaatctggcgcaggctccgagtttaatcggaagttaagagaggaggctcggcggaagaagtacggcatcgtcttaaaagagtttaggcccgaagatcagccctggttgctccgggtgaacggcaaatctggtaggaagttcaaggggataaaaaaaggcggtgttacggagaatacctcttactacatcttttag

SEQ ID NO: 189078 - DNA, 1647 bp, synthetic construct
  misc_feature 1..1647: note = Description of Artificial Sequence: Synthetic coding sequence
  source 1..1647: mol_type = other DNA
atggccaccagcagcgaggaggtgctgctgatcgtgaagaaggtgagacaaaagaagcaggacggcgctttgtacttaatggcagagaggatcgcctgggcgcccgagggcaaagaccggtttacaatatcccatatgtatgccgacataaagtgccagaaaatatcacctgaaggcaaggccaagatccagttacagttagtgctacatgcaggggacaccacaaattttcatttttctaacgaatctacggccgttaaagagagggacgccgtcaaagaccttcttcagcaactgttacctaaattcaaacgaaaggctaacaaggagctcgaagaaaaaaaccgcatgctgcaagaagaccccgtgctgttccagctgtacaaggacttggtcgtttcccaggttatctccgccgaggagttctgggccaacagattgaacgtgaacgctacggacagcagtagtacttcgaaccacaagcaggatgtgggcatcagcgctgccttcctcgcagatgtaaggccccaaacggacggctgtaacggcctgagatacaatttgacttcagacatcatcgagtccatatttcggacttaccctgccgttaaaatgaagtatgccgagaatgtccctcacaacatgaccgaaaaggagttctggactcgctttttccagagtcactatttccaccgggataggctgaacaccggttccaaagacttatttgccgaatgcgccaagatcgatgagaaggggctcaagactatggtttcacttggagttaaaaaccccctgctggacctgactgccctggaggacaagcctttggacgagggctacgggatatccagcgtgcctagcgcttcgaacagtaaaagcatcaaggaaaattcaaatgcggcgatcatcaaacgcttcaaccaccattcagcaatggtcctggctgcgggcttgcggaagcaagaggcccagaatgagcagactagtgagccatctaatatggatgggaattcaggagacgctgactgcttccaacctgccgtgaagcgcgctaagctgcaggagtcgattgagtacgaggaccttggaaagaacaatagcgtcaaaaccattgccttaaatctgaaaaagagcgatcgctattatcacggtcccacaccaatacagagcctgcaatatgccacatcccaggacattatcaattctttccagagcatcaggcaggagatggaggcttacacgccgaagctcacccaggttctgagtagtagcgctgccagctcaaccatcacggcactgtcccctggaggagcactgatgcagggggggacacagcaggccatcaaccagatggtgcctaatgacatccagtccgaactcaaacacctgtacgttgctgtgggagagctgctgcgccacttctggagctgcttcccagtgaacaccccatttctggaggaaaaagttgtgaagatgaagtctaatcttgagcgattccaggtgaccaaactttgcccctttcaagagaagatccgcagacagtatctgtcgacaaacctcgtgtcacacatcgaagagatgttgcagaccgcctacaacaagctgcatacatggcagtctagacgcctgatgaagaaaacatag

SEQ ID NO: 189079 - DNA, 1647 bp, synthetic construct
  misc_feature 1..1647: note = Description of Artificial Sequence: Synthetic coding sequence
  source 1..1647: mol_type = other DNA
atggccaccagcagcgaggaggtgctgctgatcgtgaagaaggtgcgacagaagaagcaggatggcgctctttaccttatggccgaaagaattgcttgggctccagagggaaaggacaggttcaccatttctcacatgtatgccgacattaaatgtcagaagatctccccagagggaaaggctaagattcaattgcagctcgttctgcatgccggagacaccaccaacttccattttagcaacgagagcaccgccgtgaaagagcgggacgctgttaaagacctattgcagcagcttctgcccaagttcaaacgcaaggccaataaggaactagaagagaagaatcgtatgcttcaggaggatcccgtgctctttcagttatacaaggacttggtcgtctcacaggtaattagtgcagaggagttttgggccaacaggctcaatgtgaacgctacagatagtagtagtaccagcaatcacaagcaggatgttggcatctcagcagcctttctggccgatgtcagaccccagaccgacggatgtaatggcctccgatataatctaactagcgatataattgaatctatcttcagaacatatcccgccgtcaagatgaaatacgctgagaacgtcccccataacatgaccgagaaggagttctggacccggttttttcagtcccactattttcatagggaccgcctgaatacaggcagcaaggacctgtttgccgagtgcgccaagatagacgagaaaggactgaaaacgatggtctcacttggggtgaagaacccattattagatttgacagctcttgaggataagccactcgacgaagggtacgggatctcaagcgtgccctccgcttcgaactcaaagtctatcaaggaaaactctaacgctgctatcatcaaaagatttaaccaccatagcgcaatggtgttggctgccgggttacgaaagcaggaagcccagaacgagcagacgagcgaacctagcaacatggatggtaatagcggggatgccgactgctttcagcccgccgtcaagcgcgctaagttgcaggaaagcattgagtatgaggatcttggaaaaaataatagtgtcaagaccatcgcccttaacctgaaaaaatctgacaggtactaccatggaccaacacccattcagtctctgcaatatgccaccagtcaggacattattaattcatttcagagtatcaggcaggaaatggaagcctacaccccgaagctgacccaggtgctcagctcaagcgcagcctcctctaccataacagcattatcacccggcggagccctgatgcagggcggaacacagcaagcaataaatcaaatggtccccaacgatattcagagtgagctgaagcatctttatgttgcagtgggagagctgctacggcacttctggtcttgtttccctgtgaacacccctttcctggaagagaaggtcgtgaagatgaagtctaaccttgaacgatttcaggtgacgaaattgtgccccttccaagagaagattcgccggcagtacctgtcaaccaacctcgtctcccacatcgaggagatgctacagaccgcttataataaactgcatacgtggcagagtcgtcggctgatgaaaaagacctag

SEQ ID NO: 189080 - DNA, 288 bp, synthetic construct
  misc_feature 1..288: note = Description of Artificial Sequence: Synthetic coding sequence
  source 1..288: mol_type = other DNA
atggccaccagcagcgaggaggtgctgctgatcgtgaagaaggtgcggcagaagaagcaggacggtgcgctgtaccttatggctgagagaatagcatgggcaccagagggtaaggatagattcacaatttcccatatgtatgctgacattaaatgccagaaaatatcacctgaagggaaggcaaagattcagctgcaactggtgcttcacgcaggggacacaacaaatttccacttctccaacgagtctacggccgtcaaagaacgtgacgctgtaaaggatctctag

SEQ ID NO: 189081 - DNA, 1299 bp, synthetic construct
  misc_feature 1..1299: note = Description of Artificial Sequence: Synthetic coding sequence
  source 1..1299: mol_type = other DNA
atgctgcaggaggaccccgtgctgttccagctgtacaaggacctggtagtgtcacaggttattagtgccgaggagttctgggctaaccgactcaacgtcaatgctacagatagctcaagtacgagtaatcataagcaagatgtggggatttctgccgcatttctggcggacgtcagacctcaaaccgacggttgcaacggcttgcggtacaatctgacctccgacatcattgaatctatctttcgcacctaccccgcagttaaaatgaagtacgccgagaacgtgccacataacatgactgagaaggagttctggacaaggttcttccaatctcactacttccaccgtgacaggctcaatacaggatctaaggatctgttcgcggaatgcgccaaaattgacgaaaaagggctgaaaaccatggtatctttaggagtgaaaaatccactgctcgacttaacggcactggaagacaaacccctcgatgaggggtacggtataagcagtgtcccctccgcaagtaactcaaagagtatcaaggagaactcaaatgcggcgattattaagagattcaatcatcactctgctatggtgcttgccgcaggactgcgaaagcaagaggcccagaacgaacaaacctctgaaccttccaacatggatgggaacagcggagatgctgattgctttcaaccagcagttaagcgagctaaattacaagagtcgatcgaatacgaagaccttgggaagaataatagtgtgaagaccatcgcactgaatctgaagaaatctgatcggtattatcatgggcctacccccatccagtccttgcagtacgcaacatcccaggacattattaactcatttcaaagcatccgacaagagatggaggcctatactccaaaactgacacaggtgctctccagcagcgccgcatcatctaccatcacggctctcagccctggcggcgccctgatgcaaggcggtacccagcaagccatcaatcagatggtgcccaacgacatacaaagcgagttaaagcatctgtacgtagcggtcggtgagttactcaggcatttctggtcctgttttccagtgaacaccccatttcttgaagagaaggtggttaaaatgaagtccaatctcgaaagattccaagttaccaagctctgcccctttcaagaaaagattaggcggcagtatctaagcaccaatctggtatcacatatcgaagagatgcttcagactgcatataacaagcttcacacgtggcagagcagacggcttatgaaaaaaacctag

SEQ ID NO: 189082 - DNA, 1188 bp, synthetic construct
  misc_feature 1..1188: note = Description of Artificial Sequence: Synthetic coding sequence
  source 1..1188: mol_type = other DNA
atggacgaggagcccgagcggaccaagcggtgggagggcggctacgagaggacatgggagatcttgaaggaagatgaaagtggctcactcaaagccaccatcgaggatatcctgttcaaagcgaagcgcaagcgggtgttcgaacatcacggtcaggtgagactgggcatgatgcggcatctgtatgtcgtggtggacgggagtcgtaccatggaggatcaagatctcaagcctaaccgtttgacttgcaccctcaagcttttagaatactttgtggaggaatacttcgatcaaaaccctatcagccagattggcattatcgtcaccaagagtaagcgcgccgagaaactgaccgagctttcaggtaacccaaggaagcatatcactagcctgaaaaaggctgtggacatgacttgtcacggcgagcccagcttatataactcactgtcgatcgccatgcaaacccttaaacacatgccgggccatacatctagagaagttctgatcatttttagcagtctgaccacctgtgatcctagcaatatctacgatctgattaagactctgaaggccgccaagatcagagtgagtgtgatcgggctgagcgcggaagtgcgggtgtgcaccgttctcgcccgggaaaccggggggacctaccacgtcatcttagacgagtcacactataaggagctgctgacccaccatgtgtcgcctcccccagcatcaagcagttcagagtgttcactgattaggatgggcttccctcagcacaccattgccagcctgagcgatcaggatgccaaaccttcattctccatggctcatctggacggtaacacagagcccggcctcactctgggaggctatttttgtccacagtgtcgcgctaagtattgcgaattaccagtggaatgcaaaatctgtggcctcacacttgttagtgctccccatttagcgagatcatatcaccatctgttccctctcgacgccttccaggagattcccctggaggagtataacggcgaacggttctgctatggctgtcagggagagcttaaggaccagcacgtttacgtgtgcgccgtatgccaaaatgtcttttgcgttgattgcgacgtcttcgtgcatgatagccttcattgctgtcccggatgtattcacaaaatccctgcccccagtggcgtctag

SEQ ID NO: 189083 - DNA, 1188 bp, synthetic construct
  misc_feature 1..1188: note = Description of Artificial Sequence: Synthetic coding sequence
  source 1..1188: mol_type = other DNA
atggacgaggagcccgagcggaccaagcggtgggagggcggctacgagcgcacctgggagatcctaaaggaagacgagagcggctctctcaaagccaccatagaggatattctgttcaaggcaaaacgcaaacgcgtgttcgaacatcacgggcaggtgcgcctcgggatgatgaggcacctatatgtcgtggtggacggctctaggacaatggaagaccaggatctcaaacctaacaggctgacatgtactctgaaactcctggagtactttgtggaggagtatttcgaccagaaccccattagtcaaatcggaattatagtgactaagtccaagcgggcagagaagttgacggagctgagcgggaacccacgcaagcacatcaccagtttaaagaaggccgtagacatgacatgccatggcgagcctagcctgtataactctctttctatcgcgatgcagactcttaagcatatgccagggcatacatcgagagaagtgctgatcattttctcatcgctgacaacatgcgacccatcgaatatttacgatctcatcaaaaccctcaaagccgcaaagatcagagtgtccgtgattggtctcagtgcggaagtgcgtgtctgtaccgttctcgcaagggagaccggcggaacttaccacgtgattctggatgaaagtcattacaaagaattgttaactcatcacgtcagtccgccacctgcttccagcagcagcgagtgcagcctgatccgcatggggttcccacaacacacgatcgcatcacttagtgaccaggatgcgaaaccgtccttttcaatggcccacttggacggcaacaccgaacctggacttactctgggcgggtatttttgccctcagtgcagagccaagtactgtgagctgcccgtcgagtgcaagatttgtggattaaccctggtgtctgcgccgcatttagcccgtagctaccaccacctcttccccctggacgctttccaagagattcccctggaggaatataatggggagcggttctgttacgggtgtcagggcgagcttaaggatcagcatgtctacgtgtgtgctgtgtgtcagaacgttttttgcgtcgactgtgacgtcttcgtgcacgattccttgcattgttgtccaggctgcatccataagatccccgctccctccggcgtgtag

SEQ ID NO: 189084 - DNA, 1017 bp, synthetic construct
  misc_feature 1..1017: note = Description of Artificial Sequence: Synthetic coding sequence
  source 1..1017: mol_type = other DNA
atgcggcacctgtacgtggtggtggacggcagccggaccatggaggatcaggacctgaagcctaatcggttaacatgcacactgaaactcctggaatattttgtggaggaatactttgaccagaacccgatcagccagatcggcattatcgttactaagtctaagagagctgagaagctcactgaactgtccggtaatcctaggaagcatataacctccctgaaaaaagctgtcgacatgacctgccacggcgaacctagtctgtataacagtctgtccatcgcaatgcagaccctcaaacatatgccaggccatacatcccgcgaggtcttaattattttttccagtctgaccacgtgtgatccttctaatatctacgatctgattaagactctcaaagcagctaaaatccgcgtatccgtaataggtctgtccgccgaggtccgggtgtgcacagtactggctcgggaaaccggaggcacctatcatgtcattctggacgaatctcactacaaggaactgcttacacatcatgtgtcgcccccacctgcatcatccagctccgaatgttccctgattcgcatgggattccctcagcacacaattgcaagtctttctgaccaggatgctaaacctagctttagcatggcccacttagatggtaacacggagcctggccttactctgggcggctatttttgtccccaatgcagagccaaatactgcgagttacctgtggaatgcaagatttgtggcctcacactggtcagcgccccacacctggccaggtcctaccaccacctgtttccccttgatgccttccaggagatccccctagaggagtacaatggcgaacgcttttgctacggatgccagggagagctgaaggatcagcatgtgtacgtgtgtgccgtctgtcagaacgtcttctgtgttgactgcgacgtatttgtgcacgatagcctccactgttgccccggctgcattcataaaattcccgctccaagcggagtctag

SEQ ID NO: 189085 - DNA, 1188 bp, synthetic construct
  misc_feature 1..1188: note = Description of Artificial Sequence: Synthetic coding sequence
  source 1..1188: mol_type = other DNA
atggacgaggagcccgagcggaccaagcggtgggagggcggctacgagcgcacgtgggagattctcaaagaagacgagtctggtagcctgaaggcaaccatcgaggatatattgttcaaggcaaaaaggaaacgggtgttcgagcatcacggccaggtgcggcttggcatgatgcggcacctctatgtggtggtggatgggagccgtactatggaggaccaggacctcaaacccaatcggctaacatgcactcttaagcttcttgagtacttcgtcgaagagtacttcgatcagaacccaattagccaaattggcatcattgtgacaaagtctaagagagctgaaaaacttactgagctttctgggaaccctagaaagcacattacaagtctaaagaaggccgtggatatgacatgtcacggtgaaccatcattgtataactccctctcaattgccatgcaaaccttgaagcatatgccgggtcacacatctcgtgaagttctaatcatcttttcaagccttacgacatgcgacccatctaacatctacgacctgattaaaaccctgaaagcagccaaaattcgggtgtctgtgattggcctttccgctgaggtcagagtatgcactgtcttggcccgtgagacaggggggacgtatcacgtgatcttggatgaatcgcactacaaggagttgctcacacatcatgtgtcccccccccccgcctcatcgtctagcgaatgtagtctgatcaggatgggctttccgcaacacactatcgcgtcactgtcggatcaggatgctaagccctccttcagtatggcacatctggacggcaacacagaaccagggctgacactcggtggttatttttgccctcagtgcagggccaagtactgtgaactaccagtggaatgcaaaatctgcggcctgactctagtctcagcgccgcacttggctcgcagttaccatcacttgttcccacttgacgcgtttcaggagatcccattggaagagtacaacggtgaacggttctgctacggctgccaaggcgagctgaaggaccagcatgtgtacgtctgtgcggtctgccagaacgtcttctgcgtggattgtgatgtgttcgtccatgactccctccactgctgtcccggctgcatccacaaaatccctgctccaagtggcgtatag

SEQ ID NO: 189086 - DNA, 1389 bp, synthetic construct
  misc_feature 1..1389: note = Description of Artificial Sequence: Synthetic coding sequence
  source 1..1389: mol_type = other DNA
atggagagcacccccagccggggcctgaaccgggtgcacctgcagtgtagaaacctgcaggagtttcttggagggttatcccccggcgtactggataggttgtacggccaccccgctacttgtttggcggttttccgcgagttgccgtccctggcgaaaaactgggtgatgcgcatgctcttcctcgaacagccccttccccaggccgccgtcgcgttgtgggtgaagaaagaatttagtaaggctcaagaggagagcactggacttttgtcagggctgagaatctggcacactcagctgttgccgggcggtctgcagggtctcatcctgaaccctatcttcaggcagaacctgcgcatcgctttacttggtggaggaaaagcctggtcagatgacacttcgcaactgggtccagataaacacgctcgcgatgtgccatccttagataaatacgccgaggaacggtgggaggtggtcctccacttcatggtgggctcaccgtctgccgctgtgagccaagatctggcgcaacttctatcacaggccggcttgatgaaatctactgaacccggcgaacctccatgtattacaagcgccggattccagttcctgttgcttgatacccccgcccagctctggtacttcatgttacagtacttgcaaacagctcagagcagaggcatggaccttgtggagatcctcagcttcctgttccagctgtcctttagcacgctggggaaggattattctgtggaaggcatgagcgattctctgttaaacttcctgcagcatcttagagaattcggccttgtgtttcagcggaaacgcaagtcaaggaggtactatcctacaagacttgcaattaacttgtcttccggagtaagcggcgccggcggtaccgtccaccaaccaggtttcattgtggtggagacaaactacaggctgtacgcttacacggagagcgaacttcagatcgccctgatcgcactcttcagcgagatgttgtatagattccccaatatggtcgtggctcaggtgactcgagaatccgtgcagcaggcgatagcctcaggcatcaccgcacagcagatcattcacttcttgagaacacgggcacaccctgtcatgctgaagcagacccctgtcctgcctccgactataaccgaccagatacgtttgtgggaattagagagggatcgccttcgattcacagagggggtgctgtacaaccagtttctgtcccaggtcgacttcgaactccttcttgctcacgcccgcgaactcggagtgctcgtgttcgaaaattccgcaaaaaggctgatggtcgtcaccccagcagggcactccgatgtcaagaggttttggaaacggcaaaagcactcatcctag

SEQ ID NO: 189087 - DNA, 1389 bp, synthetic construct
  misc_feature 1..1389: note = Description of Artificial Sequence: Synthetic coding sequence
  source 1..1389: mol_type = other DNA
atggagagcacccccagccggggcctgaaccgggtgcacctgcagtgtcggaacttacaggagttcttgggaggcttgtccccaggcgtcttggaccgcctttacgggcatcccgcaacctgtcttgctgtattccgtgaacttcctagcctcgcaaagaactgggtaatgcgaatgttgtttttagaacagcctctgccgcaggcagccgtcgccctgtgggtgaaaaaggagttctctaaggctcaagaggagtccaccggactgctgtcagggctcaggatatggcatacccagcttctgccaggcggcctacaagggctaattctgaaccccatatttcgccagaatctgcgcattgctttacttggcggcgggaaggcatggtccgatgacacttcccaactggggccagacaagcacgccagagatgtgcctagcctggacaaatacgccgaggaaagatgggaggtggtgctgcatttcatggtgggaagcccttctgccgctgtatcacaggatttagcccagttactgtcccaggctggcctgatgaagtctacagaaccgggggagcctccctgtatcacatctgccggcttccagtttctcttactggatacccccgcgcagctgtggtatttcatgctccagtacctacagaccgctcaaagtcggggtatggacttggtcgagatactgtcattcctgtttcagctgtcctttagcacattgggtaaagactatagtgtggagggaatgagcgactcactcctgaattttctacaacacctcagagagtttggccttgtgttccagaggaagaggaagtccagacgctattacccaaccaggctggcgatcaatctgtctagtggggtctccggggcggggggcaccgtccatcagcccgggttcatcgtggttgaaaccaattaccgactgtacgcctatacagagagcgaattgcaaattgctctgatcgccctcttttccgagatgctttataggttccctaacatggtggttgcgcaggtaacacgcgaatctgtgcagcaggcaattgcatccggtatcactgcacaacagataattcatttcctccggactcgggctcatccagtgatgttaaaacagacacccgtcttgcctccaaccatcaccgaccagattagactgtgggagcttgagcgggaccggctccgcttcaccgaaggcgtactctataaccagttcctgagccaggtcgacttcgagcttcttttggcccatgcgagggagctcggtgttttagtgttcgagaactccgccaaaaggcttatggtggtaaccccagcaggccatagcgatgtgaagagattttggaaaagacaaaagcacagcagttag

SEQ ID NO: 189088 - DNA, 1389 bp, synthetic construct
  misc_feature 1..1389: note = Description of Artificial Sequence: Synthetic coding sequence
  source 1..1389: mol_type = other DNA
atggagagcacccccagccggggcctgaaccgggtgcacctgcagtgtcggaacctgcaggaatttctcggcggcctgtcgcctggagtcttagaccggctttatggccatcctgccacctgtctggcggtgttcagagagcttcctagcctggcaaaaaattgggtgatgcgcatgctgttcttggagcagcccctcccacaggccgcagtggctctatgggtgaaaaaggagttctccaaagcacaggaggagagcaccgggttactcagcggactgcgaatctggcacacccaactgctgcccggagggctccaaggtctcatcttgaaccctatcttcaggcagaatctacggattgcactgctcggcggagggaaggcttggtctgacgatacctcgcagctcggacccgacaagcacgccagggacgtgccatccctggacaaatacgcggaagagcgatgggaagtggtcttgcattttatggtaggctcgccttccgcagccgtgtcacaggatcttgcacagctcctcagccaggccgggctcatgaagtctaccgagccaggagaacctccctgtatcacctccgccgggtttcagttcctgttgcttgacaccccagcccagctgtggtactttatgttacaatacctgcagacagctcagagccgcgggatggacctggttgagattctgagctttctgtttcagctttcgttttctacgctgggaaaagattatagcgtcgaggggatgtctgattctcttttaaattttctgcaacatttgcgtgagttcggattagtattccagcggaagcgtaagtcccgcagatattaccccacacgccttgccattaacctgagctccggggtaagtggtgctgggggcactgttcatcagccgggtttcatcgtggttgaaaccaactacaggttgtacgcttatactgagagcgagttacagatcgcactaattgccctcttctccgagatgctctaccgcttccccaatatggtggtcgcccaggtgactcgggaaagcgtgcagcaggcgattgcgtcagggattactgcgcaacagataattcacttcctcaggacaagggctcaccccgtgatgttgaagcagactccagtcctgcccccaacgatcaccgaccagatcagactgtgggaactggaaagagatcgtctgcggtttaccgaaggcgtcctctacaaccaattcttatcacaagtggactttgagctgctcctggctcatgcaagagagttaggtgtgctggtgtttgaaaatagcgccaagaggctgatggtggtgacccccgcgggacattctgatgtgaaacgcttctggaagcgccagaagcacagttcttag

SEQ ID NO: 189089 - DNA, 1389 bp, synthetic construct
  misc_feature 1..1389: note = Description of Artificial Sequence: Synthetic coding sequence
  source 1..1389: mol_type = other DNA
atggagagcacccccagccggggcctgaaccgggtgcacctgcagtgtagaaacctacaagagttccttggcggcctgtcccccggagtcctggatcggctctacggacaccctgccacttgcctggccgtatttcgtgaacttccatctcttgcaaaaaactgggttatgagaatgctgttcttggagcagcccctcccacaagctgccgttgccctgtgggtgaaaaaagagttttccaaggctcaggaagagagcaccggtttgctgtccggactacgcatctggcacactcagcttttgcccggcggcctccagggcctgatactcaaccctatctttcgccagaacctgcgcatcgcattactggggggcggtaaagcatggtccgatgacactagtcagctgggccctgataagcacgccagggacgtgccatctctggataagtatgccgaggagaggtgggaagtcgtgctccacttcatggtgggttcgccctccgccgcggtttcacaggacctggcacagctgctgagccaggcgggactaatgaagagtacggagcctggagaacccccttgcatcacgagtgccggcttccagtttttgctattggatactccagctcaactctggtacttcatgctgcaatatctgcagacagcccagagtcgaggcatggatctcgtggaaattctctcctttcttttccagctcagtttcagcaccctggggaaagattattccgtcgagggcatgtcagatagcctgctcaatttcctccaacacctccgggagttcggtttagtgttccagagaaagaggaagtctaggagatactatcccacacgcctggccatcaacctatcatccggtgtctcaggggcaggaggaaccgtgcatcagcctgggttcatcgtcgttgagaccaattatagactctacgcctacaccgagtccgagttacagattgctctgattgccctcttctcagagatgctgtaccgtttccctaacatggtggttgcgcaggttacccgggagtccgtgcagcaggctattgcaagcgggatcaccgcccagcagatcattcacttccttcggacccgggcccaccccgtgatgcttaagcagacccctgtcctacctcctacgattacagaccagattagactctgggaattggagagggacagactgcggttcaccgagggagtgctttacaaccaatttctatcgcaggtcgactttgaattgctgcttgcccatgctagagagttaggtgtccttgtcttcgaaaattcagctaagaggctgatggtcgtgacgccagcgggacactcagacgtgaagagattctggaagagacaaaagcatagttcatag

SEQ ID NO: 189090 - DNA, 1389 bp, synthetic construct
  misc_feature 1..1389: note = Description of Artificial Sequence: Synthetic coding sequence
  source 1..1389: mol_type = other DNA
atggagagcacccccagccggggcctgaaccgggtgcacctgcagtgccgaaacctgcaggaattcctgggaggactgagccccggcgtcctcgatcgcctatacggacatcctgctacctgcctggccgtgtttagagagctgccttccttggccaagaactgggtgatgcggatgctgtttctagagcagcctctgccacaggccgccgtggctctttgggtgaagaaagagttctctaaggcacaggaggagagtactgggctattatcaggcctgcgaatttggcatacgcaactgctgcccgggggactgcaagggctcatactgaaccccatcttcaggcagaaccttcggatcgcattgctgggaggcggtaaagcctggagtgacgacaccagtcaattaggtccggataagcatgcccgggatgtgccctccctggataaatacgctgaagaaagatgggaggtcgtgctgcatttcatggtagggtctcccagcgccgccgtgtctcaggatcttgcccagctgctgtcacaagcaggactcatgaagtcaaccgaaccaggcgagccaccgtgcatcactagtgctggctttcagtttcttctgttggacaccccagcacagctctggtatttcatgctgcagtacctacagacagctcagtcacggggtatggatctggtggagatcctttctttcctgttccagttgagcttctcaaccctgggtaaggactactccgtggagggtatgagcgactcacttctgaattttctgcaacatctgcgagaattcggacttgtttttcagagaaagcgtaaatctaggagatactatccaaccagactcgcaatcaacctttctagtggagtttctggcgccggaggcactgtccaccaaccaggcttcattgtggtggaaacgaattatagactgtatgcatacacagagtccgagctgcaaattgccctaatcgcactcttttccgaaatgttatatcggtttcctaatatggtagtggcacaggtaacaagggagagtgtgcagcaggctattgcatctggcattacagcgcaacaaatcatccactttctcaggactcgggcacaccctgttatgctgaaacagacaccagtactgcccccgacaattactgatcagattcggctgtgggaactcgagcgggaccggctgcggttcacagaaggggtgctgtacaatcagttcctctctcaggttgactttgagctgctcttggctcacgcacgagagttgggcgttctggtgtttgaaaacagtgccaagcgtctcatggtggtgacccccgccggccactcggatgtcaaaagattctggaagcggcagaaacattcaagctag

SEQ ID NO: 189091 - DNA, 417 bp, synthetic construct
  misc_feature 1..417: note = Description of Artificial Sequence: Synthetic coding sequence
  source 1..417: mol_type = other DNA
atggagagcacccccagccggggcctgaaccgggtgcacctgcagtgccgtaatcttcaagagttccttgggggtctgtcacctggtgtccttgatagactctatggccatcctgctacttgcctggctgtgttccgagagctcccgtcgcttgccaaaaattgggtgatgcggatgctttttctggagcagccactcccacaagccgctgtggcattatgggttaaaaaggaattctctaaagctcaggaggaaagcactggactcctgtctggcctaaggatttggcacacccagctgcttcctggtgggctgcagggtttaatactcaaccctatctttcggcagaatcttagaatcgcactgttgggtgggacaggcatcacaggggtgtcccactgtgcctggcctggctag

SEQ ID NO: 189092 - DNA, 1389 bp, synthetic construct
  misc_feature 1..1389: note = Description of Artificial Sequence: Synthetic coding sequence
  source 1..1389: mol_type = other DNA
atggagagcacccccagccggggcctgaaccgggtgcacctgcagtgtagaaaccttcaggaattcttaggaggcctctcacccggcgtgctggaccgcctctacggacatcccgctacttgcttggccgtcttcagagagctgccgagcctagctaaaaactgggttatgagaatgctattcttggagcagccactcccacaggccgctgtggcgctgtgggttaagaaggagttcagtaaggcgcaagaagagtctaccggtcttttgtcagggctgagaatatggcacacccagttgctgccagggggattacaaggactgatactcaatccaatttttaggcagaacctgagaatcgctctgcttgggggaggtaaagcctggagtgacgacacctcgcagctcggccctgataagcacgcccgtgacgtgccgagtctcgacaagtatgccgaagagcgctgggaagtagttctgcattttatggttggttcccccagcgcagccgtcagtcaggacctcgcacagctgctgagccaggccgggctgatgaagagtaccgaacccggagaacccccctgcatcacatccgctggcttccagttcctactgctggacactcctgcccagctctggtatttcatgctgcagtatcttcaaactgcacagtctagaggcatggacctggtcgagatcctgtctttcctctttcagctgagtttttccacattagggaaagattactctgtcgagggtatgagcgattccttgttgaactttcttcagcaccttagggaatttgggctcgtgtttcagcgcaagagaaaaagtcggcgatattatccgactagacttgccattaacctctcgtccggggtctccggcgcggggggcaccgtgcaccagccagggtttattgtcgtggaaactaattatcgcctgtatgcgtatacagaatctgagctgcagatcgcccttattgctttgttcagcgagatgctgtatcgcttcccaaacatggtggttgctcaggtgaccagggaatcggtgcagcaggcaatcgcaagtggtattacagcccaacagatcatccactttcttcgaaccagagcccatcccgtgatgctgaaacagacgcccgtccttcctcctaccattactgaccaaatccgactctgggagttggagcgcgaccggctcagatttacggagggagtactgtacaaccagtttttatctcaggtcgactttgaactgttactagcacatgcacgggaactgggcgttttggtttttgagaacagtgctaaacggctaatggtggtcactcccgccggacacagcgacgttaaaagattctggaaacggcagaagcacagctcttag

SEQ ID NO: 189093 - DNA, 417 bp, synthetic construct
  misc_feature 1..417: note = Description of Artificial Sequence: Synthetic coding sequence
  source 1..417: mol_type = other DNA
atggagagcacccccagccggggcctgaaccgggtgcacctgcagtgtcgtaacctccaggagttcctcggcggtctatcacccggggttcttgacaggctgtatggacaccccgccacttgcctagccgtgttcagagagctaccttccctggctaaaaactgggtcatgcgtatgttatttctggagcaaccattgccacaggccgcagttgcactctgggtgaagaaagaattttccaaggcccaggaggagagcacaggtctcttgagcggcctacggatctggcatacccagctacttcctggcggtcttcaggggctgattttgaatcctatctttcgccaaaacctgagaatcgcacttctcggcggcacagggatcactggggttagtcactgcgcttggccaggctag

SEQ ID NO: 189094 - DNA, 1389 bp, synthetic construct
  misc_feature 1..1389: note = Description of Artificial Sequence: Synthetic coding sequence
  source 1..1389: mol_type = other DNA
atggagagcacccccagccggggcctgaaccgggtgcacctgcagtgtcgaaacttgcaggagtttctgggtggcctgtcccctggggtcctggacagactctacgggcatcccgcaacatgtttggccgtgtttagagagcttccaagtctggccaaaaattgggtcatgagaatgctgttcttggagcaaccactgcctcaggcagccgtggcattgtgggtcaagaaagaattcagcaaggcccaggaagaatctactggtttactgtcaggcttacgcatatggcacactcagttattaccagggggcctacagggcctgatcctgaatccaatattcagacaaaatctgaggatcgcactgctcggtggagggaaggcttggtcagacgatacttctcaactcggaccagacaaacacgcaagagatgtcccctcactggacaagtatgctgaagagagatgggaggtggtcctgcatttcatggtgggatccccgagcgccgcggtgtcccaagatctggcgcagcttctgtcacaggctggactgatgaaatctactgagcctggcgaacctccttgcattacaagcgcggggttccaattcctgcttctggacacccccgcccagttatggtactttatgctgcaatatctccagacggctcagagtcgggggatggacctggtggagatactcagctttttgtttcagttgtctttttccactctcggtaaggattactcagtcgagggcatgtcagattcactgctcaattttttacaacaccttcgcgagttcggactggtctttcaaaggaagcggaaatccagaagatattatccaacaagactggccataaacctgtccagcggcgtttccggggctgggggcacagtgcaccagcccggcttcattgtcgtggagactaattaccggttgtatgcctatacagaatccgagttgcagattgctttgatcgcacttttcagcgaaatgttgtaccgctttcctaacatggtcgtggcgcaggtgactagagaatctgttcagcaggccatcgcttcaggcatcactgcccagcagatcatccacttcctgcggaccagagcccatcctgtcatgttgaagcagacaccagtgctcccacctacaatcaccgatcaaatcaggctgtgggaattagagagagacaggctcaggttcaccgaaggcgtgttatataaccagtttctgtcccaagtagactttgaactccttctcgcgcatgcgcgagaattaggcgtattggtgttcgagaattctgcaaagcggcttatggtggttacacctgctgggcacagcgacgtgaagagattctggaagcgacagaaacactcctcttag

SEQ ID NO: 189095 - DNA, 417 bp, synthetic construct
  misc_feature 1..417: note = Description of Artificial Sequence: Synthetic coding sequence
  source 1..417: mol_type = other DNA
atggagagcacccccagccggggcctgaaccgggtgcacctgcagtgtcgcaacttgcaggaatttctgggaggcctatcgccaggcgtgctggatagactgtacgggcaccctgcaacatgtctcgccgtttttcgcgagcttcctagccttgctaagaactgggtcatgcggatgcttttcctagagcagccattgccccaggccgccgtcgcactgtgggtgaaaaaggagttctcaaaggcacaagaggaaagtactggcctactgagcggacttaggatttggcatactcagctgctgccgggcggcctacagggactaattctaaatcccatcttcaggcagaatctccgcatcgccctacttgggggcactggtataacaggggtgagccattgtgcttggcccggctag

SEQ ID NO: 189096 - DNA, 1389 bp, synthetic construct
  misc_feature 1..1389: note = Description of Artificial Sequence: Synthetic coding sequence
  source 1..1389: mol_type = other DNA
atggagagcacccccagccggggcctgaaccgggtgcacctgcagtgccgtaacctgcaggagttcctgggcggcctatctcctggcgtcctggacaggttgtacggacacccagccacctgtctggcagtttttagagagcttcctagcctggccaagaactgggtgatgcgcatgctgttcctggagcaacctctaccccaggctgcagtagccctctgggtgaaaaaagaattctccaaagcccaagaggaatctaccggcctgctgtccggcctcaggatttggcacacgcagcttttaccggggggtctgcagggtttaatcttaaacccaatcttccgacagaatcttcgcatagccctgctcggcgggggaaaagcctggtctgacgataccagccagctgggtccggacaaacacgctcgggacgtgcctagcctcgataagtacgccgaggagcgttgggaagtggtgctgcactttatggttggcagcccgagtgcagctgtgtcacaggaccttgcccaactgctgtctcaggccggcctcatgaaatctacagaacctggcgagccaccttgtattacttcggcaggcttccagtttctgttgctggacacacctgctcaattatggtacttcatgctccagtacctgcagactgcacagtctcgcgggatggatctggtcgaaatcttgtcattcctgtttcagttgagctttagcacactggggaaggattacagtgtcgagggcatgtcagatagtctcctcaatttccttcagcaccttcgagagttcggcttggtcttccagcgcaagagaaagtcgcggaggtattacccgacccgtctcgcaattaaccttagctccggagtctcaggcgccggaggaactgtgcaccagccggggttcatcgtcgtagagactaattacaggctgtatgcatatactgaaagtgagttacaaatcgcattaattgctctgttctctgagatgctgtatcggtttccaaacatggtggtggcacaagtcacccgggagagtgtgcagcaggccatagcctccggtattacagcccagcaaatcatacacttcctgagaactagggcccacccagtcatgctcaagcaaactccagtgctcccacccacgatcactgatcagattagactttgggagctggaaagagatcggttgaggttcacagaaggcgtgctgtacaatcagtttcttagccaagtggatttcgaactcttgttggctcatgcccgggagctgggcgtcctggtcttcgaaaattccgctaaaaggctcatggtcgtgacacccgccggccattctgatgtcaagcggttttggaagaggcaaaagcactcctcatag

SEQ ID NO: 189097 - DNA, 1389 bp, synthetic construct
  misc_feature 1..1389: note = Description of Artificial Sequence: Synthetic coding sequence
  source 1..1389: mol_type = other DNA
atggagagcacccccagccggggcctgaaccgggtgcacctgcagtgccgcaacctccaggagttcttagggggtttgtccccgggagttctggaccggctttatggtcatccagccacgtgtctggcagtgttccgcgagctaccatcactggcgaagaactgggtgatgagaatgcttttcctcgagcagcctcttccgcaagccgcagtggccctgtgggtgaaaaaggagttctcgaaggcacaagaagagtctacagggttgctttctggcctgcggatctggcacacccaacttttgcccgggggccttcagggcctgatcctgaatcctatcttcaggcagaacttgaggatcgctctcctggggggaggcaaagcctggtctgacgacacttcccagctagggccagataaacatgcaagagacgttcctagtcttgacaagtacgccgaggaaagatgggaggtggtgctccatttcatggtcggttcaccttcggccgctgtgagccaggatctcgctcagctgctaagccaggcgggcttgatgaagtctactgaacctggcgaacctccctgtattaccagcgccgggttccagttcctccttctggacacacccgctcagctgtggtatttcatgcttcagtacttacagacagcacagagccgaggcatggacttagtcgagattctcagcttcctgttccagctcagtttcagcacccttggaaaagactatagtgtggaggggatgtcagatagcctgctgaatttcttgcagcacttgagagaattcggcctagtgttccagcgcaagcgcaagtccaggcgttactaccccacccggctcgcaatcaatttgtctagcggagtctctggggcagggggcactgttcaccaaccgggcttcattgtagtggaaactaattacagactctatgcatacactgagtcagaactgcagattgctctaattgctcttttctctgagatgctgtatcggtttcctaatatggtcgtcgcacaggtgactagagagtctgtgcagcaggccatagctagcgggataacagcgcaacagatcatacatttcttgcgcacccgcgctcatcccgtcatgctgaagcagacccctgtgctccctcctaccatcaccgatcaaattaggctctgggagctcgagcgtgaccgactgcgctttacagaaggagtcctgtacaaccagttcttgtcacaggtggattttgaactcctgctggcgcacgcacgggagctgggggtactcgtctttgagaactcggccaagcggctgatggtggtgacccccgctggacacagtgatgtgaaacgcttttggaaacgacaaaagcattcgtcttag

SEQ ID NO: 189098 - DNA, 1389 bp, synthetic construct
  misc_feature 1..1389: note = Description of Artificial Sequence: Synthetic coding sequence
  source 1..1389: mol_type = other DNA
atggagagcacccccagccggggcctgaaccgggtgcacctgcagtgtcggaatcttcaggagtttctcggtggactgtcgccgggcgtcctggatcgcttgtacggacatcctgctacctgtctagcggtgttccgggagctacccagtttggcaaagaactgggtaatgagaatgctattcctagagcagccactgccacaggccgctgtcgcactgtgggtaaaaaaggagttctccaaagctcaggaagaatctacaggactgctttccgggctgagaatttggcatacacaactgctcccaggagggctccaggggctcatcctgaatccgatttttcgccagaatctgaggatcgccctcctcggaggtggtaaggcctggtccgacgatacctctcagctcggacctgacaagcatgcacgggatgtgccttccctagacaaatacgccgaagaaaggtgggaggtagtgctacacttcatggtcgggtcaccttctgccgccgtgagccaggatctagcacagctgttaagccaagccggactgatgaagtcaacagagcctggcgaacccccctgcatcacaagcgccgggttccaatttttattactcgacacaccggcccagctctggtacttcatgctgcagtatctgcagaccgctcagtcacgcggcatggatctggtggaaattttgtcatttctcttccagttgagcttttcaaccctaggcaaggattattcagtcgaggggatgagcgatagcctgttaaactttctccagcatctgagggagttcggcctggtttttcagcgcaaacggaaatccaggaggtactaccctaccagacttgccatcaatttgagcagcggagtgagcggagctggaggtactgtgcaccagcccgggttcatcgtggtcgagacaaactaccgcttgtacgcttatacagaaagtgagctccagatcgctctgattgcgctgttttcagagatgctgtacaggttcccaaatatggtggtggctcaagtgactcgcgaaagtgtccagcaggctattgcctcaggtattactgctcagcagattattcactttctccggactcgggcccatcctgtgatgctcaaacagacaccagtgctgccaccaactatcacagatcagatccgcttgtgggaacttgagcgagatcgcctgcgatttacagaaggcgtgctctataaccagtttttgagccaggttgactttgagctcctgttggctcatgcaagagaacttggcgtgctggtgttcgaaaatagtgcaaagcggcttatggtcgtgaccccggctggacactctgatgtaaaacggttttggaagaggcagaagcacagctcatag

SEQ ID NO: 189099 - DNA, 1389 bp, synthetic construct
  misc_feature 1..1389: note = Description of Artificial Sequence: Synthetic coding sequence
  source 1..1389: mol_type = other DNA
atggagagcacccccagccggggcctgaaccgggtgcacctgcagtgtagaaatctccaggaattccttggcggcctgagccccggtgtgctcgacagactgtatggccatcctgcaacatgcctggctgtgtttcgagaactgcccagtctagctaaaaactgggtgatgaggatgctgtttctggaacagccccttccgcaggcagctgtcgcgctttgggtcaagaaggaatttagtaaggctcaggaagaatctacaggactgctgtctgggctgcggatctggcatactcagctgctgccgggtggcctgcagggacttatcctgaatccaatctttcggcagaacttacgcatcgccttgctggggggtggcaaagcctggagcgacgacacttcccaattaggacccgataaacacgctcgagatgtgccctcacttgacaagtacgcggaggagcgttgggaggtagttctccacttcatggtcggctctcctagcgcagccgtgagccaggatcttgcgcagctgctgtcccaagcaggactgatgaaatcaaccgaacctggagaaccaccctgcatcacctccgccggcttccagttcctcctgctcgatacacctgctcagctttggtacttcatgctgcagtacctccagaccgcacagagccggggaatggatctagtggagatccttagttttcttttccagctgtccttctcaactttagggaaagattattcggtcgaggggatgtccgatagcttgttgaatttcctgcagcacctacgcgagttcggtttggtgtttcaacgaaagcggaaatcgcgccgctactacccaacccgcctggccattaatctgtcctctggtgtatccggcgctgggggaaccgtgcaccaaccaggctttatagtcgtggagacaaactaccgcctatacgcttatactgaatccgagcttcagatcgccctgatcgctctcttcagcgaaatgctataccgcttcccgaatatggtagtggctcaggtaacccgcgagagcgtgcagcaggccattgcaagcggaatcaccgcccagcagatcattcattttctgagaacgagagctcaccctgtgatgctgaaacagactcccgtgctccctccaactataaccgaccagattcgcctttgggagctggaacgggatcggctgagattcacagagggcgttctgtacaaccagttcttaagccaggtcgacttcgaactattactggcacatgcaagggagctcggggtgcttgtgttcgaaaattcagcaaaacggttgatggtggtgacccccgcaggacattctgacgtgaaacggttctggaagcgtcagaaacactcgtcttag

SEQ ID NO: 189100 - DNA, 417 bp, synthetic construct
  misc_feature 1..417: note = Description of Artificial Sequence: Synthetic coding sequence
  source 1..417: mol_type = other DNA
atggagagcacccccagccggggcctgaaccgggtgcacctgcagtgccgtaatcttcaggaatttctgggaggtctgtccccaggtgtactcgatcgcctatatggtcatccggccacatgcctggctgtctttagggagttgcccagcttagcaaagaattgggtcatgaggatgctgtttctcgagcaaccactccctcaggctgcggtggctctctgggtgaagaaggagttttcaaaagctcaagaggagtcgacaggcctattgtcaggacttagaatttggcacacccagctgctccctggtggccttcagggcctgatcctgaacccgattttccgccagaacctcaggatcgcccttctaggcggaacaggcattaccggcgtctcacattgcgcatggccggggtag

SEQ ID NO: 189101 - DNA, 417 bp, synthetic construct
  misc_feature 1..417: note = Description of Artificial Sequence: Synthetic coding sequence
  source 1..417: mol_type = other DNA
atggagagcacccccagccggggcctgaaccgggtgcacctgcagtgtcggaatctgcaggagttcctcggtggattgagtcccggcgttctggataggctctacggtcatcctgcgacctgcctggcagtttttcgggagttgcctagcctggccaaaaactgggttatgagaatgctgttcctggaacaacctttgccacaggcagcggttgcgctgtgggtgaagaaggagttctcaaaagcgcaagaagaatctaccggcctcttgtctggtctgaggatttggcacacacagctcttgcctgggggtctgcagggtctgatcttgaatccaatctttaggcagaaccttaggatagccctactgggaggcactggtattaccggggtcagccactgcgcctggccaggctag

SEQ ID NO: 189102 - DNA, 417 bp, synthetic construct
  misc_feature 1..417: note = Description of Artificial Sequence: Synthetic coding sequence
  source 1..417: mol_type = other DNA
atggagagcacccccagccggggcctgaaccgggtgcacctgcagtgccgcaacttgcaagaatttcttggtggcctgtctcccggagtgctggatcgtctgtatggtcatcctgccacttgcctcgcagtatttcgcgagttaccatccctggccaagaactgggtgatgaggatgctcttcctcgagcagccactgccacaggccgccgttgcactgtgggtgaagaaagaattctccaaggcccaggaggaatccacgggactcttgtctggactccgcatctggcatactcagcttttacccggcggcctccagggacttattctaaatcccatcttccggcagaaccttaggatagcactccttggtggcacaggcattaccggtgtgtcccattgcgcctggccaggatag

SEQ ID NO: 189103 - DNA, 1389 bp, synthetic construct
  misc_feature 1..1389: note = Description of Artificial Sequence: Synthetic coding sequence
  source 1..1389: mol_type = other DNA
atggagagcacccccagccggggcctgaaccgggtgcacctgcagtgtcgtaacctgcaggaattcttgggcggactcagtccaggtgtcctcgacaggctatacggccacccagctacttgcctcgcagtattccgggagctaccgagcctcgccaagaactgggtgatgcggatgctgttccttgaacagcccctgccccaagctgcagttgcattatgggtcaagaaagaatttagcaaggcgcaggaggaatctacggggcttctcagcgggctgcgcatttggcacacgcaattgcttccagggggtctgcagggcttaatcctaaaccctatcttcagacaaaatctccggatcgccctattaggtggcggcaaagcctggtccgatgacacaagccagctcggtccggataagcacgctcgggacgttccttccctggacaagtacgccgaggaacgatgggaggtcgtgctgcactttatggtcggtagtcccagcgcggctgtgagccaagatctcgctcagctcctgtcccaagccggcctgatgaagtccacagagccaggggagcctccttgtattacgtcagcaggatttcagtttctgctgctcgacacgcccgcccagctgtggtatttcatgttgcaatacctgcagacagcgcagtcgcgcggaatggatcttgtggagatcctctcttttttgttccagctgtcattttctaccctgggaaaggactatagtgtggagggaatgagcgacagcctcttaaatttcctccaacaccttagggagtttgggctggttttccagcggaagagaaaaagcaggcgttattaccccacgagactagcaatcaacctatcttccggtgtaagcggggccggtgggacggtacaccagcccggcttcatcgtcgtcgagaccaactacaggctatatgcatacactgagtcagaattacagattgcattaattgcactgttctcagagatgttatacaggttccccaatatggtggtcgcacaggtcaccagagagagcgtgcagcaagcgattgcctccggcattacagctcagcagatcatacacttcctgaggacacgagcacaccccgtgatgttgaagcagacccctgtgctgccccctactatcaccgaccagatcaggctgtgggaacttgagcgcgatcggctccgatttacagagggcgtcctttacaaccaatttctcagtcaggttgattttgaactgctcctcgcccacgctcgcgagcttggggtgctggtgtttgagaattccgccaagagactcatggtagtcacacccgccggacactctgacgttaaacggttctggaaacgacagaagcactcatcatag

SEQ ID NO: 189104 - DNA, 663 bp, synthetic construct
  misc_feature 1..663: note = Description of Artificial Sequence: Synthetic coding sequence
  source 1..663: mol_type = other DNA
atgcggatgctgttcctggagcagcccctgccccaggccgccgtggcactttgggtgaagaaagagttctccaaggcccaagaggagagtaccggactgctaagtggtctgcgcatctggcatacacagctcctgcctggtgggttacagggcctcatactgaatccaatctttcgccagaacttgcggatcgccctgctcgggggcggaaaggcctggtcagatgatacaagtcaattgggacctgacaaacacgcgagggacgtgccgtccctggataaatacgcagaagagcggtgggaggtagtcctgcattttatggtcgggagcccatccgcagcagtgtcacaggacctcgcccaactcttaagccaggccggtttaatgaaatctaccgaacccggggagcctccatgcattaccagcgccgggtttcagtttctattattggatacccccgcacagctttggtactttatgctccagtatctgcaaaccgcacagagtcgcggaatggatttggtggagatcctcagttttctctttcagctaagcttttcgactctcggtaaggattactccgtggaggggatgtctgatagtttgctgaactttctccagcacctgagagagtttgggcttgtattccaaagaaaagtctag

SEQ ID NO: 189105 - DNA, 663 bp, synthetic construct
  misc_feature 1..663: note = Description of Artificial Sequence: Synthetic coding sequence
  source 1..663: mol_type = other DNA
atgcggatgctgttcctggagcagcccctgccccaggccgccgtggcactgtgggtgaagaaggagttttctaaagcccaggaggagtccaccggcctgctgtccggtctaagaatatggcacacccagcttctgccgggaggactgcaggggcttatcttgaaccctatcttccggcagaaccttagaattgccttacttggaggtggcaaggcatggagcgatgacaccagtcagcttggtcctgacaagcatgcacgggatgtgcccagtttagacaaatacgctgaggagcggtgggaggtggttctccattttatggtgggaagcccatctgctgccgttagtcaggatctggcccagttgctctcacaggccggcctcatgaagagtaccgaacctggagagccaccctgcataacaagtgccggcttccagttccttttgttagatacgccagctcagctgtggtactttatgctacagtacctgcaaacagcacagagcaggggcatggacctcgttgagatcctttccttcttgttccagctcagcttttcaacactaggcaaagactactctgtggagggaatgtccgatagcctgctgaattttctgcaacacctaagggagttcgggctcgtgtttcagagaaaggtgtag

SEQ ID NO: 189106 - DNA, 663 bp, synthetic construct
  misc_feature 1..663: note = Description of Artificial Sequence: Synthetic coding sequence
  source 1..663: mol_type = other DNA
atgcggatgctgttcctggagcagcccctgccccaggccgccgtggctttgtgggtgaaaaaggagttctctaaggcgcaggaagagagcactgggcttttgtcagggcttcggatctggcatacccagttgctgccaggtggacttcaggggttgatcttaaatccgatcttcagacagaatctgcgcattgccctgctcggaggcggcaaagcttggagcgacgatacatctcaactaggccctgacaagcacgcccgagacgtgccttcacttgacaagtacgccgaggaacgatgggaggtggtactacacttcatggtcggttctccgagtgctgctgtttcccaggacctcgcacaattgctttcgcaagctggccttatgaaaagcactgagccaggcgagcccccctgtatcacttcagccggctttcagtttcttctgctggatacaccagcacagctgtggtatttcatgctccagtatctgcagacggcacagtctaggggcatggatctggtagagatcctcagcttcctgttccagctgtccttctcgaccctggggaaagactactcagtagagggcatgagcgattccctgctgaactttctacagcacttgcgagagttcggtctagtcttccagcgcaaagtgtag

SEQ ID NO: 189107 - DNA, 663 bp, synthetic construct
  misc_feature 1..663: note = Description of Artificial Sequence: Synthetic coding sequence
  source 1..663: mol_type = other DNA
atgcggatgctgttcctggagcagcccctgccccaggccgccgtggcactgtgggttaagaaggagttcagtaaggcacaagaggagtctaccgggttgttgagtgggctccggatttggcatacgcagctgctccctggtggcctgcaaggtctcattctgaaccctatttttcggcagaatcttagaatcgccctgttaggcggtggcaaggcatggtccgatgacactagtcagttgggtcccgataaacacgcgcgggacgttcccagcctcgacaaatacgcagaagaaagatgggaggtggtgctgcacttcatggttggtagccctagcgccgccgtgagccaggacctggctcagcttctctcccaggccggtctgatgaaatctacagagcctggggagcccccatgtattacatcagccggattccaattcctgctcctggacacgccagctcagctgtggtattttatgctccagtacctgcaaactgcccaatcacgcgggatggacctggtcgaaattttgagctttctgttccagctctctttttctacacttggcaaagactacagcgtggaaggcatgtctgacagtctgctaaattttctccaacatctgagagagttcgggcttgtgttccaacggaaggtctag

SEQ ID NO: 189108 - DNA, 663 bp, synthetic construct
  misc_feature 1..663: note = Description of Artificial Sequence: Synthetic coding sequence
  source 1..663: mol_type = other DNA
atgcggatgctgttcctggagcagcccctgccccaggccgccgtggccctctgggtcaagaaggagttctcgaaggcgcaggaagagagcacagggctcctgtccgggctgcgcatttggcacacccagttactgccgggaggactgcaggggttgatcctgaatcctatctttaggcagaatcttcgcattgcactcctggggggaggcaaggcctggagtgatgacactagtcaactgggcccagataagcacgcccgagacgttccctcgcttgataaatatgctgaggaacgttgggaagttgtactgcacttcatggtcggatcaccatctgctgcagtttctcaagatttagcgcaattgctgtcccaagccggcctgatgaaatcaacagagcctggggaacctccctgtattacgtcagctgggtttcagtttttattattggatacccccgcccagctgtggtatttcatgctccagtatctgcaaaccgcccaatccagaggcatggaccttgttgagattttaagctttctgtttcaactgagcttctcgaccctgggaaaggattacagcgtcgagggaatgtccgatagcctgcttaacttcctccagcacttgagggaattcggacttgtgttccagaggaaggtgtag

SEQ ID NO: 189109 - DNA, 663 bp, synthetic construct
  misc_feature 1..663: note = Description of Artificial Sequence: Synthetic coding sequence
  source 1..663: mol_type = other DNA
atgcggatgctgttcctggagcagcccctgccccaggccgccgtggctctttgggttaaaaaggagttcagcaaagcccaagaggaatccacaggtctgctttctgggctgaggatctggcacacacagctgttacctgggggtctgcaagggttaattttaaatcctatctttcgacagaatctgaggatcgccctgctgggagggggcaaggcctggtctgacgacaccagccaattaggacccgataagcacgctagagatgtccctagcctcgataaatacgctgaagaacgatgggaagtggtattacattttatggtggggagtccaagcgccgcagtaagccaagatcttgcccagctcttatcccaggccggcttgatgaagagtactgaaccgggagagcccccatgtataacaagcgcgggatttcagttcctccttctcgacacgcccgcacagttgtggtacttcatgttacagtacctgcaaactgcccagtcccgcggaatggacctggtggaaatattgtcatttctgtttcagctgagttttagtactctcggcaaggactacagcgtggaaggcatgtctgactctctgctcaactttttgcagcatctgcgggaatttgggttggtgtttcagagaaaagtgtag

SEQ ID NO: 189110 - DNA, 216 bp, synthetic construct
  misc_feature 1..216: note = Description of Artificial Sequence: Synthetic coding sequence
  source 1..216: mol_type = other DNA
atggtgaacgtgctgaagggcgtgctgatcgagtgcgaccccgccatgaagcaattccttctttatttggacgagtctaacgccctgggcaaaaagtttatcattcaggatatagacgatacgcacgtgtttgtcatagctgaactggtgaacgtgctgcaagagcgcgttggcgaactgatggatcagaacgccttctccctcacacaaaagtag

SEQ ID NO: 189111 - DNA, 2997 bp, synthetic construct
  misc_feature 1..2997: note = Description of Artificial Sequence: Synthetic coding sequence
  source 1..2997: mol_type = other DNA
atggcccaggtggccatgagcaccctgcccgtggaggacgaggagtcctccgagtcgaggatggttgtgacatttttgatgagcgctctggaaagtatgtgtaaggagctggccaagagtaaagcggaggttgcctgtattgccgtctacgagaccgacgtgttcgtcgtgggaactgagagagggagggccttcgtgaacacgcggaaggatttccaaaaggacttcgtgaagtactgtgtggaggaggaggagaaagcggcagagatgcataagatgaaatccacaacccaggccaatcgaatgagtgtggacgcagttgaaattgagaccctgcgaaagaccgtggaggactacttctgcttttgctatggaaaagccctgggcaagtcaacagtggtgccagtaccttacgagaagatgctgcgggaccaatctgccgttgtcgttcaggggctgcctgagggcgtagcctttaagcatcctgagaattacgatttggccactctgaagtggatcctcgagaataaggccggcatcagttttattattaagagacccttccttgagccgaagaaacacgtgggcggtcgcgtgatggttaccgatgccgaccgctcgatcctctccccagggggcagctgtggaccaatcaaagttaagacagaaccaaccgaagacagcggcatatcactcgagatggccgccgtgactgtgaaggaagagtccgaagacccagattactaccaatataatattcaggctgggccgtccgagaccgatgatgtcgacgagaaacagcccttgtctaagcctctgcagggttcacaccattcctcagagggaaacgaagggaccgagatggaggtccccgctgaagatagtacccagcacgtccccagtgaaacctccgaggatcccgaggttgaagttactattgaagatgacgattactcacctccttcaaagagacccaaggccaatgagcttccccagcccccagtacccgaacctgcaaacgcaggtaagcgcaaggtgagagaatttaacttcgagaaatggaacgcaagaattaccgacctgcggaagcaggttgaagagctgttcgaacggaaatatgctcaagcaataaaagccaagggtccagtaaccattccctaccccctgtttcagagccacgtggaggacctctacgttgaaggtctacctgaaggtattcccttccgaagacctagcacgtatggtattccgagactggaacggatactgctggccaaagagcggatccggttcgttatcaaaaagcatgagctgctgaactcaacccgtgaagacctgcagctcgacaagcccgccagcggcgttaaggaggagtggtatgcacggataacaaagcttcgtaaaatggttgatcaactgttttgtaagaagttcgctgaggccctggggtccacagaagctaaagccgtgccttaccagaagttcgaagctcatcccaatgacctgtatgtcgagggtcttccagagaatatcccatttagatcaccttcctggtatggaatcccccgtctcgagaagatcatccaagtgggcaaccggattaaatttgttatcaagagacccgaactcctcacccacagtactactgaagtcacacagccccgcaccaacacccccgtgaaggaggactggaacgtgcgaatcacaaaactgcgaaaacaggtcgaagaaatattcaaccttaaatttgcccaagctcttgggctcaccgaggcggtcaaggttccttacccagtctttgaaagtaatcccgaatttctgtatgtggagggtctcccggaaggaattccatttaggtcccctacatggttcggcataccgcggcttgaaagaattgtgagaggttcaaacaaaataaaatttgtggtgaagaagcccgagctcgtaataagctacctgccgccaggaatggcctctaaaattaataccaaagcacttcagagccccaagcggccgcgcagccccggctctaatagcaaagttcccgagatagaagtgaccgtagaggggcctaataacaataaccctcagacaagcgcagtgagaacccccacccaaacgaatggctcaaacgtcccgtttaagcctaggggcagagagttttctttcgaagcctggaatgcaaaaataaccgatctcaaacaaaaagttgaaaatctgttcaacgaaaaatgtggggaagctttaggcttaaagcaggccgtcaaagtaccgttcgctctcttcgagtccttccccgaagatttctatgtggagggactaccagaaggtgttccattcaggcgcccaagcacttttgggattcctaggctggagaagatactgcggaacaaagccaaaataaagtttatcattaaaaagcctgaaatgttcgagaccgcaatcaaagagtctacatcttccaaatctccgccccggaagattaactcctcgccaaacgttaacactacggcctccggcgtagaggacctgaacatcatacaggttacaatcccagacgatgacaacgagagactatcaaaggttgagaaggcccgccagctgcgggagcaggtgaacgatctgttttcccgaaagtttggagaagccatcgggatgggcttccccgttaaggtcccctacagaaagatcactatcaatccaggatgcgtggttgttgacgggatgcccccgggagtgtcattcaaggctccatcctatctagagatttccagcatgagacggatcctcgacagtgccgagttcataaagtttaccgttatccgccctttccctggattagtcattaataaccagctggtggaccagagcgagagcgaagggcccgtgatccaggagagcgcagaacctagccaattggaagtgcctgctactgaagagatcaaggagactgatggcagctcacagattaagcaggaacctgaccccacctggtag

SEQ ID NO: 189112 - DNA, 2934 bp, synthetic construct
  misc_feature 1..2934: note = Description of Artificial Sequence: Synthetic coding sequence
  source 1..2934: mol_type = other DNA
atggcccaggtggccatgagcaccctgcccgtggaggacgaggagagctcggaatctagaatggtggtgacgttcctgatgtccgccttggagtcaatgtgcaaggagctcgccaagagtaaggccgaggtggcctgcattgctgtgtacgagaccgacgtgttcgttgtgggcacagagcgaggacgagccttcgtgaacacacgcaaggacttccagaaagacttcgtgaaatactgcgttgaggaggaagaaaaggctgctgagatgcataaaatgaagagcacaactcaggccaatcggatgagtgtggatgccgtggagattgaaaccctgcggaagacggtggaggattatttctgtttttgctatggaaaggcactgggcaaaagcactgttgtcccagtgccttatgaaaaaatgttgcgcgaccagtctgccgtggtggtccaggggctgccagagggagttgcgtttaagcaccctgagaactatgatttggcaaccctgaagtggatcttggagaataaggccggtatctcatttatcatcaagcgcccattcctcgaacccaaaaagcacgtgggcggccgggtgatggtcacagatgccgaccgatcaatcctttccccaggcggctcttgtggtccgatcaaggtgaagactgagcctaccgaagactctggcatcagcctggagatggcagccgtcaccgtgaaggaagaatcagaggatcccgactactatcaatacaacattcaggcgggcccttccgaaaccgatgatgtggacgaaaagcagccactctcaaagcccctccaggggtctcatcactcgagtgagggtaacgaggggacagaaatggaggttcctgccgaggacgatgactatagcccacccagcaagcgcccaaaggctaatgagctgcctcagccgcccgtgccagaacctgcaaatgccggaaaaaggaaggtgagagaattcaattttgaaaagtggaacgccagaataacggacctccgaaagcaggtcgaggagcttttcgaaagaaaatacgcccaggccatcaaagcaaaggggcccgtgacaatcccttatccgctcttccagtcacatgtggaggacctatatgtggagggactgccagaagggataccatttcggagaccttctacctatgggataccccgattggaacgaatactcctcgccaaggagcgcatcaggttcgtaataaagaaacatgagttgttgaactccacaagagaggatctacagctggacaagcccgcttcgggagtcaaagaggagtggtatgccagaatcacaaaactccgtaagatggtggaccagctgttctgtaagaagttcgctgaggccttgggatccactgaagccaaggctgtaccatatcagaagtttgaggcgcaccctaacgacctgtacgtggaggggctcccagagaacataccatttagaagcccctcctggtatggaattcccagactcgagaagatcatccaggtcgggaataggattaaattcgtcattaagcggcctgaactgcttacacatagtaccacggaggtgacacaaccgaggacaaacaccccggtcaaggaggactggaacgtgagaattaccaaactgagaaagcaggtcgaagagatctttaacctcaagttcgcgcaggctctcgggctgaccgaggcagtgaaagtgccctacccagttttcgaatcaaatcctgagtttctgtacgtcgagggcctccctgagggcattccgtttcgcagtcctacctggttcggcatacctcgtcttgaacggattgtgcgtggcagtaataaaatcaaattcgtcgtgaaaaaaccagagttggtcatttcgtatctgcctcctggcatggcgtcaaagatcaacactaaggccttacagagtccaaagcgtcctcgaagccccggctccaattctaaagtccctgagatcgaggttactgtggaggggcctaacaacaataacccccagacgagcgccgtcaggacgccgactcagaccaatgggtctaatgtgccatttaagccaagaggccgtgagttttccttcgaagcctggaacgcgaagatcacagatctaaaacaaaaggtggagaatttgtttaatgagaaatgcggagaggccttgggtttgaaacaggctgtaaaagtcccttttgccctcttcgagtccttcccagaagacttttacgtggaaggtcttcccgagggggtgccgtttcgtcgaccctctactttcgggatacctagactggagaagatactccggaataaagccaaaatcaaatttatcatcaagaagcctgagatgttcgagacagccattaaggagtcgacaagctcaaagtcgcctccacgtaaaattaacagcagccctaacgtgaacaccactgcttcaggcgttgaagacctgaacatcattcaagtgaccatcccagacgatgacaatgagaggctgtctaaagtggaaaaagcccggcaactgcgggaacaggttaacgacttgttctcaaggaagttcggggaagccattgggatgggcttcccagtgaaggttccttataggaaaattacgatcaatcctggctgtgtggtggttgatggtatgccacccggggtttccttcaaggctccttcttacctcgagatcagttctatgcgaaggattttggattcagccgagtttatcaagtttacagttattaggccattcccagggctcgtgattaacaaccagctggtggaccagagcgaatccgaaggtccagtcatccaggagtccgctgagcccagccaactcgaggtccctgctacggaggagatcaaggaaaccgatgggagcagccagattaagcaggaacccgatcccacttggtag

SEQ ID NO: 189113 - DNA, 2937 bp, synthetic construct
  misc_feature 1..2937: note = Description of Artificial Sequence: Synthetic coding sequence
  source 1..2937: mol_type = other DNA
atggcccaggtggccatgagcaccctgcccgtggaggacgaggagagctctgaaagccgtatggtggtcactttcttaatgtctgcccttgaatccatgtgcaaggaacttgccaaatcaaaggcagaggtggcatgcatagccgtgtatgagacagatgtctttgttgtcggcacagagaggggcagagcattcgtgaacaccaggaaggactttcagaaagatttcgttaaatactgtgtggaggaagaagagaaagccgccgagatgcataagatgaaatcgacgactcaagccaatcgtatgagcgtggatgctgtggagattgagacactgagaaagaccgtcgaggactacttctgtttctgttacgggaaggcattaggcaagagcactgtggtgcctgtgccttatgagaagatgcttagggaccagagtgctgtggtagttcagggcttgccagaaggagtggcttttaaacatcccgaaaattatgatcttgcaacactcaaatggatcttggaaaataaagcgggcatctcttttatcatcaagcgcccctttctcgaacctaagaagcatgttggtggccgggtgatggtgaccgatgcagataggtcaattctgagcccaggcgggtcatgtggaccaattaaggtgaagactgaacccacggaggattctggtatatccctcgaaatggccgctgtgaccgtgaaagaagagagcgaagatccggattactatcagtataatatccagggttcacaccactcctccgaaggtaatgaaggcacagagatggaagtccccgccgaggatagcactcaacacgtcccttccgagacatccgaagatcccgaggtggaagtcacaatagaggatgatgattactcaccaccatctaagcggccaaaagccaacgagctgccacaaccacctgtgccagaacctgccaacgccgggaagcggaaggtgcgcgagtttaactttgaaaagtggaatgcccgtataacagatctgcgcaagcaagtagaggagttgttcgagcgcaaatacgctcaggccattaaagctaagggccctgtaactattccctatcccctgttccagtcacatgtcgaggatctgtacgtcgaaggcttgcccgagggaataccattccggaggccatccacttatggcattccccgacttgagcgcattctgctggctaaagaacggataaggtttgttatcaaaaagcatgaactgcttaatagcacgcgtgaggatttgcagttggataaacctgcctcaggggtcaaggaggagtggtatgcgaggataaccaaactccggaagatggtggaccagctcttctgcaaaaagttcgcggaggctcttgggagtaccgaggccaaagctgtcccgtaccagaaattcgaggcgcatcctaatgatctgtatgtcgagggtttacctgaaaacatcccctttcgttcaccttcttggtatgggattcccaggttggaaaagataattcaggttggcaataggatcaagttcgtgattaagagaccagaattactgacccattctacaacagaagtcacccaaccgcggacaaacacacctgtaaaagaggactggaatgttaggatcactaaattgaggaagcaggttgaagagatctttaacctcaaatttgcccaggccctggggcttaccgaagccgtcaaggttccatatcccgtcttcgaatctaacccggagtttttgtatgttgaaggacttccagaaggtatcccattccgctctcccacttggttcggaatacctagactagagcggattgttcggggcagcaataagataaagtttgttgtgaagaagccagaactggtgatctcatacctaccaccaggcatggcttcgaagatcaataccaaggccctgcagtctccaaagcgccctcgctcccccgggtctaattctaaggtgcccgaaatcgaagtgaccgtggaggggccaaataataataacccacagactagcgcagttaggaccccaactcaaactaacggctctaacgttccattcaaacctcgcgggagagaatttagcttcgaggcctggaacgctaaaattactgacctcaagcagaaggtggaaaacctcttcaatgagaaatgcggggaagcccttggactaaagcaggcagtgaaagttcccttcgcactctttgaatcattccctgaagatttttatgtagagggcttacccgagggcgtgccatttcgcaggcccagtacttttggcatccctcggttagagaagatattaaggaataaggccaagataaagtttattattaagaaacccgaaatgtttgaaaccgcaatcaaagagtcgacatctagcaaaagccccccccgaaagatcaacagtagccctaatgtaaataccacggcctccggggttgaagatctcaatatcatccaggtcaccatccctgatgatgataatgaaagactgagtaaggtggaaaaggcacggcagctgcgggagcaggtcaatgatctcttctcacgcaaattcggggaagcaatcgggatgggttttcccgtgaaagtcccgtatcgtaaaatcaccattaatcccggttgtgtcgtggtcgatggtatgcctccaggcgtttcattcaaagccccttcttacctcgaaatcagcagcatgcggcgcatactggattccgcggagttcatcaagtttactgtaatccgaccattcccgggattggtgatcaataaccagttggtcgatcagagcgaatccgagggcccagttattcaagaaagtgctgagccttcccaactggaggtgccagctacggaggaaatcaaagagacggatggcagctcccagatcaagcaggagccagatcccacgtggtag

SEQ ID NO: 189114 - DNA, 2874 bp, synthetic construct
  misc_feature 1..2874: note = Description of Artificial Sequence: Synthetic coding sequence
  source 1..2874: mol_type = other DNA
atggcccaggtggccatgagcaccctgcccgtggaggacgaggagagctccgagagccggatggtggtgacttttctgatgtccgccctcgaatccatgtgcaaagagctagcaaagagcaaggccgaggtggcctgtatagctgtgtatgaaaccgacgtgttcgttgtggggactgagcgcgggcgagcttttgtcaacacccgtaaagatttccagaaagatttcgttaaatactgtgtggaggaagaagaaaaggctgccgagatgcacaagatgaagagtacaactcaggccaatagaatgagcgtagatgccgtagagattgagaccctgcgcaaaaccgtagaggattacttttgtttttgctacggaaaggccctcggcaaatcaacagtcgtgcccgtgccatatgagaaaatgctgcgggatcagtcagccgtggtagtgcagggccttcccgagggcgtagcgtttaaacatcctgagaattacgaccttgctaccctgaagtggattctggagaataaagccggtatctccttcatcattaagcgtcccttcttggagcccaaaaaacacgttgggggaagggttatggtgacggacgccgaccggtctatactgagtccggggggcagttgcggacctataaaggtgaagactgagccaactgaagattccgggatctctctcgagatggcagcagtgacagtgaaagaggagtcagaagaccccgactattaccagtataacattcaagggtcacatcactcttctgagggtaacgagggaactgagatggaagtacctgccgaggacgatgactactccccaccttccaagcgccctaaagccaatgagctgccacagccccctgtccctgagccagctaacgcgggtaagagaaaagtacgagaatttaactttgaaaagtggaacgcacgtattacagacttgcgcaaacaagtggaagagttgtttgaaagaaagtatgcacaggccataaaagctaaaggccccgtgaccatcccctatcctctgttccaatctcatgttgaagacttgtacgtggaaggcctgcccgagggcatcccatttagacgtccatccacttatggcatccctcgactcgaacgtatcctgctcgctaaggaaagaatacgcttcgtcatcaaaaagcacgaactgctgaactcgacccgggaagatcttcagctggacaagcctgcgagtggcgtcaaagaagagtggtacgcgagaataaccaaactgcggaagatggtagaccaacttttttgtaagaagttcgctgaggctctcggaagcacagaggctaaggccgtgccctaccagaaattcgaggctcaccctaacgacctctatgttgagggcctccctgagaatattcccttcagatccccttcttggtacggcatcccaagattagagaaaataatacaggtgggcaatcgtattaagttcgtcatcaagcgcccggagctccttacccactcgacaacggaggtcacccagccacgtacgaatactcccgtgaaagaggattggaacgtcaggatcaccaagctccggaagcaggtggaggaaattttcaatctgaagtttgcccaggctctggggctaacagaggccgtcaaagtgccctaccccgtattcgaaagtaatcctgaattcctgtacgtggagggcctgcctgagggaatccccttcaggtcgccgacttggtttggcattccacgactcgaaaggattgtgagaggaagtaataaaattaaattcgtcgttaaaaagcccgaactcgtaatctcttacttgcccccaggtatggcctctaagatcaatacaaaagccctgcagagtccaaaaagacctcgatccccaggttctaacagtaaagtgcccgagatcgaggtcacggtagagggaccgaacaataataaccctcagacctccgcagtgaggacacctacccagaccaatggctctaatgtaccttttaagcccaggggacgtgagtttagtttcgaagcttggaatgcaaaaatcaccgatctaaaacagaaagttgagaacctgttcaatgaaaagtgtggtgaggcactgggcctgaagcaggccgtcaaggttccttttgcattgttcgagtcttttcccgaggatttctatgtagaaggcttgccagagggagtcccctttaggcgtccttcaacatttgggattccgaggctggaaaagatccttcgaaataaggcaaaaatcaaattcattattaagaagccagaaatgttcgagactgcaatcaaggaaagcacaagcagcaaatcacctccccgaaagatcaattccagtcccaacgtgaatactacagcatcgggggtagaggatctgaatatcattcaagtgacaattccagacgatgacaacgagcgccttagcaaggttgaaaaggcccgacagctgagagaacaggtgaatgatctgttctctcgcaaatttggtgaagccatcggtatggggttccctgtcaaagtaccatataggaagatcacaatcaaccctggatgcgtggtggtggacggaatgccccctggggtgtcatttaaggccccctcctacctcgagatttcctcaatgagacgcattctggacagtgctgagttcattaagttcaccgtgattcggccatttcccggtctagtgatcaacaatcaactggtggaccagtcagaatctgaagggcctgttatccaggaatccgccgaaccctctcagctcgaggtccccgcaaccgaggagatcaaagagactgacggatcatcccagatcaagcaggagcccgacccaacatggtag

SEQ ID NO: 189115 - DNA, 321 bp, synthetic construct
  misc_feature 1..321: note = Description of Artificial Sequence: Synthetic coding sequence
  source 1..321: mol_type = other DNA
atggcccaggtggccatgagcaccctgcccgtggaggacgaggagtcatcggagtcacggatggtcgtgactttcctgatgtctgccctcgagtctatgtgcaaggagttggcgaagtcaaaagcggaggtcgcttgcatcgctgtctacgagaccgacgtgtttgtcgtggggacagagagaggcagagcatttgtgaacacaaggaaggacttccagaaggactttgtgaagtattgcgtggaggaagaagaaaaggcggccgaaatgcataaaatgaaatctaccacccaggccaaccgtatgagcgttgatgcatag

SEQ ID NO: 189116 - DNA, 825 bp, synthetic construct
  misc_feature 1..825: note = Description of Artificial Sequence: Synthetic coding sequence
  source 1..825: mol_type = other DNA
atggcccaggtggccatgagcaccctgcccgtggaggacgaggagagcagtgagagccggatggtggtgaccttcctcatgagtgctctcgagtctatgtgcaaggaattagcaaagtctaaggccgaagtcgcatgtatcgcagtgtatgagactgatgtctttgtggttggcactgagcggggcagggcttttgtgaacacccgcaaggattttcagaaagactttgtgaaatactgtgtggaggaagaagaaaaggcggctgagatgcacaagatgaagtcaaccacccaagctaacagaatgtccgtagacgctgtggaaatagagaccttaaggaaaacagtggaggactacttttgcttttgttacggcaaggccctcgggaagtccacagttgtccccgtgccttatgagaagatgctccgcgaccagtcagcagtggtcgtacaaggtctaccggagggggtggcttttaaacacccggagaactacgatctggctactctcaagtggatccttgaaaataaagctggtatcagcttcatcattaagaggccttttctcgaaccgaagaagcacgtgggaggaagggtgatggtcaccgatgcagacaggtccatcctatcaccaggaggctcttgcggccccatcaaggtgaagactgaacccaccgaagacagtggtatatccttggaaatggccgccgtcacagtcaaagaggagtccgaggatcccgattattaccagtacaatattcagggttcgcaccatagctccgagggcaacgaggggacagagatggaagtgccagccgagggatag

SEQ ID NO: 189117 - DNA, 2982 bp, synthetic construct
  misc_feature 1..2982: note = Description of Artificial Sequence: Synthetic coding sequence
  source 1..2982: mol_type = other DNA
atgagcaccctgcccgtggaggacgaggagagcagcgagagccggatggtggtgactttcttgatgagcgcgctggaatccatgtgcaaggagttagctaagagcaaggctgaggtggcttgcatagctgtctatgaaactgatgtgtttgtcgtcggaacagaaagggggagagctttcgtgaatacgcgaaaggacttccagaaagattttgttaagtactgcgttgaggaggaggaaaaggctgccgagatgcataagatgaagtcaactacgcaggccaaccggatgtccgtggacgcagtggagattgagacccttaggaagacggtggaggattacttctgcttttgctatggcaaagcccttggtaagtctaccgtagttccagtcccgtatgagaaaatgctgagggaccaatccgcggtggtggttcaggggctccctgagggggtggcgttcaagcacccagagaattatgacctcgctaccttgaagtggatcctcgagaataaggcaggaatatcattcatcatcaagagacccttcctggaacctaagaaacatgtaggagggcgcgtgatggtgaccgatgcggaccggtctattctatccccaggaggctcctgtggcccgatcaaagtcaagacggaacctaccgaagattccggcatcagcctggagatggccgctgtgaccgtgaaggaagaatccgaggaccccgattattaccagtataatatacaagctggaccctctgagaccgatgatgtcgacgagaagcagccactcagtaaacctctccagggatcccatcatagctctgaaggaaacgagggtacagaaatggaagttccagccgaagattcaactcaacacgttccatctgagacaagcgaagaccctgaagtcgaggtcacaattgaggacgatgactactccccgccttccaagcgtcctaaagcaaatgagctgccccaaccccctgtgccagagccagcaaacgctggcaaacgaaaggtgagagagttcaattttgaaaaatggaacgccagaatcacagatctcagaaaacaggtggaggagctgtttgagcggaagtacgcacaggcaataaaggccaaaggccccgtcactataccctatcctctattccaaagtcacgtggaggacttgtatgtggagggacttcccgaaggaatcccattccgaagacccagcacttatgggattccaagactcgaaagaattctcctcgccaaggagaggattcgtttcgtgattaagaagcatgaactcctcaactctacccgggaggatttacagttggataagccagcctcaggagtcaaggaggaatggtatgcgcgcattacgaaactcaggaagatggtggaccaactgttttgcaagaagttcgccgaggcccttggttctaccgaagctaaggctgttccgtaccagaagtttgaggcccacccaaacgatttgtacgttgaagggttgccagagaacattcccttcaggagccccagttggtacgggattcctcgattggagaagattatccaggtgggtaatagaatcaaattcgtcatcaaacgtcctgagttgcttactcactctactacagaggtcacacaaccgcgtacgaatacgcccgtcaaagaagattggaatgtcagaataaccaagcttcgcaaacaggtggaagaaatcttcaatctgaaatttgcccaggctttgggtctgacagaggccgtgaaggtgccctaccctgtgtttgagtcaaacccggaatttttatatgtcgaaggcttgcctgaaggaattccttttaggagcccaacgtggttcggcatcccccgcctggagagaatcgtacgtggaagcaacaagattaagttcgtcgtcaagaaacccgaactggtcatcagttatttgcctcccgggatggcctccaaaatcaacacaaaggccctgcaaagcccaaaacggccccgcagtcccgggtccaacagtaaagtgcccgaaatcgaggtgacggtggaggggccaaataataacaacccccaaacgagcgcagtgaggaccccaacgcaaactaacggcagtaacgtgccatttaaaccaagagggcgcgagtttagcttcgaagcttggaacgcgaagataacggaccttaagcagaaggtggagaacctgttcaatgagaagtgtggggaggccttagggctgaagcaagccgtgaaggtgccttttgcactttttgaatcgtttccagaagatttttatgtggagggattgccagaaggagtccctttcaggagacctagtacgtttggtatccctagactcgagaagattctgagaaataaggccaagatcaaatttattataaaaaagcccgaaatgtttgagactgctattaaggagtccacttcttctaagagtccccctaggaagattaacagtagccccaatgttaatacaacagcctcaggggttgaggatctcaacattatccaggtgacgattcccgacgacgacaacgagagattgagcaaggtcgagaaggccaggcagttaagagaacaagtgaacgacctgttttcccggaaattcggggaggctatagggatgggtttcccggtcaaagtgccctacagaaaaatcactattaatccaggatgtgtcgtggtggacggaatgccgcccggggtatcctttaaagcaccgagttacttggagatctcgagcatgagacgaatcttggacagtgctgaattcatcaagttcactgtcataagaccttttccagggctggtgatcaacaatcagcttgtggatcaatcagagagcgaaggtccagtgatccaggaatctgctgaaccaagccaactcgaggttcctgcaaccgaagagatcaaagagacagatgggtcctcccagattaagcaggagccagatccaacctggtag

SEQ ID NO: 189118 - DNA, 642 bp, synthetic construct
  misc_feature 1..642: note = Description of Artificial Sequence: Synthetic coding sequence
  source 1..642: mol_type = other DNA
atggccgccgccgccgacgagcggagccccgaggacggcgaggacgaggaggaagaggagcagttggtcctcgtggagctctctggcatcatcgacagcgactttctcagcaaatgtgaaaataaatgtaaggtgctgggaattgataccgagaggcctattcttcaggttgacagttgcgtttttgccggcgagtacgaagatacgctgggcacctgtgtgatcttcgaagaaaatgtggagcacgctgacacagaggggaataataagacggttctgaaatacaagtgccacactatgaaaaaactttccatgactagaacactgctcaccgaaaaaaaggagggggaagagaacataggcggagtagaatggcttcagataaaagacaacgatttttcttaccgtcccaacatgatttgcaatttcctacacgagaatgaagacgaggaggtggttgcctctgctcccgacaagagcctggaactcgaagaggaagaaatccaaatgaatgactcaagtaatctttcctgtgaacaggagaagcccatgcatttagagattgaggatagcggccccctgattgatatacccagtgagacagagggcagtgtttttatggaaacacagatgctcccatag

SEQ ID NO: 189119 - DNA, 2118 bp, synthetic construct
  misc_feature 1..2118: note = Description of Artificial Sequence: Synthetic coding sequence
  source 1..2118: mol_type = other DNA
atggccaccgagggcatgatcctgaccaaccacgaccaccagatccgcgtcggggttttgaccgtcagcgacagctgcttccgtaatttagctgaggataggagcggaattaatctgaaggacttagtgcaggatcccagtctgcttgggggaactatctccgcctataaaattgtgcccgatgagattgaggagataaaagcaactaaggaggtcatcgagcgcgaggcacctggcatggcgctggccatgctgatggggtcactaaatgttacacccctcggcatgttgagccgccccgtgtgcgggattcgcgggaaaactctcatcatcaacctacccggctccaagaaaggatcgcaggagtgtttccagtttatccttcctgctttaccacatgctattgacttgctgcgggacgcaattgtgaaagtgaaagaagtgcacgacgaattggaggatctacctagtccccctcccccactaagccctcctccgactacatcaccccataagcagactgaagataagggggtgcaatgtgaagaggaggaagaggaaaagaaagactccggagtggccagtactgaggactccagctccagtcacatcacagctgctgccatcgccgcaaagattcctgatagcattatcagtcggggtgtgcaggtactccctcgagacacagcaagtctcagcaccacaccatctgaaagccctcgcgcgcaagccacttcaaggctgtctaccgcttcgtgtcctacaccaaaggtgcaaagcagatgcagttccaaagaaaacatactccgggcgagccactcagcagtcgacatcacaaaggtggcccgcaggcatcgcatgagccccttcccactgacgtccatggacaaggccttcataaccgtgctggagatgactcccgtactgggtactgagataatcaattatcgcgatggtatgggcagagtcctggcacaggatgtctatgctaaggataaccttcctccatttccagcgtctgttaaagacgggtacgctgtcagagccgccgacgggcctggggatagatttataattggggagtcacaggcgggcgagcagcccacacagaccgtgatgccaggccaggtgatgagagtcacaaccggtgcccccatcccatgcggggccgacgctgtggttcaagtggaggacactgaactgatccgcgaatccgatgacggtactgaagaactcgaggtgcggatcctggtccaggcacgacctgggcaggatatcagaccaatcggtcacgacatcaaacgtggtgagtgcgtcctcgcaaaaggcacccatatgggcccaagtgaaataggcctcctggccacggttggcgtaacagaagttgaggtcaacaaattccctgtcgtggcagtgatgagcacaggtaatgagcttctgaaccccgaagatgatctcctgcccggaaaaattcgggactccaaccggtctacactgctggcaaccatccaggaacacggctacccaacaatcaatttggggatcgtaggcgataatccggacgatctcctgaacgccctgaacgaggggatctcaagagccgatgtgattataacttccggcggtgtctctatgggagaaaaagactacctcaaacaggtcctggacattgacctgcatgcccagatccattttgggagggtgtttatgaaaccaggcctgccaaccacattcgctaccctcgacattgatggtgtaagaaaaatcatctttgccttgccaggtaaccccgtgtctgctgtcgtgacatgtaacttgttcgtagtgcctgctctgcgaaagatgcagggcatcctggatccaaggcccactatcattaaggctcgtctatcctgcgacgtcaaactggacccgcgcccagagtatcacaggtgcatcctcacttggcaccaccaggaaccattgccctgggcccagtctacaggaaatcagatgagcagcaggctgatgtccatgcgcagtgctaacgggctgctgatgctcccacccaagaccgagcagtatgtagagctccacaagggtgaggtggtggacgttatggtgattggtaggctctag

SEQ ID NO: 189120 - DNA, 2211 bp, synthetic construct
  misc_feature 1..2211: note = Description of Artificial Sequence: Synthetic coding sequence
  source 1..2211: mol_type = other DNA
atggccaccgagggcatgatcctgaccaaccacgaccaccagatccgggtgggcgtgctgacggtgagcgacagctgttttaggaatttagcggaagacaggtctggaattaatctgaaagacctggtgcaggacccaagtctcttgggcggtaccatctctgcgtataagatagtccccgatgagatagaggagatcaaggagacactgattgactggtgtgatgaaaaagagcttaatctcatcctgaccacaggtggtacaggcttcgcgccccgtgacgtgacaccagaggccacaaaggaggtcatagagagagaggccccaggtatggccttagccatgttaatgggatccctaaacgttacaccccttggtatgctgtctaggcccgtctgtggcattcgcggtaagacgctgattataaacctacctgggagcaagaagggatcacaggagtgtttccagttcatcttacctgccctcccccatgcaatcgatctgctacgcgatgctatcgtgaaagtgaaagaggtgcacgacgaactagaggatttgccaagcccgcctcccccactgtcccctccgcctacaacaagcccccacaagcagaccgaagataaaggggttcaatgtgaagaggaggaggaggagaagaaggactctggtgtggcctcaaccgaggactcctcgagttcccacatcaccgccgccgctattgctgcgaaaatccccgacagcattattagtcgcggcgtgcaggtgctaccacgtgatacagcctctctcagtaccactccctccgaatctcccagagcacaggccacctctagacttagcacagctagctgccctacacctaaggttcagagccggtgctcgtcaaaagagaatattctgagggcgtcccatagcgccgtggacattaccaaagtggcccgccgacaccgtatgtcaccatttccccttacctctatggataaggccttcataacagttctggagatgactccggtgctaggtacagaaatcatcaactacagggatggcatgggcagggtgctggcacaggacgtgtacgcaaaggacaacctcccaccatttcccgcaagtgtcaaagacggttacgctgtccgtgcggccgacggaccgggtgacaggtttattattggggagagtcaagccggagagcagcctactcagaccgtgatgcctggacaggtaatgagggtcacaaccggcgcacctataccatgtggtgccgatgccgtcgtccaagtggaggataccgagttgatccgagagtccgatgatgggaccgaagaactcgaagtccggattctggttcaggcccggccagggcaggatatccggcctatcgggcatgatatcaagcgaggcgaatgtgtactggcaaagggaacacacatgggtcctagcgaaatcggcctcttagcgactgtcggggttacagaggtcgaggtgaataaattccccgtcgtggcagtcatgtccactggaaatgaactgctcaaccccgaggacgacctgctgcccggaaagatcagggatagcaaccggagtaccctgctggctaccattcaggagcatggataccctacgataaatctgggaatagtgggggacaaccctgatgacctgttgaatgcccttaatgaaggaatcagtcgtgccgacgtcattattactagtggcggtgtctcaatgggagaaaaggactatttaaaacaggttctggacatcgaccttcatgcccagatacacttcgggcgagtattcatgaagccaggccttcccactacatttgctacactggacatcgatggcgtgcgcaagattatctttgctctacctgggaatccagtctcagctgtagtaacatgcaacctgtttgtcgtaccagctttgcgaaaaatgcaaggcatacttgatcctcggcctactatcatcaaggcacgtctgtcttgcgacgttaagctcgatcctaggccagagtaccaccgttgcattcttacctggcatcatcaggagcccctgccctgggcccagagtacaggaaatcagatgtcttctcggctgatgtctatgcgctctgctaatggcctcttaatgctgccccccaagaccgagcagtatgtggagcttcataagggtgaggtagtggatgtgatggtcatcggcagactgtag

SEQ ID NO: 189121 - DNA, 2310 bp, synthetic construct
  misc_feature 1..2310: note = Description of Artificial Sequence: Synthetic coding sequence
  source 1..2310: mol_type = other DNA
atggccaccgagggcatgatcctgaccaaccacgaccaccagatccgcgtcggagttttaacggtgagcgatagctgcttcagaaatcttgcggaagatcgttcagggataaacttgaaagatttagttcaagacccgtcactgctcggaggaaccataagcgcatacaagatcgtgcccgatgagatagaggaaattaaagagacgctcatcgactggtgcgatgaaaaggaactgaatttaatcctgacaacagggggaacaggttttgctcccagagatgtgaccccagaagcaacaaaagaggtcattgagcgagaagctccaggcatggccctcgctatgctcatgggatcattaaacgttacaccacttggtatgctttctcgacctgtgtgtgggatacggggaaaaactttaatcatcaacctgcctgggtccaaaaaaggatctcaggagtgctttcagttcattctgccagccttacctcatgccatagatctcctgcgtgacgctattgtaaaggtgaaagaagttcacgatgaactggaggacctgcctagcccccccccccctctgtcgccgccaccaactacgtccccgcataaacagaccgaggataaaggagtccaatgcgaagaggaagaggaggaaaagaaggacagcggtgtagcatccaccgaagactcatcctcttcccacatcacagcagcagcaatcgcagctaagaaacatcctttttacaccagtccagctgttgtgatggcacacggtgaacagccaatccccggtctgattaattactcgcaccattcgacagatgaaagaatcccagactcaatcatttcccgtggcgtacaggtcttaccgagggataccgccagcctgtccactaccccatcagagtcaccgagagcccaggccacctctcggctctcaaccgcaagctgccccacccccaaagttcaaagtaggtgctcctctaaagagaacatccttagagcaagtcactcagcagtggacattacaaaggtcgcccggaggcacagaatgtcaccatttccactcacctctatggataaagcctttatcactgtccttgagatgacacccgtcctgggaactgagattataaactaccgcgacggcatgggccgggtgcttgcccaggacgtgtacgccaaggacaatttgcccccttttcctgcctccgtgaaagatggctacgctgtaagggcagctgacggtccaggtgacagattcatcatcggagagtcccaggcgggggagcaacccacgcagaccgtgatgcctggtcaggtgatgagggtgactacaggcgcgccaatcccttgtggggccgacgcagttgtccaggttgaagataccgagctgattcgagaaagtgacgacgggacagaggaactggaggtgaggatcttagtgcaagccaggccaggccaggacatccgccctatcggacacgacattaaacgcggcgagtgtgtgctggccaaaggtacccacatgggacctagcgagatagggctgctagccacggtgggcgtgactgaagtggaagtcaacaagtttcccgtcgttgcagttatgtctaccggcaacgagctgttgaatccggaggacgatctactgcctggcaagatcagggatagcaaccgctctacgctgctggctaccatccaagagcacggataccctactatcaacctgggaatcgtgggggacaacccagatgacctgctcaacgccctcaacgaagggatatctagagcagacgtgatcatcacctcaggaggggtgagtatgggcgaaaaggactacttgaaacaggtgcttgatatcgacctccacgcccaaatacacttcggtagagtgttcatgaagcccggccttccaaccacctttgctacacttgatattgacggagtgcgaaagataattttcgctctaccaggaaatcccgtgtcagccgtagtgacttgtaacctgttcgtagtcccggccctgagaaagatgcaggggattctagacccacgcccgactattatcaaagctagactgtcttgcgatgtcaagttggacccacgccccgagtaccaccgctgcatactgacctggcaccatcaggagcccctgccttgggcacagtctaccggtaatcagatgtcatcacggctaatgtccatgagatccgccaatggcctgctgatgctgcctcctaaaaccgaacaatacgttgaattacacaagggggaagtggtcgacgtaatggttattggccgactatag

SEQ ID NO: 189122 - DNA, 903 bp, synthetic construct
  misc_feature 1..903: note = Description of Artificial Sequence: Synthetic coding sequence
  source 1..903: mol_type = other DNA
atggagaagacccaggagaccgtgcagcggatcctgctggagccctataagtatctgctgcagctgcctgggaaacaggtgagaaccaagctatcccaagcatttaatcactggttaaaagtaccagaagacaagctgcagattatcattgaggttactgagatgttgcacaacgcctcccttttgattgacgatattgaagataactcgaagctgaggcggggctttcccgtggcccactcaatctatggaattccgtccgtaatcaactctgcaaactatgtgtatttcctcgggctggagaaggttctcaccctggatcaccccgacgcggtgaagcttttcacacgacaattgttggagctacaccaaggccaggggctggatatctactggcgggacaactacacatgccccaccgaagaagagtacaaggcgatggtactccagaagaccggaggtctttttgggctagctgttggactcatgcagctcttctccgactacaaggaagatctgaaaccgctgcttaacacgctgggtctatttttccagatccgcgatgattacgccaatcttcacagcaaggagtattccgaaaataagtccttctgtgaggacctcactgaaggcaagtttagcttccccactattcacgcgatctggagcaggcctgaatctacacaggtccagaacatccttcgccagcgtacagaaaacatagacatcaaaaaatattgtgtccattatttggaagatgttggctcctttgagtacaccagaaacacccttaaagaactggaggcaaaggcatataaacagattgacgcacgaggcggtaacccagaattagtcgccctcgtgaaacatctgagcaagatgtttaaggaggagaacgagtag

SEQ ID NO: 189123 - DNA, 903 bp, synthetic construct
  misc_feature 1..903: note = Description of Artificial Sequence: Synthetic coding sequence
  source 1..903: mol_type = other DNA
atggagaagacccaggagaccgtgcagcggatcctgctggagccctataagtacctgttacaacttcccggaaagcaagtgcgtacgaaactgtcacaggcgtttaaccactggctgaaggtgcccgaggataagctgcagattattatagaggtaactgagatgctccataacgcgagtttgctcatcgacgacatcgaagacaatagcaagctgagacgaggtttccctgtcgcccactctatatacggcatcccttccgttatcaattccgcaaactatgtctattttcttggattggaaaaggtcttaacactcgaccaccccgacgcagtgaaactgtttactcgccagctccttgaacttcaccaggggcagggcctggacatctactggagagacaattatacctgccctaccgaggaagaatacaaggccatggtgctacagaagacaggaggactattcggcctcgccgtgggcctaatgcagcttttctccgattataaagaggacctgaagcctctgctcaataccctcggcctcttcttccagatccgcgacgactacgccaatctgcacagcaaagaatactcagaaaacaaaagtttctgtgaggacctgactgagggcaaattcagtttcccgaccatacacgcaatctggagccgacccgaatccacccaagtccagaacatactccgtcagcgcaccgaaaacatcgatatcaagaagtattgcgtgcactatctggaagatgtgggcagcttcgagtacacccgcaacaccttgaaagagcttgaagctaaagcgtacaagcagatcgacgctcgcggcggcaaccccgaactggttgccctggtgaagcacctcagtaagatgttcaaggaagaaaatgaatag

SEQ ID NO: 189124 - DNA, 729 bp, synthetic construct
  misc_feature 1..729: note = Description of Artificial Sequence: Synthetic coding sequence
  source 1..729: mol_type = other DNA
atggagaagacccaggagaccgtgcagcggatcctgctggagccctacaagtacttgcttcagttgcctggaaagcaggtcagaacaaagctttcccaggcttttaatcactggcttaaggtacctgaagacaagcttcagatcatcatcgaggtaactgagatgctgcacaatgcctcacttctgattgatgatatcgaggacaacagcaagctccgccgtggctttcccgtggctcattccatttacggcatcccatctgtgatcaatagcgctaattatgtctacttcttaggcctggagaaggtcctcacactggaccatccagatgctgttaagctgttcactcggcagctgctcgagcttcatcaaggtcagggcctcgatatctactggcgggacaactacacgtgtccaacagaggaagagtacaaggcaatggttcttcagaagaccggaggtttgtttgggctggcagttggtctcatgcagctgttttctgattataaggaggacctgaaaccactactgaatacattaggcctgttctttcagatccgggatgattacgcaaacctccactcaaaagagtatagtgagaacaaaagcttctgcgaggacctgacggaagggaagttcagttttccaactattcatgcgatctggtcaaggcccgaaagcacccaggttcagaacatcctaagacagcgaactgagaatatcgactag

SEQ ID NO: 189125 - DNA, 903 bp, synthetic construct
  misc_feature 1..903: note = Description of Artificial Sequence: Synthetic coding sequence
  source 1..903: mol_type = other DNA
atggagaagacccaggagaccgtgcagcggatcctgctggagccctataaatatctgttgcagctgccaggaaagcaagtacggacaaaactgagtcaagcctttaaccattggctcaaggtgcccgaggataagctgcagattattatcgaagtgactgagatgctacacaacgcaagcctcttgatcgacgacatcgaagataacagtaaactgaggcgaggcttccccgttgcccactcaatctatggcatccccagcgtgattaactcagccaattatgtgtactttcttggattagaaaaagtgctgacattggaccatcctgacgcggtgaagctgttcacacgacaattactcgaactccatcagggccagggactggatatctattggcgcgataattacacatgtcccaccgaggaggaatataaagcaatggtgctgcagaaaacaggcgggctgttcgggctggccgtggggctgatgcagctgttttcagattataaggaggacttaaagccgttgttgaacacattgggtctcttttttcagattagggatgactacgctaacctgcattcaaaggaatatagcgagaataaatcattttgcgaagatctcaccgagggaaaattctccttcccgactattcacgccatctggtcaaggccagagagtactcaggtccagaacatcctccgacaacggactgagaacattgacataaagaaatattgcgtgcactatctcgaagacgtgggaagcttcgagtatacaagaaacactctgaaagaactggaggccaaggcgtacaagcagatcgatgcaagaggcggcaaccccgagctggttgctttggtcaagcacttgtccaaaatgtttaaagaggaaaatgaatag

SEQ ID NO: 189126 - DNA, 903 bp, synthetic construct
  misc_feature 1..903: note = Description of Artificial Sequence: Synthetic coding sequence
  source 1..903: mol_type = other DNA
atggagaagacccaggagaccgtgcagcggatcctgctggagccctacaagtacttattacaactcccgggcaagcaggtgcggaccaagttgtcacaggccttcaatcactggctgaaagtcccagaggataagctgcaaatcatcattgaggttaccgagatgttacataatgccagcctgctgatcgacgacatcgaagacaactcaaaactacgtagaggattccctgtagcccattctatttacggaattcccagtgttattaatagcgctaattatgtgtactttctcggcctcgaaaaggtgctgacgctcgatcatccggacgcggtcaaattattcacccgccagctcctggaattgcatcaggggcagggtttggacatttactggcgcgacaactatacgtgcccaacagaggaggagtataaggcgatggtactgcaaaagactggggggttgttcggactggccgtgggtctcatgcagctctttagcgactataaagaggatctgaagccattgcttaatacactcggcctctttttccagattcgggatgattatgccaacctgcattcaaaggagtacagcgaaaacaaaagtttctgtgaagacttgactgaagggaaatttagcttcccgaccatccacgcgatctggtctcgacccgagagtacccaagtgcagaacatactgcggcagcggactgaaaacatagatatcaagaagtactgcgttcattatctggaggacgttggctccttcgaatacacccggaatactttgaaggaactggaggcgaaggcttacaagcaaattgacgctaggggaggcaaccccgagctggtggctctggtgaaacacctctcaaagatgttcaaagaggagaatgagtag

SEQ ID NO: 189127 - DNA, 693 bp, synthetic construct
  misc_feature 1..693: note = Description of Artificial Sequence: Synthetic coding sequence
  source 1..693: mol_type = other DNA
atggagaagacccaggagaccgtgcagcggatcctgctggagccctataagtacctgttgcagctcccgggtaaacaggtgagaactaagctgagccaggccttcaatcattggctgaaggtgcctgaggacaagctccaaattatcatcgaagtgactgagatgttacataacgcgagcctcctgattgacgatattgaggacaacagtaagttgcggagaggatttccggtagctcatagtatctacggcatcccgtcagttataaactccgccaattacgtctacttcttgggactagagaaggtgctgaccctcgaccacccagatgccgtgaaactgttcacaaggcagctgcttgagctgcatcagggccaggggctggatatatattggagggacaattatacctgcccaacagaggaagagtataaggcaatggtacttcagaaaactggtggcctcttcggtctggcagtcggactgatgcagctatttagtgattataaagaggacctgaaacctctgctcaacacattgggcctgtttttccagattcgcgatgattatgcaaacctgcactcaaaagaatactccgaaaacaagagcttctgtgaggatctgacggaaggcaagtttagtttccccacaatacacgcaatttggagtcgccctgaatccacacaggtgtag

SEQ ID NO: 189128 - DNA, 537 bp, synthetic construct
  misc_feature 1..537: note = Description of Artificial Sequence: Synthetic coding sequence
  source 1..537: mol_type = other DNA
atgggcaacagcctgctgcgggagaaccggcggcagcagaacacccaggagatgccttggaacgtgaggatgcagagccctaaacaacgcacttcaagatgctgggatcaccatattgccgaagggtgcttctgcctgccatggaaaaaaattcttatatttgagaagagacaggatagccagaatgaaaacgaaaggatgtccagtactccgatacaggataacgtggatcagacttacagcgaggagttatgttataccttgattaaccatcgggttctttgcacccgcccaagtggcaactccgcggaggagtattacgaaaacgtgccctgcaaggcagaaagaccacgcgagagccttgggggaaccgaaaccgagtattctctcttgcacatgccctccaccgatccccgtcatgcaagatcgccggaggacgagtacgagctcctgatgccgcaccgaatctctagccatttcttacagcaaccacgccccctcatggctccttctgagacacagttttctcacttatag

SEQ ID NO: 189129 - DNA, 492 bp, synthetic construct
  misc_feature 1..492: note = Description of Artificial Sequence: Synthetic coding sequence
  source 1..492: mol_type = other DNA
atgggcaacagcctgctgcgggagaaccggcggcagcagaacacccaggagatgccctggaacgtgcgaatgcagtctcctaaacagcgcacaagtaggaaaaaaatcctcattttcgagaaacgccaggattcccagaacgagaatgaaaggatgagctcaacacctatccaagataatgtcgatcaaacatactccgaagagctgtgttacactcttatcaaccacagagttctatgtactcgaccatctgggaactccgctgaggagtactacgagaacgtgccctgtaaagcagagaggcctagggagtccttaggcgggaccgagacggagtatagtcttctgcacatgcccagcaccgacccgcgccacgccaggtctccagaagacgaatacgagcttctgatgccacaccggatcagcagccacttcctccagcagcctaggcccctcatggccccgagcgagacccagttcagccacctctag

SEQ ID NO: 189130 - DNA, 543 bp, synthetic construct
  misc_feature 1..543: note = Description of Artificial Sequence: Synthetic coding sequence
  source 1..543: mol_type = other DNA
atgggcaacagcctgctgcgggagaacagcttccggcggcagcagaacactcaggaaatgccctggaatgttcgaatgcaaagtcccaagcagcgaacctctcggtgctgggatcaccatattgcagagggttgcttttgcctcccatggaagaagatcttaatttttgaaaaacgccaggactcacaaaatgaaaatgagaggatgagcagtacaccaattcaagacaatgtcgatcaaacctattccgaagagctgtgttacaccctgatcaatcatagggtcctctgcactcgcccaagtggcaatagtgcagaggagtattacgagaatgtgccttgtaaggctgaaagacctcgagaaagcctgggaggaactgagaccgagtactctctgctgcacatgccctcaactgaccctcgacacgctcggtcccccgaagatgagtacgaacttctaatgccgcaccggatcagctcccacttcctgcagcagccccggcctttaatggctccgtcagaaactcaattcagccacctctag

SEQ ID NO: 189131 - DNA, 351 bp, synthetic construct
  misc_feature 1..351: note = Description of Artificial Sequence: Synthetic coding sequence
  source 1..351: mol_type = other DNA
atgcccagccccggcaccgtgtgcagcctgctgctgctgggcatgctgtggcttgacttagccatggcagggagttcttttctgagccccgaacaccagagagtccaacgaaaagaatccaagaagcctccagctaaactgcaaccacgcgcattagcaggctggctgaggcctgaagatggcggccaggcagagggggcagaggatgagctggaagtgcgcttcaatgctcccttcgatgttgggattaaactgagtggggtccagtaccagcagcacagtcaggctttgggcaagttcctgcaggatatcttatgggaggaggcaaaagaggcaccagccgataagtag

SEQ ID NO: 189132 - DNA, 354 bp, synthetic construct
  misc_feature 1..354: note = Description of Artificial Sequence: Synthetic coding sequence
  source 1..354: mol_type = other DNA
atgcccagccccggcaccgtgtgcagcctgctgctgctgggcatgctttggcttgatctggccatggctggaagctctttcctgtcacccgaacaccagcgtgtgcaacagagaaaagagagcaaaaagcctccagcaaagcttcagccgcgcgccctcgccggatggctcagaccagaagacggggggcaagctgaaggcgccgaagatgaattagaggtacgtttcaatgcaccatttgatgtgggcatcaagctgtccggcgtacagtaccagcagcatagccaagctctggggaagtttcttcaggatatactgtgggaggaagccaaagaagcccctgccgacaagtag

SEQ ID NO: 189133 - DNA, 276 bp, synthetic construct
  misc_feature 1..276: note = Description of Artificial Sequence: Synthetic coding sequence
  source 1..276: mol_type = other DNA
atgcccagccccggcaccgtgtgcagcctgctgctgctgggcatgttgtggttggatctggccatggctggcagcagtttcctctctcccgagcatcagcgcgttcaacaacgcaaagaaagcaaaaagccaccagctaaactgcaaccacgcgctctggccgggtggctgcggcctgaggatgggggccaggcagagggcgctgaagacgaactggaggtgcgccgcccccagccaacctcagataggccccaggccctgttaacgagcctgtag

SEQ ID NO: 189134 - DNA, 102 bp, synthetic construct
  misc_feature 1..102: note = Description of Artificial Sequence: Synthetic coding sequence
  source 1..102: mol_type = other DNA
atgcccagccccggcaccgtgtgcagcctgctgctgctgggcatgctatggctcgacctggcaatggctgggtctagtttcttatccccagagcaccaatag

SEQ ID NO: 189135 - DNA, 354 bp, synthetic construct
  misc_feature 1..354: note = Description of Artificial Sequence: Synthetic coding sequence
  source 1..354: mol_type = other DNA
atgcccagccccggcaccgtgtgcagcctgctgctgctgggcatgttgtggcttgacttagcgatggccggatccagtttcttaagccccgaacaccagcgagtgcagcagcgcaaggaatctaaaaaaccaccggccaagctacaaccacgtgctctagctggctggcttcggcctgaggacggagggcaagctgaaggggccgaggacgagttggaggtgaggtttaacgctccctttgatgtgggaattaagctcagcggtgtgcaataccagcagcacagccaggctctgggaaaattcttgcaggatatcctctgggaagaagccaaggaagcacctgctgataagtag

SEQ ID NO: 189136 - DNA, 351 bp, synthetic construct
  misc_feature 1..351: note = Description of Artificial Sequence: Synthetic coding sequence
  source 1..351: mol_type = other DNA
atgcccagccccggcaccgtgtgcagcctgctgctgctgggcatgctgtggttggacctcgctatggccggttcatcattcctttcccctgaacaccagcgcgtccagaggaaggagtccaaaaaaccgccggctaagctccaaccacgggccctggccggttggctgcgcccagaggacggagggcaagctgaaggtgccgaggatgagcttgaagtgcgattcaacgccccttttgatgtcgggatcaagctgtccggagtgcagtaccagcaacacagccaagccttgggcaaatttttacaggacatcttgtgggaggaggccaaggaagcgccagctgataaatag

SEQ ID NO: 189137 - DNA, 318 bp, synthetic construct
  misc_feature 1..318: note = Description of Artificial Sequence: Synthetic coding sequence
  source 1..318: mol_type = other DNA
atgttcacctgctggtggagctacctgcggagcaccctggccgccgtccccggagaggcatcacgcgtgcagcagaggaaggaaagcaaaaagccgcctgccaagctgcagcctcgagcgttagccggctggctacgcccagaggatggtggacaggccgaaggtgcggaggatgaactggaggtcaggtttaatgctcctttcgatgtaggaatcaaactgagcggtgtgcaataccagcaacactcccaggccctggggaaatttctgcaggatattctatgggaagaggccaaggaggcacctgccgacaagtag

SEQ ID NO: 189138 - DNA, 201 bp, synthetic construct
  misc_feature 1..201: note = Description of Artificial Sequence: Synthetic coding sequence
  source 1..201: mol_type = other DNA
atgttcacctgctggtggagctacctgcggagcaccctggccgccgtgccaggcgaagcctccagagtgcagttcaacgctcccttcgacgtgggcattaaactgtctggtgtgcagtaccagcaacattcacaagcattgggaaagtttctgcaggacatactgtgggaagaagccaaggaagctccagccgacaaatag

SEQ ID NO: 189139 - DNA, 315 bp, synthetic construct
  misc_feature 1..315: note = Description of Artificial Sequence: Synthetic coding sequence
  source 1..315: mol_type = other DNA
atgttcacctgctggtggagctacctgcggagcaccctggccgccgttcctggtgaagcttctcgagtacagaggaaggagtcgaaaaagcctcccgctaagttgcagcccagagccctggccggatggctgcgccctgaagatggagggcaggccgagggagctgaagacgagcttgaagtcagatttaacgccccctttgatgtcgggatcaaactgagcggtgtgcagtatcagcagcacagtcaggcactgggcaagtttctgcaagatattctttgggaggaggctaaagaggccccagccgacaaatag

SEQ ID NO: 189140 - DNA, 351 bp, synthetic construct
  misc_feature 1..351: note = Description of Artificial Sequence: Synthetic coding sequence
  source 1..351: mol_type = other DNA
atgcccagccccggcaccgtgtgcagcctgctgctgctgggcatgctatggttagatctcgccatggcgggctcttcatttctgagtcctgaacaccagcgcgtgcagagaaaagagtccaagaagccacccgcaaagctgcaaccccgagctctagcagggtggttacgccctgaggatggtggccaagcagagggtgcagaggacgagctggaggtacggtttaatgctccatttgacgtgggcatcaaactgtcgggagtgcagtatcagcagcactcccaggcactgggaaagttcctgcaggacattctctgggaagaggctaaagaagccccagcggataagtag

SEQ ID NO: 189141 - DNA, 354 bp, synthetic construct
  misc_feature 1..354: note = Description of Artificial Sequence: Synthetic coding sequence
  source 1..354: mol_type = other DNA
atgcccagccccggcaccgtgtgcagcctgctgctgctgggcatgctgtggctggacctggcaatggccggtagttctttcctgagtcccgagcaccagagagttcaacagaggaaagaatctaaaaagccaccagcaaaactacagccccgagctctcgctggttggcttcgacccgaggacgggggccaggcagagggcgcagaagatgagcttgaggtgcggttcaatgccccattcgatgttggaataaagcttagcggagttcaatatcagcagcacagccaagctctcggaaagtttcttcaggatatcctttgggaggaggcgaaggaggcgcccgcggataaatag

SEQ ID NO: 189142 - DNA, 354 bp, synthetic construct
  misc_feature 1..354: note = Description of Artificial Sequence: Synthetic coding sequence
  source 1..354: mol_type = other DNA
atgcccagccccggcaccgtgtgcagcctgctgctgctgggcatgttatggcttgacctggcaatggctgggtcttctttccttagccccgaacaccagcgcgtccagcaaagaaaggaatccaagaagccccctgccaaactgcagccccgggccctggccggatggctccgacccgaggacggaggccaggctgaaggagcagaagatgaactcgaagttcgcttcaacgccccattcgatgtggggattaagctctcgggagtccagtatcaacagcacagccaggcccttggcaaatttctgcaggacattctgtgggaggaagccaaggaggcccccgcggataaatag

SEQ ID NO: 189143 - DNA, 1794 bp, synthetic construct
  misc_feature 1..1794: note = Description of Artificial Sequence: Synthetic coding sequence
  source 1..1794: mol_type = other DNA
atggccgagggcagcgccgtgagcgacccccagcacgccgcccggctactacgtgccctgtcaagttttcgggaagagagtaggttttgtgatgcccatctcgtcctcgatggcgaggagatacctgtgcagaaaaatattttggctgccgcatcgccttacatccggacaaagctcaattacaatcctcctaaagacgacggttctacttataaaatcgaactggaggggataagtgtcatggttatgagggaaatcttggactacatcttttccgggcagatacgcctgaacgaagatacaattcaggacgtagtgcaagctgcagacctgttactgctcactgacctcaagaccctttgttgcgaattcctcgaaggatgtatagcagctgagaattgtatagggattcgggacttcgcactgcactactgtctgcatcacgtgcactacttggccaccgagtacttggagactcatttccgagacgtctcaagcacagaggaatttctggaactctcaccccagaagcttaaagaagtgatctccctcgagaagctcaacgtgggtaatgagaggtatgtcttcgaagcagttattcggtggatcgctcacgacactgaaatacgcaaagtgcacatgaaggatgtcatgtccgccctctgggtgtcaggtctggactcctcataccttagggagcaaatgctgaacgaacctttagtgcgcgagatcgtcaaggaatgctcaaatatccccttgtcccagccacagcagggtgaggcgatgctggccaattttaaaccacgaggatatagtgaatgtatagtgactgtaggaggcgaagaaagagtgtctcggaaacctaccgcagctatgagatgtatgtgcccactgtatgacccaaaccgacaactgtggatagagttagctcctctgtcaatgcctaggataaaccatggagtgttgtccgctgagggatttctgtttgtgtttggtgggcaggacgagaacaagcagaccttgtcatccggagagaagtacgatccagatgctaacacctggaccgccctgcctcctatgaatgaggctaggcataattttggaattgtagaaatcgacgggatgctctatattctgggcggagaagatggcgaaaaagagttgatttcaatggaatgttacgatatttacagcaagacatggaccaagcaaccggatctaaccatggttcgaaagatcgggtgctatgctgccatgaaaaagaagatatacgccatgggcggaggatcgtatggaaagctctttgaatctgttgagtgttacgacccccggactcaacagtggacggccatctgccccctgaaagagcggcgcttcggcgcggtagcttgtggcgtcgcgatggagctgtatgtgtttggtggcgtccgcagtcgagaagatgcccaaggatccgagatggtcacttgcaaatccgagttctatcatgacgagtttaagcgttggatctatctgaatgatcagaatctttgcatcccagcctcctcctctttcgtctatggagccgtgcctattggcgcctcaatctatgttatcggcgacctcgatactggcactaattacgattatgttcgggaattcaagaggtcaactggtacctggcatcatactaagccgctgttaccatcagacctgcggaggacgggatgcgccgctctgcggattgctaactgcaagctgttccgacttcaactgcagcaaggtttgtttcgtataagagtgcacagcccatag

SEQ ID NO: 189144 - DNA, 591 bp, synthetic construct
  misc_feature 1..591: note = Description of Artificial Sequence: Synthetic coding sequence
  source 1..591: mol_type = other DNA
atgttctgcgagaaggccatggagctgatccgggagctgcaccgggctcccgagggtcagcttcccgctttcaacgaagatggactgaggcaagtgctggaggagatgaaagcactctatgagcagaaccaatccgatgtcaacgaagctaagtctggcggcaggtcggacttgatccccactattaaattccgccattgcagtctgctcaggaatagaaggtgcacagtggcatatctgtacgacaggctgctgcgcatccgggctctccggtgggagtacggctccgtcctgcccaacgctctaagatttcacatggcagccgaagaaatggaatggtttaataactataagcgatcactcgccacctatatgcgatcactcggtggggacgagggcctggacatcacacaggatatgaagccgcccaagtctctgtacatcgaggtcagatgtctcaaggactacggggaatttgaggtggatgatggtacgagtgtgctgttgaagaagaactcgcagcacttcttacctagatggaaatgcgaacagctgatccggcagggcgtgcttgagcacatcctgtcctag

SEQ ID NO: 189145 - DNA, 498 bp, synthetic construct
  misc_feature 1..498: note = Description of Artificial Sequence: Synthetic coding sequence
  source 1..498: mol_type = other DNA
atgttctgcgagaaggccatggagctgatccgggagctgcaccgggcccccgaaggccagctgcccgcttttaatgaggatgggcttaggcaggtactcgaggaaatgaaagccctgtacgaacagaatcaatcagatgtgaatgaggccaaatccgggggaagatcagatctcatccccacaatcaagttccgacattgtagtttgctgcggaatcgacggtgcacggtagcatacttgtatgaccgtctccttcgaattcgggcattacggtgggagtacggttctgtgttgcctaatgccctgaggtttcacatggccgcggaggagatggagtcccgctccgttgctcaagcaggtgtccagtggtgtattttgtgttctctgcagttacccccccccggctttaagcaattctcctgcctgtcccttccatcctcttgcgattacagatggtcaggactgatcataatcaaagacctgcttctcctgatctag

SEQ ID NO: 189146 - DNA, 558 bp, synthetic construct
  misc_feature 1..558: note = Description of Artificial Sequence: Synthetic coding sequence
  source 1..558: mol_type = other DNA
atggacgccgccgaggtggagttcctggccgagaaggagctggtgacgataattcctaacttctcactggacaaaatttatttaattgggggcgacttaggcccatttaaccctgggctgcccgtggaagtgcccctctggctggccattaatcttaagcagcgccaaaaatgtcggcttttacccccagagtggatggatgtagaaaagctggagaagatgcgggaccacgaaagaaaggaagagactttcactcccatgcccagcccatactatatggagttaacgaagctactgctaaaccacgcttccgacaatatacctaaagctgacgagattcgtacccttgttaaagatatgtgggatacgcggatcgccaaactgagagtgagcgccgactccttcgttaggcagcaagaagcccacgccaagctggacaacctcaccctgatggagatcaacacatctggcacttttctaacccaggctctaaatcatatgtataagctgagaacaaatctccagcctctggaaagcactcagagccaggatttctag

SEQ ID NO: 189147 - DNA, 651 bp, synthetic construct
  misc_feature 1..651: note = Description of Artificial Sequence: Synthetic coding sequence
  source 1..651: mol_type = other DNA
atgagcgaggcctacttccgggtggagagcggcgccctgggccccgaagaaaacttcctgagtctagatgatatcctcatgagccacgaaaaactgcctgtccgaacagagaccgctatgccccgccttggggccttctttctggaacgaagcgccggagccgagaccgacaacgccgtcccacaaggaagcaaactggagttgcctctgtggctggcaaaggggctgttcgataataagagaagaattttgtctgtcgagttacctaagatctaccaggagggatggaggacagtgttcagtgccgatcctaacgtcgtcgacctacataaaatgggcccacacttctatggcttcggctctcagctgctgcactttgacagccctgagaatgccgacatcagtcagagccttctccagacatttattggtaggttcagacgcatcatggactcaagccagaatgcgtataatgaagacactagcgctctcgtcgccagattagatgagatggagagggggctttttcagaccgggcagaagggtctgaatgattttcagtgctgggaaaaagggcaagcaagccaaattacagcaagcaatctggtccagaattacaaaaagagaaaattcacagatatggaagactag

SEQ ID NO: 189148 - DNA, 417 bp, synthetic construct
  misc_feature 1..417: note = Description of Artificial Sequence: Synthetic coding sequence
  source 1..417: mol_type = other DNA
atgagcgaggcctacttccgggtggagagcggcgccctgggccccgaggagaacttcctctccctagatgatatactgatgagtcatgagaagttgcctgtcagaacagagacagcaatgccccgtctaggggcgtttttccttgaacgctccgcaggggcggagacagacaacgccgtaccccagacctttattggccggtttcgcaggattatggattcctcacagaacgcatataacgaagacacttctgctctagtcgccagacttgacgagatggaaagaggcctctttcagacaggacagaagggactgaacgatttccaatgttgggagaaagggcaggcttctcagatcactgcaagcaatctcgtacaaaattacaaaaaacgcaagttcacagacatggaggactag

SEQ ID NO: 189149 - DNA, 768 bp, synthetic construct
  misc_feature 1..768: note = Description of Artificial Sequence: Synthetic coding sequence
  source 1..768: mol_type = other DNA
atgagcgaggcctacttccgggtggagagcggcgccctgggccccgaagaaaatttcttgagcctcgacgatattctgatgtctcatgaaaagctccccgtacggaccgagaccgcgatgcctaggctcggtgcattctttttggagcggagcgcaggggctgagactgacaacgcagttcctcagggctttgccctgctgccacggctggagtgcagcggcgttatttggctgacagctgctttgaccagtcaggcaccagaaatcctgccgccacagcccccaatgtggctggtgttacagggtagcaaactcgaactccccctctggctcgcaaaggggctgtttgacaacaaacgtcggatcctctcagtggagctgccgaagatctaccaggagggctggaggaccgtgttctccgcagaccccaacgtggttgatcttcataaaatgggtccccatttctacggcttcggatcccaactgcttcattttgacagtcctgagaacgccgacattagccaatcactgctgcagacgtttatcggacgattccggcggattatggatagttcccagaatgcttacaatgaggacacgagtgcactggtcgcccgcctggatgaaatggaacgaggccttttccaaacagggcagaagggcctgaatgactttcagtgttgggagaaggggcaggcatcccaaattacagcctccaacctcgtgcagaattataaaaagcgaaaattcacagatatggaggactag

SEQ ID NO: 189150 - DNA, 672 bp, synthetic construct
  misc_feature 1..672: note = Description of Artificial Sequence: Synthetic coding sequence
  source 1..672: mol_type = other DNA
atgaccgaggaggtggacttcctgggccaggacagcgacggcggcagtgaagaagtggtgctgacccctgccgaattgatcgagcgcttagagcaggcctggatgaacgagaagttcgcccctgagctactcgaaagcaagcctgaaatagtcgaatgtgttatggaacaactcgagcacatggaggagaacttacggcgagccaaacgtgaggacctgaaagtgagtattcatcagatggaaatggagcgaatcagatacgtattatccagctacctgaggtgtaggctgatgaagatcgaaaagttcttcccccacgtgctggagaaagaaaaaacacgtccagaaggtgaaccctcatcactgtctcccgaggaacttgctttcgccagggagttcatggctaacacagaatcttacctgaagaatgtcgcactgaagcacatgccccccaacctgcaaaaagtcgatctttttcgcgcggtgccaaaacccgatctcgattcctacgttttcttgagagtgagagaaaggcaagaaaatatcttggtagaacctgacaccgacgaacagcgcgactatgtaatagacctggagaaggggtctcaacatctgatccggtataaaacgatcgcaccactcgttgcgtccggggcggtccagcttatatag

SEQ ID NO: 189151 - DNA, 672 bp, synthetic construct
  misc_feature 1..672: note = Description of Artificial Sequence: Synthetic coding sequence
  source 1..672: mol_type = other DNA
atgaccgaggaggtggacttcctgggccaggacagcgacggcggcagcgaagaggttgttcttaccccagcagaattgattgaacggctagaacaggcctggatgaatgaaaaattcgcccctgaactgcttgaatctaagcctgagattgttgagtgcgtcatggaacagctggagcatatggaggaaaacctccgcagggcaaagcgggaggatctgaaggtgagtatacaccagatggaaatggagcgtattcggtacgtgctttcttcgtaccttcgctgtcggcttatgaaaatcgaaaaatttttccctcatgtgctggagaaggagaagaccagacctgagggcgagccttcctctctgagccccgaggagttagctttcgcccgggagttcatggccaacactgaaagttacctcaaaaacgtggctcttaagcatatgcctccgaatctgcagaaagttgatctgttccgggccgtgcccaagcctgatctggatagttatgtgtttctgcgagtcagggaacgccaggagaatatcctcgtggaacctgacacagacgagcagcgggattatgtcatcgacctggaaaagggatctcagcatctgatcaggtacaagacaatcgctcctctcgtagcctcgggcgccgtgcaattgatttag

SEQ ID NO: 189152 - DNA, 303 bp, synthetic construct
  misc_feature 1..303: note = Description of Artificial Sequence: Synthetic coding sequence
  source 1..303: mol_type = other DNA
atgaccgaggaggtggacttcctgggccaggacagcgacggcggctcagaagaggtagtgctcactcctgcagagctcattgaacggttagagcaagcatggatgaatgagaaattcgcgcccgaactgctggaaagcaagccagagattgtggaatgtgttatggaacaactcgagcacatggaggaaaaccttcgacgtgccaaaagggaggacctaaaggttagtatccatcaaatggaaatggagaggattagatacgtgctctccagctatctaagatgcagactcatgaaggtgtag

SEQ ID NO: 189153 - DNA, 939 bp, synthetic construct
  misc_feature 1..939: note = Description of Artificial Sequence: Synthetic coding sequence
  source 1..939: mol_type = other DNA
atggagggcgccgccgcccgggaggcccggggcaccgagacccccagggcctctgccccacctccagcaccatccgaacctccagctgctcctcgcgccagaccgaggctggtatttcgcactcaattagcacacggcagtccgaccggcaaaatcgagggatttactaatgttagagagctgtacgctaaaatcgccgaggcctttggcattgccccgactgaaatactgttctgcactcttaactcccacaaggtagacatgcagaagcttctagggggccaaattggactagaagatttcatcttcgcccatgtgaggggggagacaaaagaagtggaggtgaccaagacagaggacgcactgggcctgacaatcacagacaacggcgcagggtatgcctttataaaacgcatcaaggagggttccatcattaatcggattgaggcagtatgtgtaggggactctattgaggccattaatgaccacagcatcgtggggtgcagacactacgaggtagccaagatgctgcgagagttgcccaagtcccagcccttcaccctgaggcttgtccagccgaaacgtgcgttcgacatgattgggcagcgctcacggagcagcaaatgtcccgtagaggcaaaggtcacctctggaagggaaactctccggctgcgctctgggggagctgccacagtggaggaggcccccagcgaatttgaagaagaagccagccgcaaggttgacgacttactggagagttatatgggtattcgagaccctgagctcgccagcacaatggtcgagactagcaagaagactgccagcgcccaagaattcgctagatgcttggattccgtgctgggtgaatttgcctttcccgatgagttcgtcgtagaagtttgggccgctatcggtgaagctagagaggcgtgcggctag

SEQ ID NO: 189154 - DNA, 2097 bp, synthetic construct
  misc_feature 1..2097: note = Description of Artificial Sequence: Synthetic coding sequence
  source 1..2097: mol_type = other DNA
atgcccagcgagggccggtgctgggagaccctgaaggccctgcggagcagtgataaaggacggttgtgttattaccgcgactggctgctgcgtcgggaagatgtactggaagagtgcatgtctcttccaaagctgagctcttattcaggctgggtggtggaacacgttttaccgcacatgcaggaaaaccaaccactgtcagaaacatcacccagctctacatctgcctcagcgctcgaccaaccatcatttgtcccaaagagtcccgatgctagttccgcatttagccccgcttctcccgccactcctaatggcaccaaaggaaaggacgagagtcagcacactgaatctatggttctgcagtcctcccgagggattaaggtggaaggctgcgtacggatgtacgagctggtccatcgcatgaagggcacagagggactgagactatggcaggaggagcaggaacgcaaagtccaggcattgagtgagatggcttctgaacaactcaagagattcgacgagtggaaggagttgaagcagcacaaggagtttcaggacctccgcgaagtgatggagaagtcctcccgggaagccctaggccatcaggaaaaacttaaagccgagcaccggcacagggcgaagattctaaatctgaaactgagagaggctgaacaacagcgtgtgaaacaagcagagcaggagcgactccggaaagaggaaggtcagatccggctccgagctctgtatgcactgcaagaagagatgctccaattgtctcagcagctcgatgcaagcgaacagcataaagctttactgaaggtggatttagctgctttccagacaaggggtaatcaactgtgtagcctcatatctggcatcatcagagcatcctcagaaagctcatacccaaccgcagagtcgcaggccgaagccgagagagctctgagggagatgcgtgatctccttatgaacctcggccaggaaatcactagagcatgcgaagataagagaaggcaggacgaggaggaggctcaagtgaaactgcaagaagcgcagatgcagcagggccctgaggcccacaaggaaccgcctgctccttcccaagggcccggtggcaaacagaacgaagatctgcaggtcaaagtgcaggatataaccatgcagtggtaccaacagctgcaggatgcatctatgcagtgtgttctgactttcgagggcctgaccaactccaaagattcacaagcaaagaaaatcaaaatggacctccagaaagctgccaccatcccagtgagccaaatttcgaccatcgccggctccaaacttaaagaaatcttcgacaaaatacattctctgttaagcgggaaaccggtccagtcagggggcaggtcagttagcgtaaccctgaacccccaaggattagacttcgtgcagtataaactggctgaaaaattcgtgaagcagggggaggaggaagtggcaagccatcacgaggccgcctttcctatagccgttgtcgcttcggggatttgggaactgcacccaagagtcggagacctaatcctggcgcatttgcacaagaagtgtccctactcagtgcccttttatcccacctttaaggaggggatggccctggaagattatcaacgcatgctgggatatcaggtcaaggattccaaggttgagcaacaagacaacttcctcaaaaggatgtcaggaatgatcaggctttacgccgctattattcaactgagatggccatatggtaacagacaagagatccatcctcatggcctcaaccacgggtggcgctggctggcccagatcctcaacatggaaccactgagcgacgtgaccgccacactgctgttcgattttttggaggtatgcggaaatgctctgatgaaacagtaccaggttcagttttggaagatgctgattctcataaaggaagattacttcccacgcattgaggctattacctcttccggccagatgggttcattcattagattgaaacagtttctggagaaatgccttcaacacaaagatatcccagtgccaaaggggttcctgacgtcatccttctggcgctcctag

SEQ ID NO: 189155 - DNA, 1980 bp, synthetic construct
  misc_feature 1..1980: note = Description of Artificial Sequence: Synthetic coding sequence
  source 1..1980: mol_type = other DNA
atgcccagcgagggccggtgctgggagaccctgaaggccctgcggtcttccgataagggtcggttgtgctattaccgtgattggttgctgagaagggaagatgtactggaggagtgtatgagcctgcctaaactttcgtcctacagtgggtgggtggtggagcatgtacttccccacatgcaggagaaccagcccctttctgaaaccagcccgtcgtccacatctgcaagcgctcttgaccagccctcatttgtgccaaagtctcccgatgcttccagtgcttttagccccgcctctcccgctactcccaatggtacaaaaggtaaagacgagagccagcacactgagagtatggttctgcagtcttcacgaggcattaaggtggagggctgcgttaggatgtacgagctggtacaccgcatgaaaggcactgagggcctacgactatggcaggaagagcaagaaagaaaagtgcaggctctttcagagatggcctccgaacagttgaagaggtttgatgagtggaaagagttgaaacagcacaaagagtttcaggatttacgagaggtgatggagaagtcttctagagaggcactgggacatcaggagaagttaaaggccgaacatcgccatagagccaaaatcctcaacctcaagctgcgcgaggcagaacagcagcgggtaaaacaggccgagcaggagcggttgagaaaggaggagggacagatcaggctgcgtgccctctatgccttgcaggaagaaatgctacagttatctcaacaactggatgcatcagagcaacataaggctttactgaaagtggacttggccgcctttcagactcgcggaaaccagctgtgcagtctcatttccggcattatacgggcttcaagtgagagctcctatccaactgctgagtctcaggccgaggctgagcgggcactgcgagaaatgcgcgacttacttatgaacctcggccaggaaattactcgtgcctgcgaggataaaaggcgccaagatgaagaggaagcccaggtgaaactgcaggaggcccagatgcagcaggggccggaagcgcacaaggagccccctgctccttcccagggccccggcggcaagcaaaacgaagacttgcaagtgaaagtacaggacatcacaatgcaatggtatcagcaacttcaagatgcctcaatgcagtgtgttcttacattcgaaggcctcaccaacagtaaagattcccaggccaagaagatcaagatggacctccagaaggctgccacgatcccggtcagtcaaatctcaaccattgccgggtcaaagctaaaggaaatctttgacaaaattcacagcctgctcagcgggaaacccgtacagtccggaggtagatcggtttcagttacattaaatcctcagggactggatttcgtgcagtacaagctggcggagaaatttgttaagcagggagaagaagaggtggcttcccaccacgaggccgcattccccatagctgtcgtcgcttccggtatatgggagctgcacccaagagtcggagatttgattttggcccatctccacaagaaatgtccttattccgtccccttctatcctacttttaaagaggggatggccctggaggattatcagaggatgctcggttatcaggtcaaggattctaaggtcgaacagcaggataacttcctgaagcggatgtctggcatgattcgtctgtacgctgccattattcagctgcggtggccctatggcaatagacaggaaattcacccgcatggactgaatcacgggtggaggtggcttgcacaaattcttaacatggagccactttcggacgtgaccgccaccctgctcttcgacttcttagaggtgtgcggcaatgctttgatgaagcagtatcaggtgcagttctggaagatgctgatcctgatcaaagaagattactttccacggtaccaggcgtgctag

SEQ ID NO: 189156 - DNA, 1335 bp, synthetic construct
  misc_feature 1..1335: note = Description of Artificial Sequence: Synthetic coding sequence
  source 1..1335: mol_type = other DNA
atgctgcagctgagccagcagctggacgccagcgagcagcacaaggcactgctgaaagtagacctcgctgcattccagacccgcgggaaccagctctgtagcttaatttctggaattattagggccagcagcgagtccagttaccccaccgcagagtcccaggctgaagccgagagagccctgagagagatgcgggacctgcttatgaatctgggtcaggaaatcacaagggcctgtgaggacaaacgacggcaggatgaggaggaagcccaggtgaagctgcaagaagcgcagatgcagcaaggaccagaggcacataaggagcctcccgcccctagtcaagggccaggtgggaagcaaaacgaggacttacaagtcaaagtgcaggacattacaatgcagtggtatcaacagctacaggatgcgagcatgcagtgtgttctaacattcgagggacttacaaattccaaagatagccaggctaaaaaaattaagatggacttgcaaaaggccgcaaccatacctgtgagtcagatctccaccatagctgggagcaaacttaaagagatttttgacaaaattcacagtcttctgtccggtaagcctgtacagagcggtgggaggagcgtgagcgtgacactgaacccgcagggattagacttcgtgcaatacaaacttgcagaaaagttcgtgaaacaaggcgaagaggaggttgcctcccatcacgaggcggctttcccaatcgctgtcgtagcttctggaatatgggaactccacccccgggtgggcgacctgatcttagctcatctgcacaaaaaatgtccttatagcgtgcccttctatcccacatttaaggaggggatggcactagaggactaccagcggatgcttggataccaagtgaaggattccaaagttgagcagcaggacaactttctcaaaaggatgtctgggatgatacggttatacgccgccatcatccagctgcgctggccctacggaaatcgtcaggaaatccatcctcatgggctgaaccacggttggcggtggctggctcagatcctcaacatggagccactttctgacgtgacagccaccctcttgtttgactttcttgaagtgtgcggcaatgccctcatgaaacagtaccaagtccagttttggaagatgcttatcctgattaaagaagattatttcccgaggatcgaggctatcaccagtagcggccagatgggatccttcattcgattaaaacagttcttagaaaagtgcctacagcacaaagatatcccggtgcccaaagggtttctgacaagttcattttggaggtcttag

SEQ ID NO: 189157 - DNA, 2490 bp, synthetic construct
  misc_feature 1..2490: note = Description of Artificial Sequence: Synthetic coding sequence
  source 1..2490: mol_type = other DNA
atggccctgaccagcatcaacgccacccccacccagctgagcagcagttccaattgccttagtgacacaaaccaaaacaaacagagctcggagtctgcagtttcttccaccgtcaatccagtggcgatacataagcgcagcaaggtgaagacagagcctgagggcctgcgccctgcctctccgctcgcactcacacagggccaggtgtccggccacggtagctgcggctgtgcattgcctttatcccaggagcagcttgctgatttgaaggaggacctggacagagacgactgcaagcaggaggctgaggtggtgatttatgaaacgaattgtcattgggaagactgcaccaaggagtatgacacccaggagcagctcgtgcaccacattaacaacgagcatatacacggcgagaaaaaggaattcgtgtgtcgatggcaggcttgtacacgagagcagaagccattcaaggcacagtatatgctggtcgtgcatatgaggcgtcacactggtgaaaaaccacataaatgtacttttgaaggttgttctaaggcctattcacggctggagaacctcaagacccatttaagatcacatactggagaaaaaccttatgtgtgtgaacatgaagggtgcaacaaagccttctccaatgctagcgatcgagctaagcaccagaacagaacacactcaaacgaaaaaccctacatctgcaagattccagggtgcacaaagaggtacactgaccctagttcattgcgcaagcacgtcaaaacggtacacggaccagatgcccacgtgaccaagaagcagcgcaacgatgtccatctacgaacccccctcttgaaggaaaacggcgattccgaagccgggactgaaccaggcggcccagagtctactgaggcaagctctacctcccaggctgtcgaagattgcttgcacgttcgggcaattaagacagagtcctctggcctttgccagtcctcaccgggagctcagtctagctgttccagcgagccatccccactgggcagtgcccctaacaatgatagtggcgtagaaatgccaggcacaggcccaggctcattgggtgatctgaccgcactcgatgacacgccccctggggccgacacaagcgcattagcggctccatccgccggcggtcttcagttgaggaagcacatgaccaccatgcaccggttcgagcagctgaaaaaggaaaaactaaagtctcttaaagatagctgcagctgggctgggcctaccccgcacactcgtaacacaaaattacccccactccccgggtcaggtagtattctggaaaattttagtggtagcgggggcggaggccctgctggactcttacctaacccgcggctgagtgaactaagcgccagcgaagtaactatgctgagccagttacaagaaagaagagatagcagcactagtacagtttcttccgcgtacacggtcagccgaagaagcagcggtataagtccttacttcagctcacgccgttctagcgaagcctctcccttgggagccggccgtccacacaatgcttccagcgccgactcttacgatcctatttcaacggatgccagcagacgcagttcagaggcgagccagtgttccggtggatccggcctcttaaatcttacgcccgcccagcaatacagtctgagagcaaagtacgcagccgcgactggcggcccccctccaacccccctgcctggccttgaacggatgagcctacggacgcggcttgccctcctcgatgctcccgagaggaccctccccgcaggatgtccccggcctctcggccctcggcggggatcagacggtccaacctatggccacggccatgctggggctgcacctgcattccctcatgaagccccgggtggaggcgcccgacgcgcatcagaccccgtgagacgccccgacgcactgagcctgcctcgggtacagcgatttcactcaactcataacgtaaaccctggccccttgccgccatgtgccgaccgacggggattacggctgcagagccatccatcaaccgacggcggcctggcaaggggcgcctattcccctcgacccccaagtataagtgagaacgtggcaatggaggccgtcgccgcaggagtggatggagccggcccagaagccgacctggggctgcctgaggatgacctggtgcttcctgacgatgtggttcagtacatcaaagctcacgccagtggggcactggacgaaggcaccggacaggtttatcccaccgagtctacaggattttccgacaatcctaggctacctagtccagggctccatggccagcgtcgcatggtggccgcagatagtaatgtgggccctagcgcccctatgctgggtggttgccaactaggttttggagctccaagctcactgaacaaaaataacatgcccgtgcaatggaacgaagcctcagctacatggctgtctggcacctag

SEQ ID NO: 189158 - DNA, 4761 bp, synthetic construct
  misc_feature 1..4761: note = Description of Artificial Sequence: Synthetic coding sequence
  source 1..4761: mol_type = other DNA
atggagaccagcgccagcgccaccgccagcgagaagcaggaggccaagtccggcatcctggaggctgcgggatttccagaccctggcaagaaggctagccctttggttgttgcagccgctgcggcagccgccgtcgctgcccagggcgtgcctcagcacttgctgccaccttttcacgctccattgccaattgacatgaggcaccaggagggccggtaccactatgagccccattccgtgcatggagtgcacggcccgccggccttgtccggcagtcccgtcataagcgatattagtttgatccgcctgtcgccccacccagcaggtcctggtgagtctcctttcaacgcgccacacccatacgttaaccctcacatggagcattacctccggtctgtgcattcgtcacctaccctatccatgattagtgcagcaaggggtttgtctcccgccgatgttgcccaggagcacctcaaagagcggggcctgtttggtctcccggcgcctggcactactccttcggactactatcatcagatgacactggttgccgggcatcccgctccctatggcgacttactgatgcagtccggaggggctgcatcagcaccccatctccacgactatctgaaccccgtcgacgttagcaggtttagctctcctagagtgactcccagattatccagaaagcgcgccttaagcatctcgcctctatcggacgcatctctcgacttacaacggatgattcgaacctcgcctaattccctggttgcctacataaacaactccaggagctcatctgctgccagcggaagttatggacatctttccgctggagctctctctcctgcctttacttttccacatcctatcaatccggtggcataccagcaaattctatcacaacagaggggcctcggcagcgcttttggccatactcctccgttgatccagccgtctccgacatttttggctcaacagccgatggctttgacaagcatcaacgcaacaccgacccagctgagttccagtagcaattgcctttcagatactaatcagaataaacagagtagtgaaagcgcagtcagttccactgtaaacccagtcgctatccacaaacggtctaaagtaaaaacggagccagaaggccttcggccagcatctccattggccctgacccagggccaggtgtctggccatggcagttgcgggtgtgctctgcctctgagtcaggaacaactagctgacctgaaggaagacttggacagagacgattgcaagcaggaggccgaggtggtaatctacgaaacaaactgccattgggaggattgcacaaaggaatacgatacacaggaacaactggttcaccacatcaataatgaacacatacatggggagaaaaaagaattcgtctgtcggtggcaagcttgtacccgagaacagaaaccctttaaagctcaatacatgctggtcgtccatatgagaaggcacaccggggagaaaccccataagtgtacattcgaaggttgcagcaaagcttatagcagactcgaaaatctgaagacgcacctgcgttcacataccggggaaaagccatacgtatgtgagcacgaaggctgcaacaaggcttttagcaacgcatcggatagagcaaagcatcaaaaccgcacccactctaacgaaaaaccctatatctgcaagatcccaggttgcacaaagagatataccgatccgtcttctctgagaaagcacgtgaaaacagtacatggtccagatgcacacgttacgaaaaaacagaggaatgacgtccatctacgaactcccctgctgaaagagaacggggactctgaggcaggcactgagccgggaggacccgagagcactgaggctagcagtacttcacaggctgtagaggactgcctgcatgtacgggccataaaaaccgagtcaagcggcctatgtcaatccagccccggcgcccagagctcttgcagcagcgaaccctccccactcggatccgccccaaataacgattctggggtagagatgccgggtacagggcctgggtcactcggtgatctgaccgcgttggatgatacccctcccggagctgatacctccgccttagcagcccctagcgctggaggcctgcagctacgaaaacatatgacaactatgcatcggttcgaacaattaaagaaggagaaactcaagtctttgaaggatagttgcagttgggcaggacccacccctcacaccaggaataccaaattacctcctctgcccggtagcggctcaatcctcgagaacttctctggttccggcggtggtggcccagccggtctgttgccaaaccctagactctccgagcttagtgcatcggaggtcactatgttgtcccagctacaggaaaggcgagatagcagtacgagtactgtttcatctgcctacactgtgagtcggaggagcagtgggattagtccctacttttcttccaggcgctctagtgaagcatccccgttgggagccggccgacctcacaatgcctcaagcgcggatagctatgatcccattagcacggacgcgagtaggcggtcttccgaagcaagtcaatgctccggggggtcagggctgctgaacctgactcccgcacagcagtacagtttacgggcaaaatatgcggcagcaactggtgggcctccgcctacaccgctcccgggcctcgaaaggatgtcgctaaggacacgtttggcgctactagacgcacccgagagaactctccccgccggttgtcctcggcctctcgggcctcggcgtgggagcgatgggccaacttatggccacggacacgcaggcgccgcacccgcttttccccatgaagcgcccggagggggcgccagaagggccagcgacccagtcagaagaccagacgccttgtcactccctagagttcagcggtttcattcaacacataatgtgaaccccgggccgttacccccatgtgccgataggagagggctgcggctacagagtcatcccagcacagatgggggtctagcccggggagcttatagtccacgtcccccaagcatcagtgaaaacgttgccatggaagctgtggccgcgggagtggacggtgctgggccagaagccgatcttggactccctgaggacgaccttgtcttgccagatgatgtggtgcagtacatcaaggctcatgctagtggtgcgctggatgaaggtacaggacaggtatatcccactgagtccacaggattcagtgacaatccgagactgccatctcccggcctgcacggacagcgtagaatggtcgctgccgatagtaatgtaggcccatccgccccaatgctaggcggatgtcagctgggatttggagccccttcttcacttaacaagaataacatgccagttcagtggaacgaggtgagtagcggcaccgtcgacgcgttggcatcgcaggtcaaaccaccccccttcccgcagggaaacttggccgtagtacagcagaaacccgctttcggtcagtaccccggctatagtcctcagggattgcaggccagtccagggggcctggatagtacgcagcctcaccttcagcctcgcagcggcgctccgagccaggggatccctcgcgtgaactacatgcagcagctcagacagcccgtggcgggaagccagtgccccggaatgacgaccaccatgtctcctcatgcttgttacggtcaggtacacccccagctgtcccccagcactatcagtggggcactaaatcagtttccacagagttgtagcaatatgcctgccaaaccaggccatctagggcatccacagcagacagaagtggcaccagatcccactaccatgggcaatagacacagggaattaggcgtcccagattcagcactcgccggggtgccgccccctcacccagtccagtcttacccgcagcaatctcatcatctagctgcctctatgtcccaggaagggtatcaccaggttccctcacttctgcctgccagacagcctggctttatggaaccccagaccggccccatgggggtcgctacagctgggttcggactcgtccaaccccggccaccgctggagccttctccaaccggacgccatcgcggggttcgggcggtgcaacagcagctcgcctacgctcgagccaccggacacgccatggccgcaatgccgtccagccaggagacagccgaagcagtcccgaaaggggccatgggcaacatgggctcagtgcctccccagccacctcctcaagacgcagggggtgcgcctgatcattccatgctatactattacggacagattcacatgtacgagcaggacggggggctcgagaacttagggtcttgtcaggtcatgcgtagtcagccacctcagccccaggcctgtcaagactcgatccagccacagcctcttcctagccctggggtcaatcaggtcagtagtacggtcgactcgcagctactggaggccccacagatcgactttgacgccatcatggatgacggggatcatagcagtctgttctcaggggcactgtccccaagtcttctccactcgttaagccagaacagcagccgactcacaacaccccgcaacagcctcaccttacctagcatacccgcaggtattagtaatatggcggtaggcgacatgagttcaatgctcacatccctagccgaagaaagtaaattcctgaatatgatgacctag

SEQ ID NO: 189159 - DNA, 249 bp, synthetic construct
  misc_feature 1..249: note = Description of Artificial Sequence: Synthetic coding sequence
  source 1..249: mol_type = other DNA
atggagaccagcgccagcgccaccgccagcgagaagcaggaggccaagagtggcatccttgaggcggccggctttcctgatccaggaaaaaaagccagccccttagtggtcgcagctgccgctgctgctgctgtggctgcccagggtgtgcctcaacacctgcttccacccttccatgcccctttgccgattgacatgagacaccaggaaggtcggtaccactatgaacctcacagcgttcacggatag

SEQ ID NO: 189160 - DNA, 660 bp, synthetic construct
  misc_feature 1..660: note = Description of Artificial Sequence: Synthetic coding sequence
  source 1..660: mol_type = other DNA
atggagaccagcgccagcgccaccgccagcgagaagcaggaggccaaatccgggatcctggaggcagcaggtttccccgaccctggaaaaaaggcatctccacttgtggtcgccgctgctgcagcagcagcggtcgcagctcagggggtccctcagcatcttctgcccccctttcatgccccacttcccatcgacatgaggcatcaggaaggccgctatcactacgaaccacactccgtacatggcgtgcacggtgtgccctttttgcaacctgccggtgacgcccctcctgagcctcaagctggagcggtgcatctacccacgcttcgaaggcagcccggcccagctgctgatgatcctcatctaacacaactggcttctggccttcaccagcagctgccgaagcagctgggcgggcaacggtttttacgcgccagtgtgagcggatgcccacagcccagcctgcaccttcctccacctcaccagccacgcggtctaccagccgattcggaaccggccgaaggcagcggtgtgtccctctggacacacacgacccctgatcctgccctgacacacttacctggccctgccgcccacgggcctcacctgcaccaatgccatgctcacccagcccagcagcagcaacagctcagtgagtag

SEQ ID NO: 189161 - DNA, 4761 bp, synthetic construct
  misc_feature 1..4761: note = Description of Artificial Sequence: Synthetic coding sequence
  source 1..4761: mol_type = other DNA
atggagaccagcgccagcgccaccgccagcgagaagcaggaggccaagtcagggatccttgaggccgccggatttcccgacccaggcaaaaaggcatccccactggtcgtggcagctgctgccgctgctgccgtggcagcacaaggggtgccacagcatctgcttccgcccttccacgccccactgcctattgacatgcggcaccaagaagggcggtaccattacgaaccacattccgtgcacggcgtgcatgggccgccggctctcagcggttcacctgtcataagtgatatcagtcttattcggctctcaccgcaccctgcaggccccggagagtctccctttaatgccccccacccctacgttaacccacacatggagcactacctccggtctgttcactcaagccctacgttgtccatgatctctgccgctagggggctaagcccagcagacgtggcccaagagcacctgaaagagcggggactgttcggactccctgccccgggcaccacgccatcagactattatcaccaaatgactcttgtcgcaggccatccagcaccgtacggcgacttgctcatgcagagtgggggcgctgctagcgctcctcacctgcacgattacctgaacccagtggacgtgtcccggttttcctccccacgggtgacaccacgactcagtagaaagcgcgccctgtctatttctcccttgtccgatgcgagcctagacctgcagcgtatgatccgtactagccccaactccttggttgcctacataaataacagtcgctcttcgtcagctgcttccggatcctacggccatttgagtgccggtgcattatcgccagcctttacctttccacacccaattaaccccgtggcctatcagcaaatcctgagccaacaaaggggcttgggaagtgcgttcgggcacacacctccccttatccagccttccccaacctttctcgcacaacagcctatggccctaaccagtattaatgcgactcccacacaactgagcagcagtagtaattgtctctccgacaccaaccagaataagcagtcttccgaatcagcagttagcagtacagtgaaccctgtagccattcacaagcgcagcaaggtgaaaactgagcccgaaggtctccgcccggctagccccctggccctgacccagggacaagtttccggtcacggatcctgtggatgcgcccttccattatcccaagagcagttggccgatcttaaagaggatttagatagggacgactgcaagcaggaagccgaagtcgttatctacgaaacaaactgtcactgggaggactgcacaaaggaatatgacacccaagagcagctggttcatcacatcaataatgagcacatccacggcgagaagaaagagtttgtctgccggtggcaggcttgcactagggaacagaaaccattcaaagcgcaatacatgctggtagtgcacatgcggcggcataccggcgaaaaaccccataagtgcacgttcgaaggttgctccaaggcttattcccggctggaaaacctaaagacacacttgagatcgcacaccggtgagaagccctatgtgtgtgagcatgaaggatgtaacaaggccttttccaacgcgagcgatcgagctaaacatcagaacaggacccactctaacgagaaaccttacatctgcaagatccctggttgtactaaacgttacacagacccctcatccctaaggaagcatgtgaagactgtccatggtccagacgctcatgtaacgaagaaacagcgcaacgacgtgcatctacgaacacccctgctgaaggaaaatggcgactcggaggctggcactgagcctggcggacctgaaagcaccgaggcttcaagcactagtcaggctgtggaggactgcctacatgtgcgggccatcaagacagaatcttcaggtctgtgccaaagctcccccggagctcagtcatcatgtagttctgaaccttctccactcgggagtgcccctaataatgattcaggcgtggaaatgccaggcactggaccggggagtctcggtgatctcactgccctcgatgatacgccacccggcgccgatacatcagccctcgcggcaccaagtgctggtgggttacaactccgaaagcatatgaccactatgcatagatttgagcagctgaagaaggagaaactaaaatccctgaaagactcctgctcatgggctggacccaccccacataccaggaacaccaaacttcccccgctccctgggagcggtagcatccttgaaaacttcagcggttccggcggcggcgggcccgctggactgcttcctaacccccgcctctcagagctctcagcttccgaggtgaccatgcttagtcagttacaggaaagacgagactcaagtaccagtacagtctcttctgcgtatacagtgtcaagacggtcctctggcatttccccctatttcagcagccgccgttccagcgaggcttcccccctcggcgcaggccgcccacacaatgcaagctccgccgactcctacgatcccattagcactgacgcaagcaggagaagctctgaggcaagtcagtgctctggcggctctgggttattgaatttgactccggctcagcaatacagcctgcgtgcaaagtatgccgccgccaccggtggacctccccccactccactccccggcctggagaggatgtccttacgcactagactggcccttctcgatgccccagaacggaccctgcctgccgggtgcccccgcccactgggcccaagacgaggatctgatggccccacatacggacacggtcacgccggtgctgcgcccgcatttcctcacgaagccccaggtgggggcgcccgacgtgctagtgaccccgttcggaggcccgacgccttatctttgccgagggtgcaacgttttcactcaacgcacaatgtcaaccctggcccattgcctccctgcgctgacaggcgaggacttaggttacagtctcatccttccacggacggtggcctcgcgcgcggggcctactcaccgaggcccccctccataagcgaaaacgtggccatggaagctgtcgctgccggcgttgacggggctggccccgaggccgacttggggctgccagaggacgatctggtattaccggacgacgtcgttcagtatattaaggcccatgcttcgggcgcactcgatgaaggcaccgggcaagtgtatccaactgaaagcacaggcttctctgataatcccagattgccaagtccgggtctgcacggtcaacggcgcatggttgccgccgactcaaatgtgggcccctctgcccctatgctgggcgggtgtcagcttgggttcggggcgcctagtagcctgaacaaaaataatatgcccgtgcaatggaacgaagtgtcctctggaacggtggacgccctcgcctctcaagtgaagccccccccattcccccaggggaatctggcggtggtgcagcaaaagcccgcattcggccaatacccagggtattctcctcagggcctgcaggcatcacctggcggcctcgatagcacccagccacatctacagccaagatccggcgctccttcccaagggatcccgcgcgtaaactatatgcaacagctgcgccagcccgtggctggctcccagtgccctggaatgacgaccactatgagccctcatgcctgttacggccaggttcacccccagttatcgcctagcactatttctggagccctaaatcagttcccgcaatcgtgtagtaacatgcctgccaagccaggccatttgggccacccacaacagacagaagtggctcctgacccgaccacaatgggtaaccggcacagagagctgggggtgcccgattctgctctggcgggcgtgccccctcctcaccctgtccagagctaccctcagcaatcccatcacctggctgcatcaatgtctcaggaagggtaccaccaggtacctagcctgctgcccgctcgacagcccggcttcatggaaccccagactggaccaatgggagttgccacagccggttttggactggtacagccgagaccgccacttgaaccaagtccgactggccgacaccgcggagtgcgcgccgtccagcagcagttggcgtacgcacgcgcgactggccacgccatggccgccatgccctcatcacaggagaccgccgaggccgtacctaagggggcgatgggtaacatgggttccgtcccacctcagccacccccccaggacgcaggcggagcaccagatcactccatgctctattactatggccaaatccatatgtacgaacaagacgggggtctcgaaaatctgggctcatgtcaagtaatgagaagccaacctccgcaacctcaagcctgtcaggactctatacagccgcagcctctgccatctccgggcgttaatcaggtgtccagcaccgtcgacagccagctcctcgaagctcctcaaatcgattttgacgctatcatggatgacggagaccatagctcactgttttctggggccctctctccgagccttttgcactcgctgagccagaactccagccgacttaccacgccccgtaactcactcaccctcccatcaataccggctggcattagcaacatggctgtgggggatatgagcagtatgctgacatcactggctgaggagtctaaattccttaacatgatgacatag

SEQ ID NO: 189162 - DNA, 4743 bp, synthetic construct
  misc_feature 1..4743: note = Description of Artificial Sequence: Synthetic coding sequence
  source 1..4743: mol_type = other DNA
atggaggcccagagccacagcagcaccaccaccgagaagaagaaggtggagaatagcatagtgaagtgcagcactcgcacagatgttagcgaaaaggctgtggcatcgtcaaccacctccaacgaagatgagtcacctggccagacataccacagggagagacggaacgctataacaatgcagcctcagaacgtacaggggctatctaaggtgagtgaagagcccagtacaagctccgatgaacgcgcctcattgattaaaaaagagattcacggctccctaccccacgtggccgagccatctgtaccttatcgcgggacggttttcgccatggacccgcgaaatggttacatggagcctcactatcatccgccccatctcttcccagctttccacccacctgtccctatcgatgcaaggcaccatgaaggaaggtaccactacgaccccagccctataccacccctccacatgacttcagccctcagctcttcccctacatacccagatctgccattcatccggattagcccacatcgcaaccctacagcagcctcggaatctccctttagcccgccgcacccgtacataaacccctacatggattacatacgctcactgcacagctctcccagtctgtccatgatcagcgccaccaggggcctgagtcccacagacgctccacacgcaggcgtgagccctgcagagtactaccaccagatggccttgctgactggtcagcgtagcccctatgccgacatcattcccagtgccgcaaccgcaggaacaggcgcaattcacatggaatacctgcacgccatggactccacccgctttagttctccccggctgtctgcacggccctccagaaagcgtacactctccattagcccgctatctgaccacagttttgacctgcagactatgattcgcaccagcccaaacagtctggtgactatcctcaacaactcgcggagcagttcctccgctagcggaagctacgggcatctgtctgcgtctgcgatctcccccgctttgagctttacgtactcatctgcccccgtgagcctgcacatgcaccagcaaatactctctcgccaacaaagcttaggcagcgcatttggccactcccctccccttatccaccccgcccccacattccccactcagcgtcccatccctggaattcctaccgtgcttaacccggtgcaggtgtctagtgggccttcagaatcctctcaaaataagccaacttcggaaagcgccgtaagctctacaggtgaccccatgcataataaacgctccaagatcaagccagatgaggatcttccatcccctggagctagaggtcagcaggaacagccagagggaaccaccctggttaaggaagagggagacaaggatgagtcaaagcaagagccagaggtaatttacgagacaaattgtcactgggaaggatgcgcgcgcgagttcgacactcaagagcagctggtgcaccatattaacaatgaccacatacacggcgagaagaaagagtttgtgtgccgctggctcgattgttcaagagagcagaagccattcaaagcacagtatatgctggtcgtccacatgcgacgtcacaccggggagaaaccccacaaatgcactttcgagggatgcactaaggcgtattctaggctggagaacctgaaaactcatctccgcagccacacgggagaaaagccttatgtctgtgagcatgaaggctgcaacaaggccttttccaacgcctccgatcgcgccaaacaccagaaccgtactcatagcaatgagaagccatacgtttgcaagatacctggatgcacaaaaagatataccgatccctcgtccctcagaaaacacgtaaaaaccgtgcacggccccgaagcacacgtaactaaaaagcagcggggcgatatacatccaaggcccccgccgccacgagatagcggctcacacagccagagccgctctcccgggcggcccacccagggagcactgggagagcaacaagacttatccaatactactagtaagcgagaagaatgcctgcaggtcaaaaccgtgaaggcggagaaacccatgacctctcagccttcgcccggtggccagagtagctgttcttcccaacagagccccatatctaattactcgaatagtgggctggagctcccgctaaccgacggaggcagcattggcgaccttagcgcaattgatgagacacccattatggatagcactatcagtaccgcaaccacggccctagctctacaggcacgcagaaacccagcagggacaaaatggatggagcatgtcaagttggaaaggctaaagcaggtgaacggcatgtttcctcgacttaatcccattctgcccccaaaagctcccgcagtgagccctctgatcggcaatggaacgcagtctaataacacctgttctctaggcgggcccatgactcttctgccagggcgttcagacctgtctggagttgacgtgacgatgctgaatatgctgaacagaagggattcctccgcctctacaatatcctcagcctatctcagtagtagaaggtcctctggcattagcccctgttttagttcccggagaagctctgaggcttcgcaagccgagggtagaccacaaaatgtgtccgtggctgactcatatgatccgatttccacggacgcaagccgacggagcagtgaagcatcacaaagcgacgggctgccctctcttctttccctgaccccagcgcaacagtaccggctcaaggctaaatatgcagcagcgactggtggacctccccccacccccctgcctaacatggaaaggatgagtctcaaaactcggttggccttgttgggcgacgctttggagccaggtgtggccctaccccctgtgcacgctccccgtcgctgtagcgacggcggcgcccatggctatggcagaaggcatttgcagccccatgacgcacctgggcatggggtccgacgcgcttccgacccagttagaacagggagcgagggactggcccttccgcgagtacctcggttcagtagcctttcttcctgtaatccccccgcaatggccacatctgctgaaaaaagatctttggtgctgcagaattacacccgccctgagggtgggcagagccgaaattttcatagcagtccatgcccaccatccatcacagagaatgtcacactggagtcacttaccatggacgcggatgcaaatctcaacgacgaagactttctgcctgatgatgtggttcaatacctcaactcccagaatcaggctggttatgagcagcatttcccctcagcattacccgatgattcaaaggtgccccatggcccaggggactttgatgccccaggcctccccgactctcatgccggccaacagttccatgctctggagcaaccgtgtcccgaggggagcaagaccgacctacctatccaatggaacgaagtgtcgtccggttcagcggatttgagttcgtctaagctgaagtgcgggccccgccccgccgtgccccagacaagggctttcggcttctgtaacggaatggtggtgcacccacaaaaccctttacggtcaggccctgccggtggttaccaaaccctgggtgagaactccaacccatatggggggcctgagcacctaatgctccacaactcaccaggatcagggacaagcgggaacgctttccacgagcagccctgcaaggctccccagtacggcaattgtctgaacagacagcctgtggctcccggtgctcttgatggggcatgcggtgccgggatccaagcgtctaaacttaagtccacccctatgcagggatctggaggacagctcaacttcggcttaccagtagcacctaatgagtccgctggctcaatggttaacggtatgcagaaccaagatcccgtcggccagggctaccttgcccaccagcttcttggggattccatgcagcatcccggtgcagggcggcccgggcaacagatgttaggtcagatctccgctacctctcacatcaatatatatcagggcccagagagctgtttgccaggggcacatggtatggggtcccagcccagtagtctggccgttgtgaggggctatcagccttgtgcaagtttcggtggtagtcggagacaggccatgcctagggactcactagccctgcagagtggacagctatccgatacttcacagacctgtagggtcaacggcatcaaaatggaaatgaagggacagccccaccctttgtgttcaaacctacagaactactccggccagttctatgaccagaccgtgggattttcacagcaggacacaaaagccggaagtttcagcatatctgatgcatcctgcctgctgcagggtacctcagccaagaatagtgaactgttgtcccccggagcaaaccaagtcacctcgacggttgatagtcttgattcccacgacctggagggggttcaaatagatttcgatgccatcatcgatgacggcgatcactcctctctgatgtctggcgccctttccccatcaatcattcaaaacctgtcccactcaagttctcgactcaccaccccacgcgcaagcctgccctttcccgccctttccatgtctacaacgaacatggctatcggagatatgtccagccttttaacgagcctggccgaggaatccaaattcctggcagtgatgcaatag

SEQ ID NO: 189163 - DNA, 543 bp, synthetic construct
  misc_feature 1..543: note = Description of Artificial Sequence: Synthetic coding sequence
  source 1..543: mol_type = other DNA
atggaggcccagagccacagcagcaccaccaccgagaagaagaaggtggagaatagcatagtcaagtgttcaactaggaccgacgtgagcgagaaagctgtggcatcttcgacgacctcaaacgaagatgagtcacctggacagacataccatcgggagcggcgcaatgctatcactatgcagccacaaaacgtacaggggctgagtaaagtgagcgaggagccgtccacttcctctgacgaaagggctagtctgattaagaaagagatacatggctccctgccacacgttgctgagcctagcgttccttaccggggaacggtcttcgctatggatccgcgaaacggttacatggagccgcactatcatcctcctcacctttttccggcgttccatccaccagtgcccattgatgcgaggcatcacgagggccggtatcattatgatccgtcacccattcctccgttacatatgactagtgcactgtcctcttcaccgacttatccagaccttcctttcatcagaatttcgccacataggtag

SEQ ID NO: 189164 - DNA, 1131 bp, synthetic construct
  misc_feature 1..1131: note = Description of Artificial Sequence: Synthetic coding sequence
  source 1..1131: mol_type = other DNA
atggccgccctgggcgacatccaggagagccccagcgtgcccagccccgtgagcctgtctagtcctggaacaccggggacccagcatcacgagccgcagttacacctccacgggcaccaacatggaagtcccggctcttctcctaaagtgctgtctcagccttccgatctggatctgcaggacgtggaagaggtggaaattggtcgcgatactttctggcctgacagcgagcccaaaccggagcaggcaccccgctcccccggctcacaggcaccagacgagggggccggcggcgctctgcggagcctgctgagatccttgccccgacgtgcacgctgctcagctggctttggccctgagagctccgctgaaaggcctgcggggcagcctcctggcgcagtcccctgcgcccagcccagaggagcctggcgggtaacgctcgttcagcaggcggcagccggacctgagggagcaccagagagagctgccgagctcggagtgaatttcggtaggagccgtcaaggatccgcaaggggcgctaagccccaccgctgcgaagcttgcggcaagagctttaaatacaactcccttcttttgaagcaccagcgaattcacactggagagaaaccttacgcctgccacgaatgcgggaagcggttccgcggctggagtggctttatccaacaccatagaattcacaccggggaaaagccctacgaatgtggacagtgcggcagagcgtttagccatagtagccacttcactcagcatctgcgtattcataacggcgaaaaaccctacaaatgcggggagtgcggacaagcatttagccagtcttccaacctggtcagacaccagcgcttgcatactggtgagaaaccatacgcgtgttcccagtgcggaaaggccttcatatggagctcagtactgatagagcatcaacgaatccacaccggggaaaagccatacgaatgctctgattgcggcaaggcctttaggggcaggtcacacttcttccgtcatctgcgaacacataccggtgagaaaccctttgcgtgcggcgcctgtgggaaagcgttcgggcagagttcccagctgattcaacaccaacgagtccattaccgggaatag

SEQ ID NO: 189165 - DNA, 1131 bp, synthetic construct
  misc_feature 1..1131: note = Description of Artificial Sequence: Synthetic coding sequence
  source 1..1131: mol_type = other DNA
atggccgccctgggcgacatccaggagagccccagcgtgcccagcccagtctcccttagttcaccgggcacccctggtactcagcaccacgaacctcaactgcatcttcacgggcaccagcatggcagtccaggatctagccctaaagtgctgagccagccctccgatctggacctgcaagatgtggaagaagtagaaattgggcgagacaccttttggcccgattccgagcccaagcctgaacaagcccccagatctccaggtagtcaggcaccagatgagggagcaggcggcgcactgcggagcctgctgcggtccctgcctagaagggcccgctgctctgcagggttcggccctgaaagtagcgctgagcgtccggctggtcaaccccccggggccgtgccttgcgcacagcctaggggcgcgtggagagtgacgcttgttcaacaggctgcggccggccccgagggagcccccgagcgagcagccgaactgggtgttaacttcggccggtctagacaggggtccgctaggggcgcaaagcctcatcgctgcgaggcctgcggcaagagcttcaagtacaactcactgctgctgaagcaccagcgtattcacacaggagagaagccctacgcatgccacgagtgcggcaagagattccgcggctggagcggttttatccagcaccacagaatccatacgggggagaagccgtatgagtgcggccagtgcggccgcgcgtttagccactcatcccacttcacccagcacttacggatccacaatggtgaaaaaccatacaagtgcggtgagtgcggccaggctttttcacagtcatccaatctggtgaggcatcagcgattgcataccggggagaaaccatatgcctgcagtcagtgcgggaaggcatttatatggagctccgtccttatagaacatcagaggatccatacgggcgaaaaaccttatgagtgcagtgattgcggcaaagcttttagaggaaggtctcatttctttcgccatctgaggacacatactggtgaaaaaccctttgcatgtggcgcttgcgggaaggcttttggacagtcatctcagctcatacaacaccagagggtgcactatagggaatag

SEQ ID NO: 189166 - DNA, 801 bp, synthetic construct
  misc_feature 1..801: note = Description of Artificial Sequence: Synthetic coding sequence
  source 1..801: mol_type = other DNA
atgcgggtgaccctggccaccatcgcctggatggtgagcttcgtgagtaattattcgcacactgctaacattctgcctgacattgagaatgaggactttattaaagactgcgttcgcattcataacaaatttaggtcagaggtgaagccgactgccagtgatatgctttatatgacctgggatcccgccctcgctcagatcgccaaggcctgggccagtaactgccaattcagccacaatactcgccttaaacctccgcacaagctgcatcctaattttacaagcctgggcgagaacatctggaccggctcagttccaatcttcagcgtttcctcagccattaccaactggtacgatgaaattcaggactatgactttaagactaggatttgcaaaaaagtctgcggacattatacccaggtggtgtgggcagattcatacaaagtgggttgtgctgtccagttctgccccaaagtgtccggcttcgacgctctgagcaatggggcgcatttcatctgcaactacggaccaggaggcaactatccaacttggccgtataagcgtggtgcaacatgctcggcgtgcccaaacaatgataaatgtctggacaatctttgtgtgaacagacagagagatcaggtcaagaggtactactccgtagtgtaccctgggtggcctatctacccgaggaacagatacacatctctctttcttatagtgaatagtgtgattcttatactgtctgttatcattacgattcttgttcagcacaaatacccaaatctggtcctgctggactag

SEQ ID NO: 189167 - DNA, 429 bp, synthetic construct
  misc_feature 1..429: note = Description of Artificial Sequence: Synthetic coding sequence
  source 1..429: mol_type = other DNA
atgagcgacagcctggtggtgtgcgaggtggaccccgagctgaccgagaagctgaggaagtttcgattcaggaaagaaacagacaatgccgccataataatgaaggtggacaaggatcgccaaatggttgtgctcgaggaagaatttcagaatatatccccagaggagttgaagatggagctgccagaacgtcagccccggttcgttgtgtactcttacaagtatgtccatgatgacgggcgggtgtcttatcccttatgtttcatcttctctagtcctgtaggttgtaaacctgaacagcagatgatgtatgctggcagcaagaaccgcctggtccagaccgcagagctgaccaaagtgtttgagattagaactactgatgacttgactgaagcttggctgcaggaaaagctgagcttcttcaggtag

SEQ ID NO: 189168 - DNA, 429 bp, synthetic construct
  misc_feature 1..429: note = Description of Artificial Sequence: Synthetic coding sequence
  source 1..429: mol_type = other DNA
atgagcgacagcctggtggtgtgcgaggtggaccccgagctgaccgaaaaactgaggaagtttcgctttcgtaaagagaccgataacgcagccattattatgaaggtcgacaaagaccgtcagatggtagtcctggaagaagagttccagaatatttcccccgaggaattaaagatggaactgcccgagcgccagccgaggtttgtcgtatacagctataaatacgtacacgatgatggaagagtgtcctatcctctgtgttttatcttcagcagcccagtggggtgcaagccagaacagcagatgatgtacgctggctcaaaaaataggctagtccagacggctgagctcacgaaggtttttgaaattcgcacaaccgatgacctaacagaagcttggcttcaggaaaagctcagcttcttcagatag

SEQ ID NO: 189169 - DNA, 1299 bp, synthetic construct
  misc_feature 1..1299: note = Description of Artificial Sequence: Synthetic coding sequence
  source 1..1299: mol_type = other DNA
atggagcggcggcggatcaccagcgccgcccggcggagctacgtgtcatcaggggaaatgatggttggcggtctggctcccggtagacggttggggccaggaacccgcctgtccctggctaggatgcctccaccactgcccacgagagtggacttttctttggccggtgccctcaacgctggcttcaaggaaacgagagcaagtgaaagagccgaaatgatggaactgaacgaccgattcgcctcctatattgagaaggttcgatttctggagcagcaaaacaaggcactcgccgccgagctcaaccagctgcgagcgaaagagcctactaagttagctgacgtctatcaagccgaactcagagagctcaggctgcggctcgatcagctgacagccaacagcgctagattggaagtggaaagggataatctcgcgcaagatctcgccaccgtgaggcaaaaactccaggatgagacgaacctgcgccttgaggccgaaaataatctggcagcctatcggcaggaagccgatgaggctacgctggctcgtctggacctggaacgcaagattgagagcctcgaagaagagatccgatttcttcgtaaaattcacgaggaggaggtgagggagcttcaggagcagctggccaggcaacaagttcatgtggaattagatgtggccaagccagatcttaccgctgcgttaaaggagatccgcacccagtatgaggcgatggcctcgagtaacatgcatgaggcagaagagtggtatcggagtaagttcgcagatttgacagacgctgctgctcgcaatgccgaacttttgcggcaagcaaagcacgaggcaaatgactataggaggcaactgcagagtctgacatgcgatttggaatccctaagaggaaccaacgagtcccttgaaaggcagatgagagaacaggaggagcgtcatgttagagaggccgcaagttatcaagaagctctcgcaagattagaagaagaaggacagtcacttaaagacgagatggcaaggcatctacaagagtatcaggacctcctgaacgtaaagctggctctcgatatcgaaatcgcaacgtatagaaagttacttgaaggtgaagaaaaccgaataaccatccctgtccagacgtttagcaatttgcagatccgcgaaacctccttggacaccaagtcggtctcggaaggacacttgaagaggaatatcgtagtcaagactgtggaaatgagagacggggaagtcattaaagaaagcaaacaagaacacaaggatgtgatgtag

SEQ ID NO: 189170 - DNA, 540 bp, synthetic construct
  misc_feature 1..540: note = Description of Artificial Sequence: Synthetic coding sequence
  source 1..540: mol_type = other DNA
atggagcggcggcggatcaccagcgccgcccggcggagctacgtgtcctcaggtgagatgatggtgggcggcttggccccgggcagaagactagggcccggaacccggttgagtctggctaggatgcctccccccctgccgactagagttgacttcagccttgcaggagcactcaatgctggttttaaagaaacccgggctagcgaacgagctgaaatgatggaacttaatgacagatttgctagctatatcgaaaaggtacgtttcctcgagcagcagaacaaggcactggcagccgagcttaatcaactcagggcaaaagagcccacaaaactggctgacgtctaccaggctgagttacgtgagctgcggctgcggctggaccagcttacagccaatagtgcccggctcgaagtagagagagataatttagctcaggacctggccacagtccgccaaaagaagcagatgaaaccgccctggcctgtatggatatggagaggcagactgagtcgatggcggcgtaggagtggcagctag

SEQ ID NO: 189171 - DNA, 1224 bp, synthetic construct
  misc_feature 1..1224: note = Description of Artificial Sequence: Synthetic coding sequence
  source 1..1224: mol_type = other DNA
atggagcggcggcggatcaccagcgccacccggctgagcctggcccggatgcccccccctctgccaacacgcgtggacttctcacttgcaggcgcactcaacgctggcttcaaagagacccgggcctctgagagggccgaaatgatggagctcaatgacagattcgccagctacattgaaaaggtgcgattccttgaacagcagaataaagcactcgcagccgaacttaaccaattgcgagcaaaggagccaacgaaactggcggatgtgtatcaggccgagctgagagaactgcgacttaggctcgatcagctgaccgcaaattcagcccggttagaagttgagagagacaatctggcccaggacctcgctaccgtgaggcagaaactgcaagatgagacgaacctgaggctagaagctgaaaacaatctggccgcctaccggcaggaagctgatgaagcaacccttgcaagactcgacctggagagaaaaatcgagtccctcgaagaagagattcggttcctgagaaaaatccatgaagaagaggtgagggagctgcaggaacagctggcaagacaacaggttcacgtcgagttagatgttgccaagccggatctgaccgccgcccttaaggagatccgcacacagtacgaagcaatggccagcagcaacatgcacgaagcagaagagtggtaccggtcaaagttcgctgacctcactgacgccgccgcgagaaacgccgagttgctacgtcaggctaagcacgaggcaaatgattatagaagacagttgcagtctctgacttgtgatctcgaaagcctcagagggaccaacgaatctctagagcgtcagatgcgcgagcaggaggagcggcacgttcgagaggccgcaagctatcaagaggccctggcacggctagaggaggagggacaaagcctgaaggatgagatggcgaggcacctgcaagaataccaggacctgctgaacgtgaagttagctctcgatatcgaaattgccacctatcgcaaactgctggagggggaagaaaaccgaataaccatacctgtacagacattcagcaacctgcagatccgagagacctcactggataccaagagcgtcagtgagggccacctgaagcgaaacatagtcgtgaagacagtggagatgagggatggagaggtcatcaaggagagcaagcaggagcacaaagatgtgatgtag

SEQ ID NO: 189172 - DNA, 1296 bp, synthetic construct
  misc_feature 1..1296: note = Description of Artificial Sequence: Synthetic coding sequence
  source 1..1296: mol_type = other DNA
atggagcggcggcggatcaccagcgccgcccggcggagctacgtgtcatctggggaaatgatggtgggcgggctggccccaggccggaggttgggtcctgggacccgcctgagcctcgcccgcatgccgccccccctgccaaccagagtggatttttccttggctggagctctgaatgctgggtttaaagagacacgagcttctgagcgcgcagagatgatggagctgaatgatcgctttgcttcgtatatcgagaaggtgaggtttctggaacagcagaataaagctctggccgcagagcttaaccagctcagggcaaaggagccaactaagctggccgatgtatatcaggctgagctgcgagagttgcgtttaaggctggaccagctaacagccaattctgctcgcctcgaggttgagcgggacaacctagcgcaagatctagctacagtgagacagaagctgcaagatgagacaaatcttcggcttgaagctgagaacaatctggccgcgtacaggcaagaggccgacgaggctaccctcgcgagacttgacctggagaggaagatcgaatcactggaggaagagattaggtttctccggaaaatccacgaggaggaagtgcgtgagctccaagaacagctggctcggcagcaggtgcatgttgagctggacgtcgctaagcccgacctcactgctgctctgaaagagatcagaacacagtatgaagctatggcttcgtcgaacatgcacgaagctgaagagtggtaccgtagcaagttcgctgatcttaccgacgcagctgcccgaaacgccgaactattgagacaggcaaagcacgaggcgaacgattaccggcgtcaattgcagtctcttacctgcgacctggagtccttgaggggaaccaatgagagcttggaaagacaaatgagagaacaggaggagcgccacgttcgagaggccgcatcgtaccaggaggctctggccagactggaagaggagggccagtccttaaaggacgaaatggcccgtcacctccaggaataccaggatctgctgaacgtcaagttagctctggatatcgagatagcgacctaccgcaagctgctggaaggggaggagaatcgcattaccatccctgtgcaaacattctctaacctgcagatccgcggggggaaatccaccaaggatggggagaatcataaagtaacaagatatcttaagtccctgacaattagggtcattcccatccaagctcatcaaatagtcaatggcactccccccgcaagggggtag

SEQ ID NO: 189173 - DNA, 1317 bp, synthetic construct
  misc_feature 1..1317: note = Description of Artificial Sequence: Synthetic coding sequence
  source 1..1317: mol_type = other DNA
atggagcggcggcggatcaccagcgccgcccggcggagctacgtgtcctccggggaaatgatggtaggcgggctcgccccgggcagacgactaggccccggcacccggctaagtttggccagaatgcctccaccgctgccaacccgagtggactttagcttggccggggcactcaacgccggttttaaggagactagggcatccgagcgagcagagatgatggagctgaacgaccggtttgcttcctacatcgaaaaggttcgttttctggaacagcaaaataaggcactggccgccgaactgaaccagctccgtgcgaaagagcccaccaaacttgctgatgtgtaccaggcggaattgcgcgagctacggctccggctggatcagctcactgctaacagtgcccgactggaggtcgagagagacaaccttgcgcaggacctcgccaccgtcaggcagaagctgcaggatgagacaaatctaagactcgaggccgaaaataatctcgctgcctacaggcaggaagcggacgaggcaaccctcgcccggcttgatctcgaacgtaagattgagagtctggaagaggagataagatttttgcgcaagatccacgaggaagaggtgagggagctgcaagaacagctggcgcgccagcaggtccacgtagagcttgatgtagctaaacccgacctcacggcggccttgaaggaaatacgcacacagtacgaggcaatggcctcatctaatatgcacgaagctgaggagtggtatcggtcaaagtttgctgacctgaccgacgctgcagccaggaatgcggagctgctgcgccaggccaaacatgaagcaaacgattatagaaggcagctccagtccctaacttgcgatctggaaagtctaagaggtacgaatgagtccctagagagacagatgcgggaacaggaggagcgtcatgtgagagaggccgctagctaccaggaagccctcgccaggttggaggaggagggtcagtctctgaaggacgaaatggccagacacttacaggaataccaggatctgctcaacgtcaagttggctcttgacattgagattgcaacttatagaaagttgcttgagggcgaggaaaatcggattacaatcccggtgcagacattttctaacttgcaaataagggggcagtactctagagcctcatgggaggggcactggagtccggctccatcaagccgggcctgtagactgctccagacaggaaccgaagatcaaggtaagggcattcaattatcattgggggccttcgtcacattgcaacgatcctag

SEQ ID NO: 189174 - DNA, 861 bp, synthetic construct
  misc_feature 1..861: note = Description of Artificial Sequence: Synthetic coding sequence
  source 1..861: mol_type = other DNA
atggccgcccgggtgctgcgggcccggggcgccgcctgggccggcggtctgctgcagcgagcggctccctgttccctgcttcctcgcttgcgaacatggacctcaagtagcaatcgctcgcgggaggatagttggctgaaatccttattcgttcgcaaagtagacccacggaaagacgctcatagtaacctcctcgctaagaaagaaaccagcaatttatataaactgcagtttcataacgtcaaacctgaatgcctggaggcctacaacaagatctgccaagaagtattacccaaaattcacgaggataaacattatccttgtacccttgtaggaacttggaacacctggtatggcgagcaggaccaagccgtgcatctgtggagatacgaggggggatatcccgccctcactgaggtgatgaacaaactgagggaaaataaggagtttctggaatttcgcaaagctcgcagcgatatgttgctgagccgcaagaatcagctgcttttggagttctccttttggaacgagccagtgccacggagcgggcccaacatctatgagctgagatcctaccagctgcgaccaggtactatgatagagtggggtaactactgggcccgagccatacgattcagacaggatggtaatgaagcagttggtggctttttcagccagatcggacagctctacatggtccatcatctgtgggcataccgcgatttgcaaacccgggaggatatccgcaatgccgcctggcacaagcatgggtgggaggagctagtctactacacagttcccctaatccaagaaatggaaagccgtattatgatcccactcaaaacttcaccgcttcagtag

SEQ ID NO: 189175 - DNA, 744 bp, synthetic construct
  misc_feature 1..744: note = Description of Artificial Sequence: Synthetic coding sequence
  source 1..744: mol_type = other DNA
atggccgcccgggtgctgcgggcccggggcgccgcctgggccggcggactgcttcagcgcgctgcgccatgctcgcttctcccacgtctgcgcacttggacatccagttcaaacaggagcagagaagattcctggttgaagtctctgtttgtcaggaaggtggatccaaggaaggacgcacattctaacctcctggccaagaaagagacttcaaacctttacaaacttcagtttaagcggtgttgccaacgttttactaagatcaatacaaccttggtgctctggtgggggcttggaacccgtgggatggcgtcccggactaaattagaattcctggagtttaggaaggcccgcagtgacatgttgctgtcacgcaagaaccagttgttgctggaattttctttctggaatgagcctgtgccaaggagcggtccgaatatttacgaacttaggtcataccagctacgaccaggcacaatgattgagtgggggaattactgggcaagggccataaggttcaggcaggatgggaacgaagccgtgggcgggttcttctcccagattggccagttatatatggttcaccacttatgggcttaccgtgatctgcagaccagagaggacattcgaaacgccgcctggcataagcacgggtgggaggagctcgtgtattataccgtcccacttattcaagagatggaaagcagaatcatgattcctctcaagaccagtccactccagtag

SEQ ID NO: 189176 - DNA, 4683 bp, synthetic construct
  misc_feature 1..4683: note = Description of Artificial Sequence: Synthetic coding sequence
  source 1..4683: mol_type = other DNA
atggacgacgaggacggccggtgcctgctggacgtgatctgcgacccccaggcactgaacgactttctccacggctctgaaaagctagattccgacgaccttttagataaccctggtgaagctcagtctgccttttatgagggaccaggcctccatgttcaggaagcctcaggtaatcatctcaaccctgagccgaatcagcccgccccaagtgtcgacctcgactttttagaagatgatattttgggctctccggcaacaggtggcggagggggaggctcgggtggcgccgaccaaccttgtgacattctgcagcaatcattacaagaggccaatatcactgagcagactctcgaagctgaagctgagctggacctaggtccgttccagctgcctaccctgcagccggccgacggcggcgctggaccaaccggtgccggcggtgccgctgccgtggcggcaggtccacaggccctgttccctggcagtacagaccttctgggtctgcaggggccccctaccgtcctcacccaccaggccctcgtccccccgcaagatgttgtcaataaggccctgtccgtgcagccattcttacagccggtgggacttggtaatgtaactcttcaacccatacctggcctgcaggggcttcctaacgggagccctggaggggccactgctgccaccctcggcttggctccaatccaggtggtgggccagcctgtaatggctctgaatactccaacgagccaacttcttgctaaacaagttccagtgtccggctacctcgcctccgctgcaggcccgagcgagccagtaacactggcttcagctggtgtgtccccacagggagctgggcttgtgatacagaagaatctgagcgctgccgtggctactactctgaatggcaacagtgtgtttggaggtgctggcgcagcgtcagctccgacaggaaccccttccgggcagcctctcgctgttgcccccgggctgggatctagtcctctcgtgcctgcacccaatgttattctgcaccgtacccccacgcccatacaacctaagccagcgggtgtcttaccccccaagttgtaccagctaacccctaagccttttgctcccgcaggcgccacgttgacgatacagggagagcctggcgctctgccccaacagccgaaggcccctcaaaaccttacgttcatggccgctgggaaggctggacaaaacgttgtactctccggcttccccgcccccgctttgcaagccaacgtgttcaagcagccacctgcgacgacgaccggagccgcacccccccagcccccaggtgcactctccaagccaatgtccgtgcacctgctcaaccagggatcttccatcgtgattcccgctcaacacatgctgcctgggcaaaatcagttcctgctgcccggcgcacccgccgttcagttgccccagcaactcagcgcccttcccgccaacgttggtggccagatcctggcggcagcagcgccacatactgggggtcaactgattgctaatcctattctgacgaatcaaaatcttgcggggccgctgtcccttggacctgtgctggcaccacacagcggggcacactcagctcatattctgtctgccgctccgattcaagtcggccagccagctctgtttcagatgcccgtgtccctggcggccgggtctttgcctactcagagccagcctgcaccagccggccccgccgcaactaccgtcctccagggggtgaccctgcccccgagtgccgtagcgatgctgaatacacccgacggcctggtgcaaccggctacccctgctgccgccacgggtgaggccgcccctgtactaacggtgcagccagccccacaggcgcccccagccgtgtccacccccttgccgttaggcttgcagcagccacaggcacaacaacctccacaggcccccacgccgcaggctgccgcacctcctcaagcaactaccccacagccaagcccgggcctggcaagcagccccgaaaaaattgtcctgggtcagccacccagtgccacacctacagccattcttacccaggacagcctccagatgtttctgccccaggagcgctcacaacaaccactgtctgctgagggacctcacttatcggtccccgcctctgtgatcgtgtcggcccctcctcctgcccaggatcctgctcctgccacacccgtcgctaagggggccggcttagggccacaagcacctgatagccaagcatcccctgcccccgctccacaaatccctgccgccgctcctcttaaagggcccggcccctcaagcagcccctcactcccccaccaagcgcccctgggggattcgccacacctaccatccccacatccaacaagacctcccagccggccaccatctagaccacaatccgtttccagaccaccatccgagcctccactgcacccatgtccaccaccacaggcacctcccaccctgccagggatctttgtaatccaaaaccagctcggggtcccaccccctgcaagcaatcccgcacctacagctccaggtccccctcagcctcctctgagaccgcagtctcaacctcctgaggggcccttgcctcctgctccacatctgccaccctcaagtacatcatccgccgtggcgtcctcctctgaaacctcatccaggttgcccgcgccaacgccctccgatttccaattgcagttcccaccctctcagggcccccacaaatcacccacccccccccccacgttgcatctggtacccgagcctgcggcccctcctccgccccccccacgaactttccaaatggtcaccaccccgtttcccgcactccctcagcccaaagccctgctggaacgctttcatcaggtcccctccggaatcatactgcagaacaaagccggaggggcccccgccgcccctcaaacttccacttcgctgggccccctgacctccccagctgcgtcagtgctcgtgtcagggcaggcaccatccgggacccccacggcaccaagccatgcccccgctccagcgcccatggcggcaacaggcctgcctcctctgctacccgcggagaacaaagcattcgcctctaaccttcctaccttaaacgtggccaaggcggcgagctctgggccagggaagcctagtggcctgcagtacgaaagcaagctttccggactgaaaaaacccccaacgttacagccctcgaaggaagcttgttttctggaacatttgcataaacaccagggatctgtgctgcacccagattataagaccgccttcccttcatttgaggacgccttgcacagactgctgccgtatcatgtgtatcaaggtgctcttccaagtccaagcgattatcataaagttgatgaggagttcgaaactgtctcgacgcagctgctgaaacgcacacaggctatgctgaacaagtaccgcctgctcctgttagaggagagccggcgggtgtctccttcggccgaaatggtgatgatagatcgaatgttcatccaggaagagaagacaaccctagctctcgacaagcagttagctaaggaaaaacccgacgagtacgtttcaagctctcggtccctgggcttgcctatcgcggcatcgagtgagggacatcgcctcccgggccatggccctctgagctcctcagcacccggagcctcaacgcagccaccgcctcacctgcctacgaagctggtgattcgccacggcggagcaggcggctcacctagtgttacttgggccagagcatcctcatccctgtcatcgtcatcgagcagctcatctgcagcgagctccctcgacgccgacgaggacggtcctatgccaagtcgcaataggcctccaatcaaaacttacgaggctaggtctaggattggcctgaaactaaagatcaagcaggaagccggcctgagtaaggtggtgcataacactgctcttgaccccgtacaccaaccacctcccccaccggcaaccttgaaggtggcagaaccccctccaaggccaccaccacctccgcctcccacgggccagatgaacgggacagtggatcatccaccccctgcggcacccgagaggaagccactcgggactgccccccattgcccccggttgcctttaaggaagacctatagagagaacgtcggaggacccggagcacccgagggtacaccggctggtagggcgcgcgggggttcacccgcgcccctgcccgctaaggtggacgaggctacatcaggtcttataagggagctagccgcagtggaagatgaactatatcagcggatgttaaaggggcctccacctgaacccgctgcttctgcggcccagggcactggcgaccccgactgggaagcgccagggctgccgcccgccaagaggaggaaatcggaatctcctgatgtggaccaagcctcattttcatccgatagtcctcaggacgacaccctaactgagcacctccagtctgccatagactccatactaaacctgcagcaggctccaggtcgaactcccgcaccctcatatccccacgcagcttccgctgggacaccagcgagtccccccccattgcatagacctgaagcgtaccccccctcttcccataatggggggctgggcgccaggaccctgacacggtag

SEQ ID NO: 189177 - DNA, 1437 bp, synthetic construct
  misc_feature 1..1437: note = Description of Artificial Sequence: Synthetic coding sequence
  source 1..1437: mol_type = other DNA
atggccgccggcggcagcggcgtgggcggcaagcggagcagcaagtcagatgctgacagtgggtttctcggcctccgcccaacgtctgtggaccccgctctccgacgacgcagacgaggccctaggaacaagaagcggggatggcgccggttagcccaggaacctttaggacttgaggtggatcagtttttggaagatgtgaggctgcaggagcgcacgtccgggggactcctgagcgaggcgccaaatgagaaactgtttttcgtggatacggggtctaaagagaagggcctcactaagaaaaggaccaaggtgcaaaagaagtctctccttctcaagaagcccttgagagtggacctgatccttgagaacactagcaaagtgcctgcaccaaaagatgtgctggctcaccaggtgcctaacgcgaagaagctgcggcgcaaggaacagttatgggaaaagcttgccaaacagggcgagctcccccgagaagtgcggagggctcaggcgagactcctgaaccctagtgccacgcgagccaaacctggacctcaggacactgtcgagcggcctttctacgacctctgggcttctgacaacccgcttgatagacctctggtgggtcaggacgagtttttcctggagcaaacaaagaagaagggggtcaagcggccagcccgtttgcacaccaagccttcccaggcacccgctgtcgaagtcgctccggcaggcgcctcatacaaccccagcttcgaggaccaccagacattactctccgccgcacacgaagtggaactgcaacgacagaaggaagctgagaagctggaaaggcagttggctcttcccgccacagagcaggcagcgacccaagagtctaccttccaagagctgtgtgaggggcttctcgaggagagcgacggggagggagagcctgggcaaggcgagggcccggaagcaggtgacgcagaagtctgccctacccccgcccggttagcaaccacagagaaaaagaccgaacagcagcggcgcagggagaaggcagtacatcgcctcagggtgcagcaggccgctctgcgagctgcacggttgcgtcaccaagaactgtttcggcttcggggcatcaaggctcaggtggctctgcggctcgcggaactggcccggcgtcagagacgtcgtcaggcccggcgcgaggccgaggccgacaaacccagaagactcggacgactgaaataccaggccccggacattgacgtccagttaagctctgagttgacagattcactgcggaccctgaaacccgaagggaacatcttgagggacaggttcaaatctttccaaaggcggaatatgatcgagcctcgcgagcgggctaagtttaagaggaaatacaaggtcaaactggtggagaagcgcgctttcagggagatccagctctag

SEQ ID NO: 189178 - DNA, 1419 bp, synthetic construct
  misc_feature 1..1419: note = Description of Artificial Sequence: Synthetic coding sequence
  source 1..1419: mol_type = other DNA
atggccgccggcggcagcggcgtgggcggcaagcggagcagcaagagtgacgcagatagtggctttctgggcctgcggccgacgtcagtggatccagccttaaggcgcagaaggagaggcccgagaaataagaaacgtggctggaggcgattagctcaggagcccctggggctggaggtcgatcaattcttagaggatgttcgcctgcaggaacgaactagtggcgggctcctttctgaggccccgaacgaaaagctcttctttgttgacacgggctccaaagaaaaaggcctgaccaaaaagagaacgaaagtgcagaagaaatctctgctgcttaagaagcctctgagggtagacctgatactggagaatacttctaaggtccccgctccaaaggacgtgcttgctcaccaggtcccgaacgcaaaaaaattaaggcgcaaagagcagttgtgggaaaagctggctaaacagggtgagttgccccgtgaagtaaggcgcgcccaggcccggctgctaaatcctagcgcaacacgggctaagccgggtccgcaggacactgtcgagcgtcctttctatgatctatgggcatcagacaatccgttagatcgccccttggtgggacaggatgagttcttcctggagcagacaaagaaaaagggcgtgaaacggcccgctagattacacacgaagccttcacaggcacccgccgtggaggtcgctccggcgggtgcatcatacaacccaagtttcgaggatcaccagaccctgctgagcgctgctcatgaagtcgagcttcaacgccagaaggaagccgagaaactggaaagacagctggcactgcccgcaaccgagcaagccgccacacaagagagtacctttcaggagctttgcgaaggactgttggaagagagcgacggggagggcgaacctggccaaggtgaggggccagaggccggcgacgccgaagtctgccccaccccagcacgccaccaccgggaggaggatggggccgccgccgcgcgtcggctctgtactggatgtggatacagccgcccaagatgtgggccaccaggaagcggcaccaggagctgctcaggttgcgccggttcacccgggggaccagaagctggaggagctcggcgacagagaagacgccaggccaggagggaagctgaggctgacaaaccacgacggcttggccggttaaagtatcaggctcccgatattgacgtacagttatccagcgagctgacagacagtctgaggactttgaagccagaagggaatatcttgcgggatcgcttcaagtcattccagcgtagaaacatgatcgagccaagagagcgagccaagttcaagaggaaatacaaagttaaactggtagaaaagagagcctttagagagatacagttatag

SEQ ID NO: 189179 - DNA, 792 bp, synthetic construct
  misc_feature 1..792: note = Description of Artificial Sequence: Synthetic coding sequence
  source 1..792: mol_type = other DNA
atggccgccggcggcagcggcgtgggcggcaagcggagcagcaagtccgatgcagacagcggcttcctaggcctgaggcctactagcgtggaccctgctctgcggcgaaggcgtagaggacctcggaacaagaaaagaggctggcgtaggctggcccaagaacctctgggtcttgaagtcgaccagtttctcgaggacgtccggttgcaggagagaacttctggaggcctcctcagcgaggctccgaatgagaagctcttcttcgtggacacaggaagtaaggaaaaggggctcaccaagaagaggaccaaggttcagaaaaagagcttgttgctgaagaagcctctacgcgtggatctcatcctggaaaatacctccaaggttccagcccctaaagacgtgttggcccatcaggtgcctaacgctaagaagttacggcgtaaggagcaactttgggccagtgataaccccctcgacaggcccttggtgggccaggacgaattttttctggagcagactaaaaagaaaggggttaaaaggcgcgaagcagaggctgacaagcctaggagactcggccgactgaagtatcaggcccctgacattgacgtgcagctgagctctgagttgacggacagcctccggactctgaaaccagagggaaatatcctccgcgaccgctttaaatcattccagagacgcaatatgatcgagccccgagaacgggccaagtttaagcgaaaatataaggtgaagttggttgaaaaacgcgccttccgggaaatccagctgtag

SEQ ID NO: 189180 - DNA, 1656 bp, synthetic construct
  misc_feature 1..1656: note = Description of Artificial Sequence: Synthetic coding sequence
  source 1..1656: mol_type = other DNA
atggcccggggcgccgagggcggccggggcgacgccggctggggcctacgcggagccctcgccgctgtggccctgctctccgcactgaatgcagctggaactgtgtttgctctgtgccagtggagagggttgtctagcgcactcagggcactggaggctcagagaggacgggagcaacgcgaggactctgccctgcggtccttcctcgccgagctcagtcgcgctccacgaggggcaagtgccccccctcaagacccagcttcttccgcccggaacaagcggagtcactctggcgaacccgctccacatatccgagccgagtctcatgatatgcttatgatgatgacttatagcatggtgcccatacgtgtgatggtcgacctgtgcaacagcacaaagggcatctgcctgaccggcccatcgggacccccaggaccccccggagccgggggtctgcctggtcataacggcctcgacggccagcctggaccccagggacctaagggggagaagggcgccaacggaaagcggggaaaaatgggcattcccggagctgctgggaatccaggcgagcggggagaaaagggtgatcacggtgagctgggattgcagggcaacgagggccctccgggacagaaaggggagaaaggggataaaggggatgtgtcaaacgacgtgctcctagctggcgccaaaggagatcaggggccccccggaccccccggacctcctgggcccccaggacctcctggtccacctggttccagaagagccaaaggaccgaggcagccgtctatgtttaatggacaatgtcctggggaaacctgcgccatcccgaatgacgacaccctggtgggcaaagccgacgagaaggcgtctgagcaccattccccgcaggcggaatccatgattacttccattggcaacccagtccaagtcctgaaggtgaccgagacgttcggcacctggataagagagtcggctaataagtcagatgatcgcatctgggtaaccgagcacttcagtgggatcatggtcaaggaattcaaggaccaacccagcctcctgaatggttcttatacatttatccatctgccttactacttccacggttgtggccatgtagtatataacaattccctctactatcataaagggggctctaatacgcttgtgaggttcgagttcggacaggagacctcacagacactgaagctggagaacgccctctactttgaccgaaaatacctctttgccaattccaagacatatttcaacctggccgtagacgagaagggtctctggatcatatacgcctcgtcagtcgatggcagcagtatcctggtggctcagcttgacgagcgcaccttctccgtggttcagcatgtgaataccacctatcctaaatctaaagctggtaatgccttcatagcccggggaatactgtatgtgactgatacgaaggacatgcgggtcacattcgcttttgacctactcggaggcaaacagatcaacgcaaactttgacttgcgcacgtcgcagtctgtgctggcgatgctggcatataacatgagagaccagcatttgtatagctgggaagatggccatctgatgctgtacccggtgcagtttctctctacaacattgaaccaatag

SEQ ID NO: 189181 - DNA, 1284 bp, synthetic construct
  misc_feature 1..1284: note = Description of Artificial Sequence: Synthetic coding sequence
  source 1..1284: mol_type = other DNA
atggtggacctgtgcaacagcaccaagggcatctgcctgaccggcccaagcgggcctcctggtccacccggtgccggcgggctaccagggcataacgggctagacggccagcccggcccacagggtcctaaaggcgagaaaggcgccaacggcaagcgcgggaagatggggataccaggcgccgcaggcaaccccggtgaacgaggcgagaaaggagaccacggcgaactgggacttcagggtaacgagggcccgcctggacaaaagggagagaaaggtgataagggagatgtgtccaatgatgtgctcctggccggtgccaagggtgatcaaggtcctccaggcccccctggcccccctggtccccctggtcccccagggccacccggctcacgaagagccaagggtccaaggcagccatcaatgtttaatgggcagtgccctggcgagacatgcgccattcctaacgatgatactctggtgggcaaggcagatgaaaaagcatctgagcaccacagccctcaggctgagagcatgataactagcatcggaaacccagttcaggttctcaaggtaacagagacgttcggcacttggattcgcgaatcagctaacaaatccgatgatagaatctgggtgacagaacactttagcgggatcatggttaaagaatttaaggaccaaccctcccttctaaatgggagctacacctttatccatttaccttattattttcatggatgcgggcatgtcgtctacaacaattccctgtactatcataagggtgggtccaatacgctggtgaggtttgaattcgggcaggagacatcccagactttaaagctcgaaaacgccctatatttcgatcggaagtacctgtttgcgaattctaagacctactttaacctcgcggtggacgagaagggactatggataatttacgcatcatccgttgatggttccagcatcctggtggcacaactggacgagcgtacctttagtgtggtgcagcatgttaacacgacctatccaaaatccaaagctgggaatgcttttattgcgaggggcatcctgtacgtaacagacaccaaggatatgcgcgtgacgttcgccttcgacctgctcgggggcaaacaaatcaatgcaaatttcgatcttcggacttctcagtcagtgctggcgatgctagcatataacatgcgtgaccagcatctctattcttgggaggatggacacttgatgctgtatcccgtgcagttcctgagcacgacacttaaccagtag

SEQ ID NO: 189182 - DNA, 1284 bp, synthetic construct
  misc_feature 1..1284: note = Description of Artificial Sequence: Synthetic coding sequence
  source 1..1284: mol_type = other DNA
atggtggacctgtgcaacagcaccaagggcatctgcctgaccggcccatctggcccaccaggacctcccggagcaggaggccttccaggccacaacggcctggacggtcagcctgggccacaaggcccaaaaggcgagaagggtgcaaacgggaaaagaggcaaaatgggtatcccaggtgccgctggtaaccccggggaacgaggagagaagggcgaccacggcgagctgggtttacaagggaatgagggtccccctgggcagaagggggagaaaggcgataagggtgacgtgtccaacgatgtgctgctggccggcgccaagggcgatcagggcccacccggccctcccggtccacctggtccgccgggacccccaggaccacctgggagccgcagagcaaagggtccacgtcaaccatccatgtttaatgggcagtgtccaggagagacctgcgccatacccaatgacgacactctagtgggtaaggcagacgagaaggccagtgagcaccacagtccccaagcagagtctatgattactagtataggcaacccagtgcaggtgctgaaggttacagagaccttcgggacctggattcgtgagagcgctaacaaatccgacgacagaatatgggttacagagcatttttctggaattatggtcaaggagtttaaggaccagcccagcctcctgaacggttcttatacctttatccatctgccctactatttccacggatgtggccatgtggtttataacaactccctgtactatcataaggggggctcaaacaccttggttcggtttgagttcgggcaagagacctcgcagacactgaagctagagaacgccctgtacttcgatagaaaatatttgtttgccaactccaaaacttacttcaacctagcggtggatgaaaaggggctctggataatctatgcctcctctgtcgacggatccagtattttagtcgctcagttagatgagcgtaccttcagtgttgtgcaacacgtgaacactacttatccgaaatctaaggccgggaatgcgtttatcgctagggggatcctctatgttaccgacaccaaagacatgcgtgtcacattcgcatttgacctcttgggtggcaagcaaattaacgctaacttcgatttgcggacatcgcagtcagtcttagccatgttggcctataacatgcgagatcaacatctgtactcatgggaagatggacacctgatgctttatcccgtgcaatttctgtcaactacattaaaccagtag

SEQ ID NO: 189183 - DNA, 1575 bp, synthetic construct
  misc_feature 1..1575: note = Description of Artificial Sequence: Synthetic coding sequence
  source 1..1575: mol_type = other DNA
atgcacagcctggacgagcccctggacctgaagctgagcatcaccaagctgagagctgcccgtgagaaaagagaacgcaccctgggagtcgtgcgcccacgggctctgcacagggaacttgggctggtggatgatagccccaccccggggtccccgggatcaccaccgagtggttttctcttgaatagcaagttcccagagaaagtggagggccggttttctgcagcccccttagtggaccttagcctgtccccaccttccggcctcgactcccccaatggctctagcagcctctcacccgagaggcaagggaatggagaccttccccccgttccatccgccagtgattttcagcccctgcgttaccttgatggcgttccgagctcttttcagttttttttgccattgggaagcggaggcgccctgcatctcccagcctctagttttttaaccccccctaaagacaagtgcttgtcccccgacctgcctctgcctaaacaacttgtctgtcgttgggcaaaatgcaaccagcttttcgagctactgcaggatctagtggaccacgtaaacgactatcatgtgaagcccgagaaggacgcaggatattgttgtcattgggaagggtgtgcccgccatggacgtggattcaacgcaaggtataagatgctgattcacattcgtacccacaccaatgaaaagccacaccgctgtccgacatgttctaagtcattcagtaggctcgaaaacctcaaaatccacaatcggagtcacacgggtgagaaaccttacgtgtgtccctacgagggatgcaataaacgctactctaatagttccgaccgatttaaacataccagaactcattatgtggataagccttactactgcaaaatgccgggatgccataaaaggtatacggatccaagtagcctgcgcaaacacatcaaggcccatggtcacttcgtgagtcacgagcagcaagaactgctacagctccgccccccaccaaaacctcctctgccagcaccggatggaggtccctatgttagcggggcccagataatcatacccaatccggcggccctctttggcggccccggtttgcccggtctgcccctgccccttgcacccgggccactggatctgtccgccctagcttgtggaaacggaggaggaagcggcgggggaggcgggatgggaccgggcttgcccggtcctgtgttacctctgaatcttgccaagaatcctttgctgccttcaccatttggagcaggcggcctggggctccccgtagtttcactcttagctggcgccgctggcgggaaagccgaaggagaaaaaggacggggttcagtgcccacgagggcactgggaatggaggggcataagactcctttggaacgcaccgagagctcatgttcccggccctccccagacgggctcccactgctccccggcacggtccttgatttaagcactggcgttaactcagcagccagctctccggaagcactggctcctgggtgggtggtgattccacccggtagtgtccttctgaagcctgcggtggtgaactag

SEQ ID NO: 189184 - DNA, 1575 bp, synthetic construct
  misc_feature 1..1575: note = Description of Artificial Sequence: Synthetic coding sequence
  source 1..1575: mol_type = other DNA
atgcacagcctggacgagcccctggacctgaagctgagcatcaccaaacttcgagccgccagagaaaagagggagcgtactcttggagttgtccggccgagggccttgcatagggaacttgggctggtggacgactctccaacccccggctcaccagggtctccgccttccggttttttacttaactctaaatttcccgaaaaggtagaaggtcgctttagcgcagctcctctggtggatctgtctttgtcgccaccaagcgggctggactcacccaacggtagctcgagtcttagtccggagcgccaaggcaacggcgatcttcctcccgtgccttcagcatcagattttcagcctctgcggtatctggacggcgtgccctctagttttcagttctttctgcccctaggcagtggaggtgctctgcaccttcctgcgtcttcctttctcacacctcctaaggacaaatgcctttcccctgacctgccgcttccgaaacagcttgtatgccgttgggccaagtgcaaccagctgttcgaacttttgcaagatttggtagaccacgtgaacgactaccacgtcaaacccgaaaaagatgccggatactgttgtcactgggaaggctgcgcccgtcatgggaggggttttaatgccaggtacaaaatgctgatccatatcaggacccatacaaacgaaaagccgcacagatgcccaacgtgcagtaagtctttcagcaggcttgaaaacctgaagatacacaacagaagccatactggcgagaaaccgtatgtgtgcccatacgagggttgcaacaagaggtacagtaactcttcagatcggttcaagcacacgcggacccactatgtggataagccgtattattgcaaaatgcccgggtgtcacaaacggtacaccgatcccagttctttgcgaaaacacattaaggctcacggacacttcgttagtcacgagcagcaggagttgctgcaactgaggccacccccaaaaccccctcttcctgcaccagatgggggtccatatgtctctggggctcagattataatccccaacccagctgctttgttcgggggtccaggtctgcctggtctgcctcttccccttgcacccgggcccctggatttaagcgccctggcctgcggcaacggcggcggctctggcggtggcgggggtatggggcctggtctaccgggcccagttctgcctctgaacctggcaaagaatcctcttttaccctctccatttggagccggcgggttaggattaccagtggttagcctgctggcaggagccgccggaggtaaagctgagggagagaaggggcggggcagtgtgcctacacgtgcccttgggatggaaggacacaaaacgccactggaaaggactgagagctcgtgtagcagaccctcacctgatggtctgcccctgctgcctggaactgtgctcgatctgagtaccggggtgaattcggctgcatctagtcccgaggccttggcccctgggtgggttgtgatcccaccaggctctgtcctgttgaaacctgccgtggtgaactag

SEQ ID NO: 189185 - DNA, 2328 bp, synthetic construct
  misc_feature 1..2328: note = Description of Artificial Sequence: Synthetic coding sequence
  source 1..2328: mol_type = other DNA
atgatggtgcagcggctgggcctgatcagcccccccgccagccaggtgagcacagcctgcaaccaaatctctcccagccttcagagagctatgaacgccgcaaatctgaacattcccccctccgatacccggtcactgatctcccgggaatctctggctagtaccactctgagcttgactgagtctcaaagtgcttccagcatgaaacaggagtggtcacagggatacagagctctgccgagcctcagcaaccatggatcccagaatggcctggacctcggtgacctcctttctctgccacccggcacctccatgtcaagcaacagcgtttcaaactccttgccttcctatctcttcggcaccgaaagcagtcattccccctatcctagcccaaggcatagttcaaccagaagccattcagccagaagcaagaaacgcgcactgtcgctttctccactgagtgacgggatcggcattgactttaacacaatcatccgaacctcacccacaagcctcgttgcctacatcaatggatctcgcgccagtcccgcaaacctgtctccacagcccgaggtgtacgggcacttcctgggtgtccgggggagctgtattccgcaaccgcgcccagtgccaggaagccagaaaggcgtgctggtcgcccccgggggccttgccctgcccgcctacggcgaagacggagccctggagcacgaacgcatgcagcagctcgaacacggaggactgcagcccggactggtgaaccacatggttgtgcagcacggcctgcctggacccgactcacagagcgcggggttgttcaaaacagaacgccttgaggaattcccaggaagcacagtagatctccccccggcccccccattgccccccttgccacccccacctgggccgccaccgccctatcacgcccacgcacatcttcatcatccagaactcggcccccatgcacaacaattagcactacctcaggccaccctggacgatgacggagaaatggacggcattggagggaagcattgctgccgctggatcgattgcagcgccttgtatgatcagcaggaagagctggtacgacatatcgaaaaagtgcatatagatcaaaggaaaggggaggatttcacttgcttctgggcaggttgtcctcgccgatataagcccttcaatgcccgatataaactcctcatccacatgagagtccactctggggaaaagcccaacaagtgcacctttgaaggctgcgaaaaagccttctctcgcctggaaaaccttaaaattcatctccggtctcacacgggtgagaaaccttatctttgtcaacaccctggatgtcaaaaagccttctcaaattcgagtgaccgcgcaaaacaccagcgaactcacctggacacgaagccttatgcatgccaaattcctggatgcaccaaacgctataccgaccccagcagtctcagaaaacacgttaaagcgcactccagtaaagaacagcaggccaggaagaagcttaggtcatcgacagagctgcaccccgatctgctgactgactgtcttactgtgcagagcctccagcccgcgacatcaccccgtgacgcagccgccgaaggaacagtcggaagatcacccgggcctggtcccgacctatattccgctcctatttttagctctaactactcaagcaggtccggcaccgcggccggagccgttcccccgccccacccagtgagccaccccagccctggccataacgtgcagggctccccccataacccatccagccaattgccacctctgacggccgttgatgccggggccgagcgattcgccccctcagcacctagtccgcatcatatctctccacggcgtgtgcccgccccgagttccattttacaaagaacccagccaccctacactcagcagccgtctggctctcatttaaagagctatcagcccgagactaacagttcattccaacctaatggcatacacgtgcatggtttctacggtcagctccaaaagttctgcccccctcactatccagattcccagcgcattgtgccaccggtgagtagctgtagtgtggttccgagcttcgaggactgcctagtacctacgtcaatgggacaggctagctttgacgtgttccatcgggccttttctactcacagtgggatcactgtgtatgacctgccatcttcttccagctccctcttcggggagagtctccggagtggagctgaagacgcaaccttcctgcagattagcactgtggaccgatgtccttcccagttaagtagcgtttataccgaaggatag

SEQ ID NO: 189186 - DNA, 2793 bp, synthetic construct
  misc_feature 1..2793: note = Description of Artificial Sequence: Synthetic coding sequence
  source 1..2793: mol_type = other DNA
atgaacggccggagctgcagcatgagcctgcaccggaccagcggcaccccacagggcccacgtatggtctcaggccatcacatccccgcaataagagcacattctgggacccctggaccgagtccttgtggttcaacgtctagcccaaccatggctagcttagcaaataatctgcacctgaaaatgccgagcggaggaggtatggctccccagaacaacgtcgctgagagccgtatccacttgccagctctctctccgcgacggcaaatgttgaccaacggcaaaccccgtttccaggtcacgcaggccggaggaatgtctggcagtcacacgctgaaacctaaacaacaggaattcggctcaccatttcctccaaatccaggcaagggtgccttgggatttggaccacagtgtaagtcaatcggcaagggctcttgtaacaatctcgttgtaaccagctcgcctatgatggttcaaaggctcggcctgatctctccccctgccagtcaagtgtccacagcgtgtaaccaaatctccccctccctgcagcgcgcgatgaacgctgctaatctcaacatccccccatccgacacccggagtctcatctctcgcgagtccctggccagcaccaccttatccttgaccgaatcccaatcagcttctagcatgaagcaagagtggtctcagggttatcgcgccctacctagcttgtctaaccacggctcccagaacgggctcgacctcggagatctgttgtctcttccgccgggcaccagcatgtctagtaactccgtgagtaactccctccccagttaccttttcgggacggaatcaagtcatagtccatatccctccccaagacattcctccacaagaagccattctgctaggtctaaaaagagagctctcagcttgtcccctctgagcgatgggatcggaattgatttcaacaccataatccggacatctccaacctctttggtcgcttatattaacggctcccgcgcatctcctgctaatctgagcccccaacctgaggtgtatggacacttcctcggcgtgcgcggctcatgcataccccagcccaggcctgtccctggtagtcaaaagggtgtgcttgttgcaccggggggcctcgcccttcccgcctatggggaagatggcgcccttgaacatgagcggatgcagcagctcgaacatggagggctgcagcccggcctagtgaaccacatggtggtgcagcacggcttgcctgggccagactcacagtctgcaggactgtttaagacagagcgtttggaagagttccctggttcaactgtggacctgcctcccgctccacccttgcctcctcttcctcctccccccggtccccctcctccataccacgcccacgctcatctgcaccaccccgaactgggacctcacgcccagcaactggctctgccccaggctactttggatgacgacggagagatggacggaatcgggggtaagcactgttgtcgttggatagattgctctgccctgtacgatcagcaggaagaattagttaggcatatagagaaggttcacatagatcagcgcaagggagaagacttcacatgcttttgggcagggtgcccacgcagatacaaaccctttaacgcccgatataagcttctgattcacatgagggtccattcaggagagaaaccaaataaatgcactttcgaaggctgtgagaaagccttctcccgcctggaaaacctcaaaatccatctcagaagccatactggggaaaagccctacttgtgccagcatcctggatgccagaaggccttcagtaacagctcagatagagcaaagcatcaaaggacacacctcgacactaaaccctacgcatgtcagatccccggatgtaccaaacgctataccgacccttcttctctgcggaaacacgtgaaggcacatagtagcaaagaacaacaagctcgaaagaaactgcgatccagcacagagcttcacccagacttactgacagattgtctgaccgtacagtctttgcaaccagccacgtcccctcgggacgccgctgccgagggcacagtgggccgctctccggggccgggaccagacctctatagtgctcctatcttctcctctaactattccagcagatctggtaccgcggcaggcgccgtaccaccaccccatcccgtatcgcacccctcacctgggcacaacgttcaagggagcccacacaacccctcatcccaactgccccccctcactgccgtcgatgctggagctgaacggttcgcacctagcgctccttcgccacaccatatttccccacgaagagtgcccgccccttcctctattctgcagcggactcagccaccttacacccaacagcctagcggatctcacctgaagagctaccagccagaaactaactccagttttcagcccaatgggatacatgtgcacgggttttacggccaacttcagaaattttgcccaccacattatccagattcacagcgcatcgtaccacccgtgtcatcttgttctgttgtgcccagcttcgaggactgtctggtccctacatccatgggccaagcgtccttcgacgtgttccatcgcgcattttcgacccacagcggaattaccgtgtatgacctgccatcgagtagctccagcttatttggtgagagcttgcgctcgggcgcagaggacgccacgttcttacagatatctacagttgatagatgccccagtcaattgtcgagtgtctatactgaggggtag

SEQ ID NO: 189187 - DNA, 270 bp, synthetic construct
  misc_feature 1..270: note = Description of Artificial Sequence: Synthetic coding sequence
  source 1..270: mol_type = other DNA
atgatggtgcagcggctgggcctgatcagcccccccgccagccaggtgagtacagcctgcaaccagataagcccttcacttcagcgggcaatgaatgccgcaaatttaaatatccccccatccgacacgcggtcgctgatttctagagaatctctggcgagcacaacactgtctctcactgaaagccaatctgcatctagtatgaagcaggagtggtcacaaggttatagagcactgcctagcctgtccaaccatggaagtcaaaactag

SEQ ID NO: 189188 - DNA, 735 bp, synthetic construct
  misc_feature 1..735: note = Description of Artificial Sequence: Synthetic coding sequence
  source 1..735: mol_type = other DNA
atgaacggccggagctgcagcatgagcctgcaccggaccagcggcacaccccaaggccccaggatggtttctgggcaccacattccggccataagggctcacagcgggactccaggtcctagcccttgcgggtctacaagctctccgaccatggcctctctcgcgaacaatttacacctgaagatgccttccgggggcgggatggcacctcaaaataatgtggctgaatcgcgtatccatttgcctgccctgagccccagaagacagatgttgactaacggaaagcctcgattccaggttacgcaggccggagggatgagcgggagccacaccctcaagccaaaacagcaggagttcggcagcccttttccaccgaaccccggcaagggtgccctagggttcggaccgcagtgtaaatctatagggaagggctcatgcaataatttggtagtcacatctagccccatgatggtccagaggttaggcctcatttcaccccccgccagccaggtcagcacagcctgtaaccaaatcagtccatcattacaacgcgcaatgaacgccgccaatctgaacattccacctagcgataccagatcgctaatttcacgtgagtctctcgcctcaactacacttagtctgacagagtctcagagcgcatcctctatgaagcaagaatggtcccaaggttatagggcccttccgtctctcagcaaccatggctcccagaattag

SEQ ID NO: 189189 - DNA, 270 bp, synthetic construct
  misc_feature 1..270: note = Description of Artificial Sequence: Synthetic coding sequence
  source 1..270: mol_type = other DNA
atgatggtgcagcggctgggcctgatcagcccccccgccagccaggtctcaacggcctgcaatcagatttcaccatctcttcagcgcgccatgaatgccgcaaacttgaatatccctccctccgacactcgcagcctgatcagtcgcgaatcccttgcatccaccacactttctttgacagagtctcaaagcgcaagctcaatgaagcaggagtggagtcaggggtaccgggctttaccgtcactgtcaaatcacgggtcccagaactag

SEQ ID NO: 189190 - DNA, 270 bp, synthetic construct
  misc_feature 1..270: note = Description of Artificial Sequence: Synthetic coding sequence
  source 1..270: mol_type = other DNA
atgatggtgcagcggctgggcctgatcagcccccccgccagccaggttagcactgcctgcaatcagatttcgccaagcctgcaacgggctatgaatgccgctaacctgaatataccgccaagcgatacccgctcactgatatctcgagaaagtctggcttcaaccaccctgtcgcttacggaatcgcagtcagctagctccatgaaacaggagtggtcccagggctaccgcgcccttcccagcctgtctaaccacgggagtcaaaattag

SEQ ID NO: 189191 - DNA, 735 bp, synthetic construct
  misc_feature 1..735: note = Description of Artificial Sequence: Synthetic coding sequence
  source 1..735: mol_type = other DNA
atgaacggccggagctgcagcatgagcctgcaccggaccagcggcacaccgcaggggcctcgcatggtatccggtcaccacattccagctataagggctcatagcgggaccccaggaccctctccgtgcggttccacatcctcacctacgatggcctccctcgcaaataacctgcatctcaaaatgccatcgggcggtgggatggctccgcagaacaacgtggccgagagtaggatacacctgcccgctcttagcccaaggcgccaaatgttaaccaacggtaagccccgctttcaggtaactcaggccggtggaatgagcggctcgcatactttgaaaccaaagcagcaagaatttgggtccccattccctcctaaccctggcaaaggggccttaggatttggtccccagtgcaagtcaatcggaaaggggagttgtaataacctcgtggtgacttccagccccatgatggtccaacgacttggtctcattagccctcctgccagtcaggtctccacagcttgtaatcagatctctccttcactgcagagggctatgaatgccgcaaatcttaatatccccccaagcgacacccgttccctcatttccagagagagcctggccagcacgaccctatccctcacagaaagccagtctgcaagcagcatgaagcaagaatggagccagggctatcgagcattaccttccctgtctaaccacgggagtcagaattag

SEQ ID NO: 189192 - DNA, 219 bp, synthetic construct
  misc_feature 1..219: note = Description of Artificial Sequence: Synthetic coding sequence
  source 1..219: mol_type = other DNA
atgcaccggcggcggctggccctgggcctgggcttctgcctgctggccggtactagccttagtgtgttgtgggtgtacttagaaaactggctacccgtgagttatgtgccttattatttgccctgccccgaaattctccttgagtacagaggagttatatctgctcactgcaacctccacctgcccgggagtagcaattgtcatgcaagcgcaacttag

SEQ ID NO: 189193 - DNA, 483 bp, synthetic construct
  misc_feature 1..483: note = Description of Artificial Sequence: Synthetic coding sequence
  source 1..483: mol_type = other DNA
atgcaccggcggcggctggccctgggcctgggcttctgcctgctggcaggtactagtttgagcgtgctgtgggtgtatttagagaactggctgccggtgtcctatgtcccctattatctaccttgccccgagatcttgcctatgatgatggccctctcctgcttatgtcatcagcagcacgaagccgctctgcaggagggcgaagcgacccccgcaagaggaatggtgacagtcccatccgcgcaggctgccggcgcccaagcccataccgctgccgacactcatacactagtcggcgcacacaggctgaggggcaatctacagccacgagcttctgccgctcacctccctgccacagagcccgaccattgggggcacggggtgtgcagaggcgaagttcacagcttccacccagtgttgccaggggtaagtaggggtgtactgcacgcttgggttcccggagcccttctgcatcttcattag

SEQ ID NO: 189194 - DNA, 1044 bp, synthetic construct
  misc_feature 1..1044: note = Description of Artificial Sequence: Synthetic coding sequence
  source 1..1044: mol_type = other DNA
atgcaccggcggcggctggccctgggcctgggcttctgcctgctggcaggcactagcctcagcgttctgtgggtatatctagagaactggctcccagtgtcctacgtcccttactacctcccttgtcccgaaatatttaacatgaagttacactataagcgagagaagcccctccagcctgttgtgtggagtcagtaccctcagccaaagctccttgagcacaggcctacgcagcttcttactctaactccatggctggctcccatagtgtctgaggggactttcaaccccgagctcctgcagcatatatatcaacctctgaatctaactataggtgtcactgtgtttgccgtcggcaagtatacacactttattcagtccttcctcgagtcagccgaggagtttttcatgagaggatatagagtgcattattatatcttcaccgacaatcccgcagcagtgccaggtgtccccctgggtccacatcgactgctgagtagcattccgatccaaggtcactcacattgggaagaaacaagcatgagacggatggagacaatatcacagcacatcgctaagcgtgcccaccgcgaggtcgactacctcttctgtctcgatgtcgacatggtgtttagaaatccatggggtccggaaaccctgggagatctcgtggctgcaattcatccatcctattacgccgtcccgaggcagcagttcccctatgaacggcgccgagtgtccaccgccttcgtggcagactcggagggcgacttctactacggcggcgctgtttttggcggacaggtcgccagggtgtacgagtttaccagaggctgtcacatggccatcttggccgataaagctaatggcatcatggcagcttggagggaggaatcccatctgaaccgccattttatttcaaacaaaccgtctaaggtcctctctccagagtatctttgggacgaccgtaagccgcagcccccctctttaaaactgatccgattcagtaccttagacaaagatatatcttgccttcggtcctag

SEQ ID NO: 189195 - DNA, 885 bp, synthetic construct
  misc_feature 1..885: note = Description of Artificial Sequence: Synthetic coding sequence
  source 1..885: mol_type = other DNA
atgcaccggcggcggctggccctgggcctgggcttctgcctgctggcggggacaagtctgtcagtgttatgggtatatctggagaactggttacccgtctcctacgtcccttactaccttccgtgtccagagatctttaacatgaagctccattataaaagagagaaacctctgcaacctgttgtatggtcccagtatcctcagcccaaactactcgagcaccgacccacacagctgctgacactgaccccttggttagctcccatcgtgtccgaaggaacgtttaatcccgagctcctgcagcacatttaccaaccacttaaccttaccataggagtcacagtgttcgctgtgggcaaccccagttggagccagccgcgttcatcttcctgtgtgggaactgggtgcaccacaacttcttccctgaccacgctgcagccctttcccggctctagatgggttcctactgggttttctgcaccctctccatctcgggtgacgccaactggaagacgtcatccatgtgccggttggcgcccaagcgcaagcaccctgctgagaggcctgactggtcgctggacaacctcaagcgccctcatgtggacctggtgtttcgggacaaggggtgctctgcggccttgggagacttggtggttaccttttacacaggcaaccacacctttccctgcctcctcttctcccatgtcagccggggtctttccactgccactgtggcagacagctaagggaacctctatcatggtgggacagtccagtggcgggcgatggcccggatacatgtcgttgctcggggccgcgacatggcccagttggcggactagaccgatggcctcctggctgcccgggggacgcaaggcaacatag

SEQ ID NO: 189196 - DNA, 993 bp, synthetic construct
  misc_feature 1..993: note = Description of Artificial Sequence: Synthetic coding sequence
  source 1..993: mol_type = other DNA
atgcaccggcggcggctggccctgggcctgggcttctgcctgctggcgggaacaagcctgtccgtactttgggtgtacctggagaactggctcccagtttcctatgtgccttactatctcccatgtcctgagatcctgtcccagtacccgcagccaaagctgctggagcaccggcctacccagttgcttacgctgaccccttggctggcccctatcgtgtcggaggggactttcaaccctgagctgctccagcacatctaccaacccttgaacctgacaattggggttactgttttcgcagttggaaaatatactcactttatccagtccttcctggaaagtgccgaggagttcttcatgaggggctaccgggtgcattactacatcttcaccgataacccagccgcggtgcctggcgtccccctaggacctcatcgcctactctcaagcattcccatacaaggacactcccactgggaggagacctccatgaggcggatggagaccatttcgcaacacatcgctaagcgcgcacacagagaagtcgactacttgttctgcctggatgtcgacatggtatttcggaacccttggggcccagagacactcggcgatttggtcgctgccatacatccatcttattacgccgtgccccgccagcagtttccgtacgagagaagacgggtgtcaacagcatttgtagctgacagcgaaggggacttttactacggtggtgccgtttttgggggtcaggtggcaagagtgtatgagttcacgagaggttgtcatatggccatcctggccgacaaggccaacggaatcatggcggcatggagggaagaatcacatctgaacagacacttcatctccaataaacctagcaaagtgcttagtccagagtacttatgggacgataggaaacctcagccaccctcactgaaacttatccgatttagtacactggataaggatatttcgtgtttgcggtcctag

SEQ ID NO: 189197 - DNA, 1434 bp, synthetic construct
  misc_feature 1..1434: note = Description of Artificial Sequence: Synthetic coding sequence
  source 1..1434: mol_type = other DNA
atgcccccctgccagccccagcggcccctgctgctgctgctgctgctgttggcctgtcaacctcaggttccatccgcacaagttatggactttctctttgaaaaatggaagctctacggagatcagtgccatcacaacctgtctctactgccaccccctactgagctcgtatgcaacaggacttttgataaatatagctgctggccagacaccccagctaatacgacagcaaatatttcctgtccttggtacctaccctggcatcataaggtccagcacagattcgtgttcaaaagatgcggtccagatggacaatgggtgcgcggccccagaggccaaccctggcgagacgcaagtcagtgccaaatggacggagaagaaattgaggtccagaaagaagtggccaaaatgtactcctcttttcaggtgatgtatactgtcgggtactcgctttctctgggtgccctgctgcttgctctagctattctaggcgggctttccaaactccactgcaccaggaatgcaatccacgcaaacctttttgccagcttcgtcttgaaagcttcctccgtgctcgtcatcgatggcctgttgagaactaggtatagccagaagatcggggacgatctttcagtatccacatggttgtccgacggagctgtggccggctgccgagtggcagcggtgttcatgcaatacgggattgtggctaattattgttggttgctggtggaagggctgtatcttcacaatctgcttgggctggcaaccctccccgaaaggagcttcttttccctttacctgggaatcggctggggtgcgcctatgctgttcgtcgtcccttgggccgttgtcaagtgcctcttcgagaacgtgcagtgttggacgtccaacgataacatgggcttctggtggatattgcgttttcctgtattcctggctattctcatcaatttttttatctttgtacgtatcgttcagctgctcgtagctaaactaagagcgcgtcagatgcaccacactgactataaatttcgactcgccaagtcaaccctgacgctgattcccctactaggggtccacgaggtcgtttttgccttcgttacagatgaacatgcccagggtacactgagatctgccaaactctttttcgatctattcctctcctccttccagggtttactggtggccgtactctactgctttctgaataaagaggtgcagagtgaactgcggcggcggtggcacaggtggaggttgggcaaggtattatgggaggaacgcaatacttctaatcaccgcgcatcgagctcaccagggcatggcccgccgtctaaagaacttcaattcggaagaggtggaggcagccaggattcgtctgcggaaacaccactggccggagggctgcctaggctcgcggagagcccattttag

SEQ ID NO: 189198 - DNA, 1392 bp, synthetic construct
  misc_feature 1..1392: note = Description of Artificial Sequence: Synthetic coding sequence
  source 1..1392: mol_type = other DNA
atggccggcgcccccggccccctgcggctggccctgctgctgctgggcatggtcgggagggccgggcccaggccacagggagccactgtgtccctttgggaaaccgtgcagaagtggagggaataccgccggcagtgccagcgctctttaactgaggacccaccccccgctacagaccttttttgcaatcgcacctttgacgagtatgcctgctggcccgatggcgaacctggctcttttgtcaacgttagctgcccctggtatctgccttgggcttcttcggtgccacaaggccatgtttaccgtttctgcactgccgaaggcctctggctgcagaaggacaatagctccttgccatggcgggacctgtctgagtgtgaggaaagtaaacgtggcgagcgaagctcacccgaagaacagctgctgtttctgtatatcatctacaccgtaggctatgcgctgagtttttcagctctcgttatcgctagcgctatactgctgggattcagacatctccattgcacaaggaactacatccacctaaatctgtttgcttctttcattctaagggctttgagcgtctttatcaaagatgctgccctcaaatggatgtattcgacggccgcgcagcagcaccaatgggatggcctcctctcatatcaggattctttgtcttgtcgcctggtcttcctgttgatgcagtactgtgtggccgctaactactactggttgctggttgagggtgtgtacctgtacaccctgttggcattctccgtcttaagcgagcaatggatctttagactatacgtgtctattggctggggcgtacccctcctgtttgttgtgccttggggtatcgtcaaatatttgtacgaagatgaggggtgttggactaggaactcgaacatgaactattggctgatcattcgtctacccatactctttgctatcggtgtgaactttctgatcttcgtgagagtcatatgcattgtggtctctaagctaaaggccaatttgatgtgcaagacagacattaagtgtcgcctggccaagtccactctgacgctgatcccactgctgggaacacacgaagtaatattcgcctttgtgatggacgaacacgccagagggacgttacggtttatcaaactgttcactgaactttcgttcacatccttccaaggcttgatggtagcaatcctgtactgctttgtcaataatgaggtgcagctcgagttccggaagtcatgggagaggtggcgtctcgagcacctccacatacagcgggatagctctatgaagcccctgaaatgccctacttcttctctgagctcaggcgccactgccggaagttccatgtatacggcaacctgtcaggccagctgttcctag

SEQ ID NO: 189199 - DNA, 1662 bp, synthetic construct
  misc_feature 1..1662: note = Description of Artificial Sequence: Synthetic coding sequence
  source 1..1662: mol_type = other DNA
atgaagctgggcagcagccgggccggccccggccggggcagcgccggactcctccccggtgtccacgagctccccatgggaattcctgccccatggggaaccagtcccctgtccttccacaggaagtgttctctgtgggccccaggacgccctttcctgaccctagtacttctagtgagcattaagcaagttactggtagtcttctggaggagaccacacggaagtgggcgcaatacaaacaggcttgcctgcgtgacctacttaaagagccaagcggaatcttttgcaacggcacctttgaccagtacgtgtgctggccacactcttccccgggcaatgtgagtgtcccatgtcccagctatctaccctggtggagcgaagagtcttcaggacgggcgtatcgccattgcctcgcccagggcacatggcagacaatcgagaacgcaactgatatatggcaagacgacagtgagtgcagcgagaatcacagtttcaagcagaacgttgataggtacgcactccttagcacactgcagttgatgtatacggtgggctacagcttctccctgatttctctgttcctggctttgactctgttgctgttcctgcgcaaattgcactgcacaaggaactacatacacatgaacctgttcgcttcctttattttgaggacactcgccgttctggtgaaagacgtggtcttctataacagctactccaagcgccccgacaatgaaaacggatggatgtcctatttatctgaaatgtccacctcgtgccggagtgtgcaggtcctgcttcattattttgtgggggccaattatctctggctgctggttgagggtctttacctccacacccttctggaacccacagtgctccctgagaggcgcctttggccacgttacttgcttctcgggtgggcctttcccgtgctcttcgtggtgccctggggctttgcacgtgcccacctggagaatacaggttgctggaccaccaatggcaacaagaagatctggtggatcatcagaggcccaatgatgctttgcgtaactgtcaacttctttatctttctcaagatcctcaaactcctgatatctaagctgaaggctcaccaaatgtgtttcagagattacaagtacaggctggctaagtcaacgctagtgcttatcccgttactcggtgtccatgagatactgttctcatttatcacagatgaccaggtggaaggcttcgctaagctgatcaggttatttattcagttgactctcagctctttccacggatttcttgtggccctgcagtacggatttgcgaatggagaggtcaaggcggagcttaggaaatactgggtaagattcctattggctcggcacagtggttgtcgggcctgcgtactgggaaaggactttagattcttaggtaagtgtccaaaaaagttgtctgaaggcgacggagccgaaaagttaaggaaactccagccaagcctgaattcgggacgactccttcatcttgcaatgcgcgggctcggggagctgggggcccagccccagcaggatcacgcacgctggccccggggctcgagtcttagtgaatgttcagagggagacgtcaccatggccaacaccatggaggagattctcgaagaatctgagatttag

SEQ ID NO: 189200 - DNA, 1053 bp, synthetic construct
  misc_feature 1..1053: note = Description of Artificial Sequence: Synthetic coding sequence
  source 1..1053: mol_type = other DNA
atgggcatccccgccccctggggcaccagccccctgagcttccacaggaagtgcagcttgtgggcccctggacgcccgtttctgactctggttcttcttgtgagcatcaagcaggtgacaggcagcctgctcgaagagactaccaggaaatgggcgcagtacaaacaggcctgcctccgcgacctgctaaaagagcccagtggaattttctgtaatggcaccttcgatcagtatgtgtgctggccccatagtagtcctggaaatgtctccgtgccatgtcccagctatctgccctggtggtcagaggagagtagtgggagagcctatcgccattgcctggctcagggcacctggcagacaattgaaaatgcaacagatatttggcaggacgatagcgagtgtagtgagaaccatagctttaagcaaaacgtggatagatacgccttgctgtccaccctccagctgatgtacaccgtcggatactcattcagcctgatttcacttttcctggcattgacactgcttctctttctgagaaagctgcactgcacccgcaactacattcacatgaacctttttgccagtttcatcctcaggactttagcagtgcttgtaaaggatgtcgtgttttataattcatacagtaagcgcccggataatgaaaatggttggatgtcctacttaagtgagatgtcaacaagttgtcggtctgtccaagtgcttctgcactattttgtcggtgccaattacctgtggttgcttgtggaaggcctgtatttacatacccttttggagccaacggttcttcctgagaggcgattgtggcctaggtaccttctcctcggctgggccttcccagtgttgtttgtggtgccctggggcttcgctagggctcacctggaaaacaccggatgctggacaacaaacggaaacaaaaaaatctggtggatcatccgcggacccatgatgttatgcgtgacagcgctgggcctcgaagaaactggcctcaagaggaacgggtcaattccttttgggcataaagaggatatctag

SEQ ID NO: 189201 - DNA, 1665 bp, synthetic construct
  misc_feature 1..1665: note = Description of Artificial Sequence: Synthetic coding sequence
  source 1..1665: mol_type = other DNA
atgaagctgggcagcagccgggccggccccggccggggcagcgccggattactaccgggagttcatgagttgcctatgggcattcccgccccttggggcactagtcctctgtcatttcatcgaaagtgttccctttgggcccccggccgaccattcctgacacttgtactgctagtttctattaagcaagtcaccgggtcccttctggaggagactacaaggaagtgggcccagtataagcaggcatgccttcgcgatttgctcaaggaacctagtggaatcttctgcaatggcacttttgatcagtatgtctgttggcctcactcatctcccgggaacgtatccgtgccgtgccccagttatctgccgtggtggtcagaggagagctcgggacgcgcatacaggcactgcttagctcagggcacatggcaaactattgagaacgccacggatatctggcaggatgatagcgagtgtagcgagaaccattccttcaaacagaatgtggaccggtatgccctgttgtcaacactacagctgatgtacaccgtcggatactctttttctttgatcagcctgttcctggccctcaccctgctcctgtttttgagaaaacttcattgtacgaggaactacatacacatgaacctcttcgcatcattcatcctgaggaccttagccgtactcgtaaaagacgttgttttttacaattcatattccaaaaggccggacaatgaaaacgggtggatgtcttatcttagcgagatgtctacctcatgtaggtccgtgcaagtgctgctgcactacttcgtgggggccaattatctgtggttgctggtcgaagggttgtatctgcatacattgttagagccaacagtgttgcccgagcgaagactctggccccggtacctgttgttggggtgggcatttccggtcctgttcgtggtgccctggggattcgctcgcgcccatctggaaaatactggttgctggactaccaatggaaataaaaagatctggtggatcattaggggcccaatgatgttgtgcgtgactgtcaacttcttcatttttctgaagattctcaaactcctgattagtaagctgaaggcgcaccagatgtgcttccgggattataaatatcgcttagctaagagtaccctggtcctcatacctctactgggcgtccatgagatccttttcagttttatcacagacgatcaggttgaaggattcgccaaacttattcgcctatttatccagctgactctgtcatccttccacggctttcttgtggcattgcagtacgggtttgctaatggcgaagtaaaggctgaattacgaaaatactgggtgagattcctgctggccagacattccgggtgtcgcgcctgcgtactcggcaaggacttcaggttcttggggaagtgccctaaaaaattgtccgagggggacggagccgagaagttacgaaagctgcaaccatcccttaattctggcaggcttctgcatctggctatgcgaggcctcggagaactgggcgcgcaaccccagcaagaccatgcccgctggccccgcggttcatcactatcagagtgttccgagggcgacgtcacaatggccaataccatggaggagatccttgaagagaaaagatcccaatag

SEQ ID NO: 189202 - DNA, 687 bp, synthetic construct
  misc_feature 1..687: note = Description of Artificial Sequence: Synthetic coding sequence
  source 1..687: mol_type = other DNA
tgagccaccgacatctggcaggacgacagcgagtgcagcgagaaccactcctttaagcagaacgtggatcgctatgccttgctgagtacacttcagttaatgtacacggtcggctattccttttccctcatctctcttttcctcgccctgactctgctgctctttctccgaaaacttcactgtactaggaactacatacatatgaacctttttgctagcttcatcctccgtactctggcagtgctggttaaggacgtcgtgttctacaatagttactccaagcgaccagataacgaaaatggctggatgtcatatctatcagaaatgtcaacaagctgccggtccgtgcaagtgcttttgcattacttcgtgggagctaactacctatggctgctagtggaagggctttacctgcatacattgctggaacccaccgtgctgccagagagaagactctggccccggtacctgctactcggctgggctttccctgtgctgttcgtcgttccctgggggtttgcaagggcccacctcgagaatacggggtgctggactacaaatggtaacaagaaaatctggtggataataaggggacccatgatgttgtgtgtcacagcgctgggcctggaagaaacaggcctcaaaagaaacggttctatcccattcgggcacaaggaagacatatag

SEQ ID NO: 189203 - DNA, 1725 bp, synthetic construct
  misc_feature 1..1725: note = Description of Artificial Sequence: Synthetic coding sequence
  source 1..1725: mol_type = other DNA
atggagcccaccgagaacccctgccagggccccctgggccagaaggcgggagagaagccgctggccgccggaccgggcgaagaagaactgctcagagggagcgcccctcacgcccaggatacgcagtccgaggagctcccccccagctgtactatttcaggcgaaaagaaaccccccgcggttagtggagaagctaccggcgcggacgcaggaagactgtgtcctcctccaagatctcgtgcccctcataaggatagaacactcgccaggtctagaccccagactcagggggaggactgtagtcttccagtgggggaagtgaagataggaaagaggtcctatagtcctgctcctggaaagcaaaaaaaacctaatgctatgggcctggctccaacttcgtcccctggtgccccgaactctgcacgggctacacacaatcccgttccctgtggctcgggccgtggcccctgccacctggctaacctattgagcacactcgctcaatccaaccagaacagagatcacaagcagggtccccccgaggtgacctgccagattcgcaagaagacccgcaccttgtatagaagcgaccagctagaagaattggagaaaatcttccaagaggatcactatcctgattcggataaacgcagagagattgctcagacagtcggcgtgacacctcagaggatcatggtgtggtttcaaaatagaagagccaagtggcgaaaaatggagaagctgaacggaaaggaaagcaaagacaacccggctgccccgggaccagcctcttctcagtgtagcagtgccgctgaaatcctcccagcagttccgatggaacctaaacccgatcctttcccccaggagagccccttggacacattcccagagccccccatgctgttgacctccgatcagaccctagctccaacccagccatcagagggcgctcaaagggtggtgaccccccccttgttttctccaccccccgtgcggcgggctgacctcccctttccactgggcccggtgcacaccccacaactgatgccactgctgatggacgtcgccggctccgactcttcccacaaagacggcccctgcgggagctggggaacatcgatcactctcccaccaccttgttcatatctcgaggaacttgagccacaggattatcagcagagcaaccagccaggtccatttcagttcagccaagcacctcaacctcccctgtttcagtcaccacagccaaagctgccctacctccctaccttcccattttcaatgccatcctcccttactcttccccctcctgaagattccctgtttatgtttccttgtgggcccagcggaggcaccagccagggttactgtccaggtgcctcctctgggcagatcctcatgcagccccctgctggcaacataggtacagcgtcctggtcagacccttgcctgcctgagcttccattccccggacccttttgcccccaggcacttggacatccgcctggcggggacggctacttcccagacctgttcccaactccatgccctcaggctctgggtcggcagccgtccagcgctttgagctggatgccagagggcgcacggcctggaacaggcccgctgctctcaaaggcaaaggaggagccccctgcagcttcactggatcagccctcggcactcgaggaggcaaggggtgacgacaagaacagccacgtcccctag

SEQ ID NO: 189204 - DNA, 1722 bp, synthetic construct
  misc_feature 1..1722: note = Description of Artificial Sequence: Synthetic coding sequence
  source 1..1722: mol_type = other DNA
atggccaacgccgaggtgagcgtgcccgtgggcgacgtggtggtggttccaactgaaggcaatgagggagagaaccccgaggacactaagacccaggtgatactccagctgcaacccgttcaacagggtctattcattgatggacacttctacaatcgaatctatgaagccggttctgaaaataacactgcagtcgtggccgtggagacccacacaatccataagatagaggagggtattgacacagggacaatcgaggccaacgaggatatggagatcgcctatcctatcacgtgcggcgaatctaaagcaatcctgctgtggaaaaagtttgtgtgtcctggcataaacgtgaagtgtgtgaaattcaatgatcagctgatcagcccaaaacacttcgtccacctggccgggaaatcaacactcaaggattggaaaagggccatccgcctaggagggatcatgctccggaaaatgatggattccggacagatcgacttctatcagcacgataaagtctgcagcaatacgtgcaggtcaacaaagtttgacctgctgatttccagcgctcgcgcccctgtcccaggccagcagacttcagtggtccagactccaaccagcgctgatggaagcataacccagattgctatttccgaggaaagcatggaggaagccggcctggagtggaattccgccctgaccgcagccgtcactatggcaactgaggagggtgtaaagaaggactctgaagaaattagcgaagacacactcatgttctggaaaggcatagcggatgtgggtctcatggaggaagtagtatgtaacatacagaaggaaatcgaggaactcctgcgtggtgttcagcagcgcctgatccaagcccccttccaggtaaccgacgccgccgtcctcaacaacgtcgcacatacgtttgggctgatggacacggtgaagaaggtgctggacaataggcggaaccaagtggaacaaggcgaagagcagtttctatacactctgaccgatctggaaaggcagctagaagagcagaaaaaacagggccaagatcatcgcttgaaatcccagaccgtgcagaacgtcgttctgatgccagtgtccacacccaagcccccaaagaggcccaggctacagagaccagccagtacgactgttctgtctcccagcccccctgtccagcagcctcaatttacagttatctcccctattaccattacacctgtgggccagtccttctccatgggcaatattcccgtcgccacgcttagccaaggtagtagccccgtaaccgtgcacaccctgccttctggtccacagctctttcgctacgccaccgtcgtgtcatccgcgaaatctagctcaccggatactgtgacgattcacccgagcagcagtttggcactcctgtctagcaccgcaatgcaagacggttctacactcggaaatatgaccactatggtgtcacctgtggaactggttgccatggagtcgggtctgacatctgctatccaggcagttgagtcaacctccgaggacggacaaaccattatcgagatcgatcccgcgcccgatcctgaagccgaggacaccgagggaaaagccgtgatcctggagaccgagctgagaacggaagagaaggtcgtcgccgagatggaggagcaccagcaccaagttcacaatgtggaaatagtcgtgctcgaagactag

SEQ ID NO: 189205 - DNA, 1692 bp, synthetic construct
  misc_feature 1..1692: note = Description of Artificial Sequence: Synthetic coding sequence
  source 1..1692: mol_type = other DNA
atggccaacgccgaggtgagcgtgcccgtgggcgacgtggtggtggtgcctactgaaggaaatgaaggcgaaaaccccgaggacaccaagacccaggttatattgcaactgcagcctgtgcaacagggtatctatgaagcaggttcagagaacaatactgcggttgtcgcagtggagacccacacgatccataaaatagaggagggcatcgataccggcaccattgaagcaaacgaggacatggagatcgcgtatccgattacctgcggggagtcaaaagctatccttttatggaagaagtttgtgtgccccggaataaacgtgaagtgtgtcaagtttaacgatcagctcataagtccaaagcatttcgtccatctggcaggcaagtccacactgaaggactggaagcgtgctattagactcggcggcatcatgttgcgtaagatgatggatagtgggcagattgatttctaccagcatgataaagtatgttctaacacatgccgaagcacgaaatttgaccttctgatcagctcagcgcgcgcaccggtgcccgggcagcagacatccgtcgtgcaaacaccgacatcagccgatggaagcattacccagattgcaatttcagaggagagcatggaggaggccggactggagtggaattctgcacttaccgctgcggtgaccatggccactgaggaaggagtaaaaaaagacagcgaggagatcagtgaggacacccttatgttctggaagggtatcgctgatgtaggcctgatggaggaggttgtctgtaacattcagaaggagattgaggaactgctgaggggagtgcagcaacggctgatacaagctccctttcaggtgacggacgctgccgttctaaacaatgttgcccacacgtttgggcttatggacaccgtgaagaaggtgctcgacaaccgccgtaaccaggtcgaacagggcgaagagcagttcctgtacaccttaacagatctcgaaaggcagcttgaagagcaaaaaaagcagggacaagatcatcgattaaagtcccagactgtccagaacgtggttctaatgcccgtgtcgacccccaaaccacccaagcgcccacggctgcaacgccctgctagtacaaccgtcctttcaccctcccccccagtgcagcagccacagtttaccgtgattagcccaataacaatcactcccgtgggccaaagtttttccatgggaaatatccccgtcgccactttgagccagggtagctcgcccgtcaccgtgcacaccctgcccagtggaccacaattattcagatatgctacagtagtgtcttccgccaaaagctcctcaccagacacagtgacgatccacccttcctcctccttggctctactctcatcaactgctatgcaagacgggtccactctgggaaatatgacaacaatggtttcccctgttgagcttgtagccatggagtccggattgacctctgcgatacaggctgtggaaagtaccagcgaagatggtcagactataatcgagatcgatccagctccagaccctgaggcagaggataccgagggaaaggctgttatactcgagacagagctaaggactgaggaaaaggtggttgccgaaatggaggagcaccagcaccaggtgcacaatgtggagattgtcgtgctggaggattag

SEQ ID NO: 189206 - DNA, 1692 bp, synthetic construct
  misc_feature 1..1692: note = Description of Artificial Sequence: Synthetic coding sequence
  source 1..1692: mol_type = other DNA
atggccaacgccgaggtgagcgtgcccgtgggcgacgtggtggtggtgcctactgaagggaatgaaggggaaaatcctgaggacactaagacccaggtgatactccaactgcaacctgtacagcagggcatctacgaggccggtagtgaaaacaatacggccgtagtggctgttgaaacccatacaatacacaaaatcgaagagggtatcgataccgggacgatagaagcgaacgaggacatggaaatagcttacccaataacttgtggcgaatcaaaggccattttgctgtggaagaagttcgtgtgccccggcattaacgtaaagtgtgtaaagttcaatgaccagcttatcagtccaaagcattttgtgcacctggcagggaaatccaccttaaaggattggaaaagggctatacgccttggagggattatgctgcgcaaaatgatggatagcggacagattgatttttaccaacacgacaaagtgtgttcaaatacctgcagatctacaaagttcgatctgctgatatcttccgcgcgggcaccagtgcctggccagcagacttctgtggtacagaccccgacctctgccgacggctccattacacagattgcaataagcgaggagtccatggaggaagctggcctggagtggaactccgctctgaccgccgctgtcactatggccacagaggaaggagtcaagaaagacagtgaggagatttcggaagacaccctgatgttttggaagggaatagcggatgttggcctgatggaagaggtggtctgcaacatccagaaagaaatcgaggagctgctaaggggggtccagcaaaggctgatccaggcgccattccaagttaccgacgctgcagtgttgaataacgtggctcatacattcgggctaatggacacggtcaagaaagtgctggataaccgaaggaatcaggtggagcagggagaggagcaattcctctacaccctcacagatcttgaaaggcagctggaagagcagaagaaacagggacaggaccacagattgaagtctcagactgtccagaacgtcgtgctcatgcccgtcagcacgcctaagccacctaagcgccctagactgcaacgcccagcgtctacaactgtcctttccccctcacctcctgtgcagcagccccagttcaccgtcatatcacccatcactattaccccggtggggcagtctttcagcatggggaatattcctgtggccacattgtcccagggctcctccccggtgaccgtgcacacattgccaagtggaccacagctgttcaggtacgcgacagtggtcagttcagccaagagctccagtccggacacagtgaccatccacccctcatccagtttagccctgctttcctcaacggcaatgcaagacggatccacattgggcaatatgacaactatggtgtccccagtcgagctggtggccatggaatctggacttacctcggccatccaggcagtagagagcaccagtgaagatggccagacaattatcgagattgaccccgctccagacccggaagcagaggacaccgaggggaaggccgtgatattggagacagaattgcggactgaagaaaaggtcgtggctgagatggaggagcaccagcaccaggtccataacgtggagatcgttgtccttgaagactag

SEQ ID NO: 189207 - DNA, 1083 bp, synthetic construct
  misc_feature 1..1083: note = Description of Artificial Sequence: Synthetic coding sequence
  source 1..1083: mol_type = other DNA
atgctgcggcggctgcccgccctggccgcccggcggccccccgcccgaagacggcgtatctatgaggcaggaagcgaaaataataccgccgtggtggcggtcgagacccatactatccataaaatcgaggagggaatagataccggaacaatagaggccaatgaagatatggagatcgcctacccgatcacgtgcggggaatctaaggccatcttactctggaagaagttcgtatgccctggaattaacgttaagtgtgttaagttcaacgatcagctcatctcacccaagcacttcgtccatctggccggtaagtccaccttgaaagactggaagcgcgcgatacgtttagggggcattatgttgagaaagatgatggactccggtcaaattgatttctatcagcacgataaagtgtgttcaaacacttgccgttctaccaagtttgacctcctcatttcctctgcacgggcccctgtgcctggacagcagacctctgtggtgcagactccaacgtccgctgacgggtccattacacagatcgccatttcagaagagtcaatggaggaggcggggctcgaatggaatagcgcgcttaccgccgccgtgactatggccacagaagaaggggtgaagaaggattctgaggagatctctgaagataccctgatgttttggaaagggatcgccgacgtgggtctcatggaagaggtcgtttgtaacattcagaaggagatcgaagagctgttgaggggagtgcagcaacggctcatccaggcaccattccaggttaccgatgctgctgtgttaaataatgtggcccatactttcggcctgatggacacagtgaaaaaagttctggataatcggagaaaccaggtggagcaaggtgaggagcagttcctgtatacactcaccgatctggagcgccagctggaggagcagaagaaacaggggcaggaccacagattaaagagccaaacagtacaaaatgtggtgcttatgcccgtctcaacaccaaaaccccctaagcgaccacgtctgcagcggcccgcttctactaccgtgctcagcccctcctag

SEQ ID NO: 189208 - DNA, 1593 bp, synthetic construct
  misc_feature 1..1593: note = Description of Artificial Sequence: Synthetic coding sequence
  source 1..1593: mol_type = other DNA
atggccacccccgacgtgagcgtgcacatggaggaggtggtggtggttacaacaccagatacagccgtggatgggtccggcgttgagggagttaaaaccgttcttgtcaccaccaacctcgccccccacggcggtgacctcactgaggataatatggagactgagaacgccgccgctgccgctgcagcagctttcaccgctagctcacaactgaaagaagccgtgttggtcaaaatggccgaggagggagagaatttggaagctgaaatcgtctaccccataacctgcggtgattccagggctaatctgatctggcgcaagttcgtgtgccctggaataaatgtcaagtgcgtgcagtatgatgaacatgtaatcagtcccaaggagttcgtacacctggccggtaagtcgaccctcaaagattggaagagagccattagaatgaacgggataatgctgaggaagataatggactctggagagctggacttctatcagcacgataaagtttgctctaacacgtgtcgttccactaaaatagatctgtctggcgctagggtgagtctgtcgtcacccaccagcgccgaatacatccctctgacgcccgcagctgctgatgtcaacggatcgcccgcaaccattactattgaaacatgtgaggatccaggtgactggacggccgctataggggatgataccttcaccttttggcgggggcttaaggacgctggcctgctggacgaggttatccaggagttccatcaagagcttgttgaaacaatgaggggactgcagcagcgtgttcaggacccccccctgcagttacgagacgccgtgttactcaacaatatcgtccagaatttcggcatgttggacttggttaagaaagtgctcgcctctcacaaatgccagatggataggtctagagagcagtacgccagggatctggctgccctggagcagcagtgtgatgagcaccgtcggagggcaaaagagctgaagcacaagagtcaacatttgagtaatgtgttaatgacgttgacccctgtctcactgcctccgccagtgaaacgacctcgcttagcgagagccacttcaggtcctgctgctatggcgtcccaggtgctgactcaatcagcccagttggcgcttggacctggcgtccccgtccctcagcttactagtgtacccctgggtaaggtggtgagcacactccctagcaccgtgctgggaaagggatccctgcaggctcctccagcatccagtccagcatcaccgctcctgggaggctacaccgttttagcctcttccgggtcaacgtacccctctactgtggagattcaccctgacgcctcttcacttacagtccttagtaccgcggcagtgcaggacggcagtaccgtgtttaaagttgtgagccctctgcagttgctgaccttgcccggactggggcccacactgcaaaacgtggcccaagcttctccagggtcctctaccatcgtgactgtgccagcgggagccgctcccggcccagaggagcacacagccaccattgaggttgcagctatggccgaagatcacgagcgcaagtag

SEQ ID NO: 189209 - DNA, 1440 bp, synthetic construct
  misc_feature 1..1440: note = Description of Artificial Sequence: Synthetic coding sequence
  source 1..1440: mol_type = other DNA
atggagaccgagaacgccgccgccgccgccgccgccgccttcaccgcgtctagccagctcaaggaggctgtccttgtgaagatggccgaggaaggagaaaacttagaggctgaaatagtatatcctattacatgcggcgattctcgggctaacctgatctggcgcaagttcgtatgccctggcataaacgtgaagtgtgtgcagtatgacgaacacgtcatttccccgaaggaattcgtgcatctagctggtaagtcaacgcttaaggattggaaaagagccatccggatgaacggcatcatgctaaggaaaatcatggacagcggcgaacttgatttctatcagcatgataaagtgtgcagtaatacttgtcgctccacgaaaatcgaccttagcggcgcccgggtctccctcagctcccccacttctgccgagtacatcccccttacacctgcggccgccgacgttaatggttcccccgcaactattacgatagaaacttgtgaggatcccggcgactggacggcagcaattggggatgacacttttaccttctggagagggttaaaggatgctggcttgctcgatgaagtgatccaggagttccatcaggagttggtggaaaccatgagaggcctgcagcaacgggtccaggatccaccactacaactgcgagatgcagtactgctgaataatattgtgcagaactttggcatgctagacctagtcaaaaaagtgcttgccagtcataagtgtcaaatggatcggtcaagagagcagtatgctcgtgacctcgctgccctagaacagcagtgcgatgaacacaggcgacgcgcgaaggagctgaagcataagtcgcaacacctatccaatgtgctgatgacactgacacccgtgtccctgccccccccggtgaaaagacctaggctggcgcgggccacttcagggcctgctgcgatggcttcgcaggtgctgacacagagcgcccagcttgctctggggccaggagtaccggttcctcaacttacctcggtgccccttggcaaagtagtgtccactctccccagtactgttctgggaaagggatctctgcaagctcctcctgcctctagtcctgcctcacctttattgggaggctacaccgtgctggcctccagtggatcaacctacccaagcacagtggaaatccacccggatgcaagctccctcactgtcttgagtacggcagcggttcaggatggtagcaccgtctttaaagtcgtcagccccctccagctgctcactcttccaggcctcggcccaacactgcagaacgtcgcccaggcatcccccggatccagcaccatcgtgacagtgcccgctggggctgctcctggccccgaagagcacacagctactatcgaagtcgctgccatggccgaggatcatgaacgaaaatag

SEQ ID NO: 189210 - DNA, 1593 bp, synthetic construct
  misc_feature 1..1593: note = Description of Artificial Sequence: Synthetic coding sequence
  source 1..1593: mol_type = other DNA
atggccacccccgacgtgagcgtgcacatggaggaggtggtggtggtaacaacacctgacaccgccgtggatggctccggtgtagagggagttaaaaccgttttggtcactacgaacctggccccacacgggggagacctcacggaagacaacatggagaccgagaatgctgcggccgcagcggctgcagcattcacagcgtcgtcgcagcttaaggaggcggtactggtcaagatggctgaggaaggtgagaacctcgaggctgaaattgtttatcccattacctgtggagattcccgagccaatctaatttggcggaagttcgtatgtccaggaatcaatgtcaagtgtgtgcaatacgatgagcacgtgattagtccgaaggaatttgtgcatctcgcaggcaagagtactttgaaggattggaagcgcgccatcagaatgaacgggattatgcttcggaaaatcatggacagcggtgagctggacttttaccagcacgacaaggtttgttccaacacatgcagaagcaccaaaatagatctgagtggagcccgcgtgagcctgtcatcacccacctccgcagaatatatccctcttactcctgcggcggccgatgtcaatggaagtcccgcaacaattacgattgaaacttgtgaggaccctggtgactggaccgcagctattggcgacgatacgtttactttttggcggggcctcaaggatgcagggctactcgatgaggtgattcaggaattccaccaagagcttgttgagactatgaggggactgcagcagagagtgcaggaccccccactgcagctgcgcgacgccgtgcttctgaataatatcgtgcagaactttgggatgctggacctggtcaagaaggtcctcgcctctcataaatgccagatggacagaagtagagaacagtatgcgcgggatctcgccgctctggagcagcaatgcgatgaacacagaagaagggccaaagagttgaagcacaaatcccaacacctgtctaacgttctgatgaccctgacgccagtaagtctccccccccctgtcaagaggcctagactagccagagccacttcaggcccagccgccatggcctcccaagtattgacacagagtgcacagctggctttgggacccggcgtgccagttccacagctgacatctgttcccctgggtaaagtggtgtctaccctgccgtctacagtgctggggaagggctccctgcaggcccctcccgctagttcaccagctagtccacttctgggaggctacaccgtgttagcaagtagcggcagcacttatcccagcactgtcgaaatacaccctgatgcgagcagtcttacagtgctgagcacagctgcggtgcaagatggctctactgtgttcaaagttgtgagtccactgcaattactcacgctacctggcttaggaccaacactccagaatgtggcacaagccagcccagggagcagcaccatcgtgacagttcctgctggggcagcacctggccctgaggaacacaccgccactatcgaggtggctgccatggcagaagaccatgagagaaaatag

SEQ ID NO: 189211 - DNA, 1401 bp, synthetic construct
  misc_feature 1..1401: note = Description of Artificial Sequence: Synthetic coding sequence
  source 1..1401: mol_type = other DNA
atggccatggacgtgacccggagccaggcccagaccgccctgaccctagtcgagcagattctggcagagtttcagcttcaggaagaagatctgaaaaaagtgatgaggcggatgcagaaagaaatggatcggggcctgagactggagacccacgaggaagcctccgttaagatgctccccacatatgtacgttctacaccagagggctccgaggtgggggattttctctctctggatttaggcggaacaaattttagagttatgctggtcaaagttggggaaggagaggaagggcagtggagcgttaagaccaagcaccagatgtacagtatcccagaggatgccatgactggcaccgctgagatgctgtttgattacatttccgaatgtatctcagacttcctggacaagcaccagatgaaacacaagaagttgcccctcggctttaccttctcttttcccgttagacacgaggacatagacaagggaatcctgctgaattggacgaaaggcttcaaggcctccggtgctgaaggaaataatgtggtggggctgctgcgggatgcgatcaaacgcagaggcgacttcgagatggacgtggtcgcgatggtaaatgacactgtagctactatgatctcctgctactatgaggatcatcaatgtgaggtcggaatgatcgttggaacgggctgtaatgcctgctacatggaagaaatgcagaacgtcgagctcgtggaaggcgacgagggccgcatgtgcgtaaacaccgagtggggcgcctttggagattccggagaactggacgagttccttctggaatacgaccggttagtggatgagtctagtgctaacccagggcagcagctgtacgaaaagctgatcggcggtaaatatatgggcgagctcgtgaggctggtgctgctgcgtctggtcgacgagaatctcctctttcacggcgaggcatctgagcaactcagaacccgtggtgccttcgagactagattcgtttcccaggtggaatccgataccggtgatcgcaaacagatctataatattctgtcgaccttaggattgaggccgtctactaccgactgtgacatcgtgagaagagcctgcgaaagcgtcagcaccagagccgctcatatgtgtagcgcaggcttagctggggtgattaatagaatgagggagtcaagatcagaagacgtgatgcgaatcactgtgggcgtggacggatctgtgtacaagctgcatccaagcttcaaggaacgattccacgcgtcggtgcggaggctaacacctagctgcgagatcacctttatcgagtctgaagaaggctctggcaggggggccgctcttgtcagtgctgtcgcatgcaagaaagcatgtatgctcgggcagtag

SEQ ID NO: 189212 - DNA, 1395 bp, synthetic construct
  misc_feature 1..1395: note = Description of Artificial Sequence: Synthetic coding sequence
  source 1..1395: mol_type = other DNA
atgccccggccccggagccagctgccccagcccaacagccaggtggagcagatcttggcagagtttcagttgcaagaggaagacctgaaaaaggtcatgaggcggatgcagaaggagatggataggggcctccgcttagaaactcacgaggaggcttcagttaagatgcttcctacatacgttaggagtacccccgagggctctgaggtcggggacttcttaagccttgatcttgggggaactaacttccgtgtcatgctggtcaaggtgggcgagggcgaggaaggccagtggtctgtgaaaacaaagcaccaaatgtattccattcccgaggatgctatgactggaaccgcagaaatgttgttcgactacatttctgagtgcatatccgattttcttgacaaacatcagatgaagcataagaaattgccgttgggattcacattttcatttcccgtacggcatgaggatattgacaagggtatactcctaaactggacaaagggctttaaagcctccggcgccgagggaaataacgtggtggggctgttgcgcgatgcgattaaaagacggggcgacttcgaaatggacgtggtcgctatggtgaatgacaccgtcgctacaatgatctcatgttattacgaggaccatcaatgcgaggtgggaatgatagtagggacagggtgcaatgcatgctacatggaggaaatgcagaacgtcgagcttgtagagggggatgagggcaggatgtgtgtgaatactgaatggggggccttcggcgattcaggcgagctcgatgagttcctgctggaatacgaccgacttgtggatgagagtagcgccaaccctggtcaacagctgtacgagaaactgatcgggggcaaatacatgggagaattagtgcgtctggtgctcctgcggctggtcgacgagaacctccttttccacggggaagcctccgagcagttaaggaccaggggcgccttcgaaacgcggtttgtatctcaggtggaatctgatactggagacaggaagcagatctataacatcttgagcacactcggactccgcccctccaccacagattgtgatatcgttagaagagcatgcgagtctgtttcgacgagagcggcccacatgtgttccgcaggactagccggggtgattaaccggatgagagaaagtcgcagtgaggatgtcatgaggattaccgttggcgtggacggcagcgtctataagttacatccttcgttcaaggaaaggtttcacgctagtgtgaggagactgacgccatcctgcgagataactttcatcgagagtgaagaggggtccggccgaggggctgccctggtatccgctgtcgcctgtaagaaagcttgtatgctgggacagtag

SEQ ID NO: 189213 - DNA, 1398 bp, synthetic construct
  misc_feature 1..1398: note = Description of Artificial Sequence: Synthetic coding sequence
  source 1..1398: mol_type = other DNA
atgctggacgaccgggcccggatggaggccgccaagaaggagaaggtcgaacagatcttggcagagttccagctgcaggaagaggacttaaagaaagtcatgcgtcggatgcaaaaagagatggatcgcggacttcgtctggaaactcacgaagaggcctccgtcaagatgctccccacatatgttaggtcaacaccggagggctcggaggtgggcgacttcctgtcactggacttgggaggcactaacttcagagtaatgctagtaaaagtgggcgagggtgaagaggggcagtggtctgtgaagactaagcatcagatgtacagtatccccgaggacgccatgacaggcacagctgagatgctttttgattatatcagcgagtgtatcagtgattttttggacaagcatcagatgaagcataaaaagctccctctgggctttacgttctcctttccagtgcggcacgaggacatagataaaggtattttgttgaactggacaaaagggttcaaagcatctggcgcggagggcaacaatgtggtcggattacttcgcgacgcaatcaagcggcgtggagatttcgagatggacgtggtggctatggtaaacgacactgttgcgaccatgattagctgttactacgaggatcaccagtgcgaggtgggtatgatcgtgggtacaggatgtaatgcctgttatatggaagaaatgcaaaatgtcgagctggttgaaggagatgaggggcgtatgtgtgtcaacaccgagtggggcgcattcggggactctggggagttagacgagtttcttctggagtacgaccggctggttgacgagtcatctgccaatccagggcagcagctttacgaaaaactcatcggcgggaagtacatgggcgagttggtaagacttgtgctcctgagattagtggacgagaatctgctgttccacggagaagcgagtgaacagctcagaacccggggggcatttgagacccggttcgtaagccaggtcgaatcagacaccggcgacagaaagcagatatacaacatactgagtacactgggacttagacctagcaccaccgactgcgacatagtgagacgggcctgcgaatcagtgtctacacgcgcagcacacatgtgcagcgcagggttggctggcgttataaatcgtatgagggaaagccgctccgaagacgtcatgaggattacagttggagtcgatggctcggtatacaagctgcatccttcttttaaagaacgctttcacgccagtgtaagaaggctgacacctagctgtgagatcacgttcatcgagtcagaggaagggtcagggaggggcgccgcgcttgttagcgcggtggcatgcaagaaggcctgcatgctgggacagtag

SEQ ID NO: 189214 - DNA, 1878 bp, synthetic construct
  misc_feature 1..1878: note = Description of Artificial Sequence: Synthetic coding sequence
  source 1..1878: mol_type = other DNA
atgcccggcaccaagcggttccagcacgtgatcgagacccccgagcccggcaagtgggagctgtctggctatgaggcagctgtccctatcacggaaaaatcaaacccactgacacaggacctggacaaggccgatgcagaaaacatcgtgcggctcttgggccagtgtgacgcagagattttccaggaggagggtcaggcactgtcaacctatcagcgtctctattccgagagtattctgactacaatggtgcaggtcgcaggaaaagtccaggaggtccttaaagagcccgatggtggacttgtggtcctgtctggcggaggcacaagtggtagaatggcgtttctgatgagcgtgtcctttaaccagctgatgaaaggactgggccagaagcccttgtacacctacttaatagcaggaggggacaggagcgttgttgcaagcagagaaggaaccgaggattccgccctccacggcatcgaggagctcaaaaaggtggcagccggaaaaaaacgtgtgattgtgattggtataagcgtgggcctttccgctcccttcgtggctggccaaatggactgttgtatgaacaacacggccgtgtttcttcccgtgctggtcggcttcaacccagtgtcaatggctaggaacgaccccattgaagactggtcctccacatttcgccaggtcgccgagcggatgcagaagatgcaggaaaagcagaaagcgttcgtgttgaaccctgccatagggccagaaggcttaagcgggtctagtcgcatgaagggcggcagtgccacaaagatcctgttagaaaccttgctgcttgctgcccataaaaccgttgaccaaggtattgccgcctcccaacggtgcctgctggagatcctccgcacctttgagagggcccatcaggtgacttactcacagagcccaaaaatcgcaaccctgatgaagtccgtgtccacttcgctcgagaagaagggacacgtttacttggtgggctggcagaccctcggcattatcgccataatggatggcgtcgagtgcatccacacttttggcgctgatttcagagacgtcaggggattcctcattggggaccacagtgatatgtttaatcaaaaagctgaattaactaatcagggcccacagttcacattcagccaggaggactttctgaccagtattctgccgagtctgacggagattgataccgtcgttttcatcttcactctggacgataacctgacagaagtgcagactatcgtcgaacaggttaaagagaaaacaaatcatatccaagccttggcacactcaaccgttgggcaaaccctactgattccactgaaaaaactttttccaagtatcattagtatcacatggcccctacttttcttcgaatacgagggaaatttcatccaaaagtttcagcgggagctttccacgaaatgggtcttgaataccgttagcaccggcgcacatgtgctgctcggcaaaattctgcaaaaccacatgctagacttaaggatatccaactccaagttgttttggagagcactagcaatgttgcagcggttttccggccagtccaaagcccgatgcattgagagcctcttgagggccatccactttcctcagccacttagcgacgacatccgcgcggctccaattagttgtcatgttcaggtcgctcacgagaaggagcaggtgatcccaattgcactgctatcactcctgtttcgctgctcaattacggaagcccaggcccacctggcagcagcgccttctgtttgcgaggccgtgcgaagcgcgctggccgggcccggccaaaagagaacagccgatccactagagatactggagcccgatgttcagtag

SEQ ID NO: 189215 - DNA, 1308 bp, synthetic construct
  misc_feature 1..1308: note = Description of Artificial Sequence: Synthetic coding sequence
  source 1..1308: mol_type = other DNA
atggactgctgcatgaacaacaccgccgtgttcctgcccgtgctggtcgggttcaatccagtaagcatggcgagaaacgatcccatagaggactggtcatcgacattccgtcaggtagccgagcggatgcagaagatgcaggaaaagcaaaaggcctttgtcctaaaccctgccataggacctgaggggctaagcggaagttcacggatgaagggcgggtctgccaccaagattctgctggaaacactgctgctagcggcccataaaactgttgatcaaggtatcgctgcaagccagcggtgtctcctggagatcctcagaacttttgagagggctcaccaggtgacctactcacagtcaccaaagattgccaccctcatgaaatcagtgagcaccagcctcgaaaagaagggccacgtgtatctggttggctggcagacacttggaattatcgccatcatggatggtgtggagtgcatccacaccttcggggccgatttccgggacgttagaggcttcctcatcggcgaccattctgacatgtttaaccaaaaagccgagctgacaaaccaaggcccgcagtttacattctcccaggaagattttctcacaagtattctgccgtcactgaccgaaattgacaccgttgtgtttatattcacgttggacgataacttgactgaggtccagactatcgtggaacaggtaaaggagaagacaaatcacattcaggcactggcccattccaccgtaggtcagaccctgctgattcccctcaagaaactttttccttcgataatctctatcacgtggccgctgctattttttgagtacgagggtaacttcatacagaagttccagagagaactgtcaaccaagtgggtgctgaacacggtgtctacaggtgcacacgttcttctcgggaaaatcctgcagaaccacatgctggaccttcgcatttcaaacagtaaactgttttggcgtgcactggctatgctgcagagattctcaggccagtccaaagcccgatgcatcgagagcttgctgagggctatacacttccctcaaccactgtccgatgatataagggcggcccccatcagttgtcatgtgcaggtcgcccatgagaaggaacaggtaatccccatagccctcttatccttactctttaggtgctccattactgaagcccaagctcatttggctgccgcgccttctgtgtgtgaagccgtgcgttccgcgctggccggtccaggccagaagcggacagctgatcctctggagatactagagccagacgttcaatag

SEQ ID NO: 189216 - DNA, 1659 bp, synthetic construct
  misc_feature 1..1659: note = Description of Artificial Sequence: Synthetic coding sequence
  source 1..1659: mol_type = other DNA
atgcggctgctgcccctggcccccggccggctgcggcggggcagcccccgccacttaccctcatgttcccctgcccttttgctgctggtcctcggaggttgcttaggtgtctttggcgtggcagccggtaccaggagaccgaatgtggtcctcctattgaccgacgatcaggacgaggtgctcggcggcatgacccctcttaaaaaaaccaaagcattgataggagaaatgggaatgaccttttcctcagcatatgtgccaagcgccctgtgttgcccatccagggcatcaatacttaccggcaagtatcctcataatcaccatgtggtgaataataccttggaggggaattgcagttctaagagctggcagaaaatccaggagccaaacactttccccgctattctgaggtccatgtgcgggtatcagacctttttcgcaggcaaataccttaatgaatatggtgccccggacgcaggtggactggagcatgtaccactgggctggagctattggtatgctctggaaaagaactctaagtattacaactacaccctgagtattaatggaaaggcgagaaagcatggcgagaattactctgttgactacctcacagacgtcttggcgaacgtgagtcttgattttcttgactacaagagcaacttcgagccgttttttatgatgattgctaccccagcccctcactctccttggacagcggcacctcagtaccaaaaggcctttcagaatgtattcgctcctagaaacaaaaactttaacattcatggtaccaacaagcattggcttatcagacaggccaagacgccaatgaccaatagttctatccaatttctggacaacgcatttcgtaaacggtggcaaactttgctgtcagtcgacgatttggttgagaaacttgtcaaaaggttggaatttaccggtgagttaaacaatacctatatcttttatacatcagataatggctatcacaccggacaattctccctcccaatcgataagaggcagctctatgaattcgacatcaaggtgccgcttctggtgcgcggtccagggatcaaaccaaatcaaacaagtaaaatgctggtggccaatatagatctaggtcccacaattttggatattgcaggttacgacctgaataaaacccagatggatggaatgtcccttcttcccatacttaggggcgcttccaaccttacctggcgttccgatgtcctggtggagtatcagggtgaggggaggaacgttaccgatccaacctgccccagtttgtcaccaggggtatcacagtgttttcccgactgcgtgtgcgaggatgcttacaacaatacttacgcctgcgtgcgcaccatgtccgctctgtggaacctccagtactgtgagtttgatgatcaggaggtgttcgttgaggtctataacctgacagcagatcccgaccaaatcacaaatattgccaagaccatcgatcctgagctgctgggcaaaatgaattaccggctgatgatgctgcagagctgcagtggacccacctgccgaactcccggcgtgttcgaccccggatacaggtttgaccctcgcctaatgttctctaaccgcggatccgtgaggacgcgccgcttctcaaagcacctactctag

SEQ ID NO: 189217 - DNA, 1410 bp, synthetic construct
  misc_feature 1..1410: note = Description of Artificial Sequence: Synthetic coding sequence
  source 1..1410: mol_type = other DNA
atgtacgtgcccagcgccctgtgctgccccagccgggccagcatcctgaccggaaagtaccctcacaaccatcacgtagtcaataatactctggagggcaactgctcctcaaaatcttggcagaagatccaggagccaaataccttccctgcaatcctaagatcaatgtgcgggtatcagacattcttcgctggaaaatatttaaatgagtacggggcccccgacgccggcggcctggaacatgtgccactcggctggtcctattggtatgccttggaaaagaacagcaagtactacaactacaccctctccattaacggaaaggcccgcaagcacggtgagaattacagtgttgattacctaactgatgtgttagcaaacgtgagtcttgattttcttgattacaaatccaattttgagccttttttcatgatgatagccactccggctcctcactccccctggaccgctgctccccagtatcagaaggcctttcagaacgtttttgctccaaggaacaagaattttaatattcatggtacaaacaaacactggttgatccgacaggccaagacacctatgaccaactcctccattcagttcctcgacaacgcgttccgtaagcggtggcagacactcctgagcgtggatgatcttgtggaaaaactcgtgaagcggctcgagtttactggagaactgaacaacacttatattttttacacatccgacaacggttaccacactggccagttttctctccctatcgataaaaggcagctgtatgagtttgatattaaggtgcccctgctggtccgagggccagggatcaaaccgaaccagacctcaaagatgctggttgccaatatcgacctgggaccgactatccttgatatagccggctacgacctgaacaaaacccagatggacggtatgtcactcctgcccatactccgcggcgctagcaacctaacctggagaagtgacgttctcgtggaatatcaaggcgagggaaggaatgtgaccgaccccacatgcccttctttaagccccggtgtctcccagtgtttcccagattgtgtgtgcgaggatgcctataacaatacctacgcctgcgttagaacaatgtcagctttgtggaacctgcaatattgtgagtttgacgatcaagaagttttcgtggaagtatacaacttaactgccgaccctgatcagatcaccaatattgccaaaaccattgatccagaactgctcggaaagatgaattatcgtctaatgatgctacagtcttgttcaggaccaacctgtcgtactcccggcgtcttcgatcccggctatcggttcgacccacgcctgatgtttagtaacagaggttctgtgcgtacgcgccggttttcgaaacacctgctttag

SEQ ID NO: 189218 - DNA, 1599 bp, synthetic construct
  misc_feature 1..1599: note = Description of Artificial Sequence: Synthetic coding sequence
  source 1..1599: mol_type = other DNA
atgcggctgctgcccctggcccccggccggctgcggcggggcagccctcgtcacctgccatcctgctcccccgccctcttgctgctcgttctcggtggatgtttgggagtgttcggtgtcgctgctggaacccggagaccgaatgtcgtgctacttctgaccgacgaccaggacgaagttctgggcgggatgtacgtcccttcagcgctgtgctgtccctctcgtgccagcattttaacaggcaagtatccacacaaccaccatgtggtaaataacacattagaagggaattgctcctccaagagttggcagaaaatacaggaaccgaatacctttcctgccattttgagaagcatgtgcggctaccagaccttctttgcaggcaagtacctaaacgaatatggggcacctgacgccggaggacttgaacatgtcccactaggatggtcctattggtacgccctggagaaaaacagcaaatactataattatacactgtctatcaacggcaaggctcgcaagcacggcgagaactacagcgtggactacttaacggatgtcttagctaatgtgtcccttgattttctggactacaagtcaaattttgagcctttttttatgatgatcgccacaccagccccacactcaccgtggacggctgctccccagtaccagaaggctttccagaacgtgtttgcacccagaaataaaaattttaacatccacggtacaaacaagcattggctcatccgtcaggccaaaaccccaatgaccaattcctctatccagttcctggataacgcgtttagaaagagatggcagacgcttctgagcgtggacgacctggtcgaaaagcttgtgaaacgattggagtttactggcgaactcaataacacatatattttctatacatccgataatggctaccatacagggcagtttagtctgcccattgataagagacagctgtacgagtttgatatcaaagtccctctcctcgtcagagggcctggcattaagcccaatcagacatctaaaatgttggtcgctaatattgatctaggacccaccatcctcgacatcgccggatatgatctcaacaaaacccagatggatggtatgtccctcctgccaatactgaggggcgcctcaaacctaacgtggcggagcgacgtgctagtggaataccaaggagaagggaggaatgtcactgaccccacatgcccaagtctgtctcctggagtctcacagtgttttcccgattgtgtgtgcgaagatgcttacaacaatacttacgcgtgcgtgcgaactatgtcagccttgtggaacctccaatactgtgagtttgacgaccaagaggtctttgtggaggtctacaatctgaccgccgatcctgatcaaatcaccaacatcgcgaagactatcgaccctgagttgctcgggaagatgaactatagactcatgatgctccagagctgttcaggccccacatgtcgtacccctggtgtgtttgaccccgggtataggtttgacccccgcctgatgttcagcaatagggggagtgtaaggactagacgattttcgaaacatctgctatag

SEQ ID NO: 189219 - DNA, 2154 bp, synthetic construct
  misc_feature 1..2154: note = Description of Artificial Sequence: Synthetic coding sequence
  source 1..2154: mol_type = other DNA
atgcccatcggcgactgcagcgtggccgccaagccccggaagcagttactatgctccctgtttcagactacgcttggctatcgagcaagggcaagcggatggaaacccatggttatttgccgtggatcgcatgcatttaaggatctaatcaacacgtaccgaatgattgagcaggatgattttgatattaatacaaggctgcacactatagtgaggggtgaggacgaggctgccatggtggagagcgttggcctggccctagtcaaactgcctgacgtgctgaaccgcctgaagcctgacatcatgatagtacatggggatcgcttcgatgcgctcgctttggcgacttcagccgcgctcatgaatattcggattcttcatatcgaggggggggaggtctctggcaccattgacgactccatccggcatgctataaccaagcttgcccattaccatgtctgttgtacaagatctgcggaacagcacctcatctctatgtgcgaagaccacgacaggatcctgctcgctggctgtccctcttacgataagctgctaagtgctaagaataaagattatatgagcatcatcagaatgtggctcggggatgatgtaaaatctaaagattatatcgtcgctctgcagcatcccgtgaccacagatattaaacacagcattaaaatgttcgaactgacactcgatgcactgatctcattcaataagcgaactcttgtgttgttcccgaatattgatgccggcagcaaagagatggtccgtgttatgcgaaagaagggaattgagcatcaccccaacttccgcgcagtgaaacatgtccctttcgatcagtttattcagctggtggcccatgccggctgtatgattggtaactcatcatgcggagtgagggaggttggagccttcggtaccccagtgatcaacctcggcaccaggcagattggtcgcgagactggtgagaacgtcttgcacgtcagggatgcagacacccaggacaagatcctgcaggccctgcacctgcagtttggaaaacagtacccgtgctccaaaatctatggtgacggcaacgcggttcctaggattctcaagttcctgaaatcaattgacttgcaagagcccctacagaagaagttttgtttcccgcctgtgaaggagaacattagccaggatatcgatcatatcttggaaaccctatccgcgctcgcagtggacttgggaggaaccaacctgcgggttgccatcgtctctatgaagggtgagatcgtcaagaagtatactcagtttaatcccaagacctacgaggagagaatcaatctcatcctccagatgtgtgtagaagccgcagccgaggcagtgaagctcaactgccgtatccttggcgtggggatcagcacgggtggtagagtgaaccccagggaggggatcgtcctccactctaccaagttgatccaagagtggaattcagtcgacctgagaactcctttgtctgacacgctccatctcccagtgtgggtggataacgatggcaattgtgccgctctcgcagagcgtaagttcggacaggggaaaggcctcgagaacttcgttaccttgattacgggaaccggaatcggcggtgggattattcaccagcacgaattgatccatgggtcgtctttctgtgcagctgagctcggtcatttggtggtcagcctagacggccccgactgcagctgcggcagccacggctgcattgaagcctacgctagcggaatggccctgcagagagaagccaaaaagcttcatgatgaggacctcctgttagtggagggcatgagtgttccaaaggatgaagctgtgggcgccttgcaccttatacaagctgctaagttaggcaatgctaaggcccagagtattctgcgcactgctgggacagcgctgggacttggcgtggttaatattcttcacacgatgaatccctccttggtgattttgtcaggagtgctggcttcccactatattcatattgtgaaggacgtgatccggcagcaggccctgtcatcagtccaggacgtggacgtagtcgtttccgatctcgtcgatcctgctctgctgggagcagcttctatggtgctcgattatacaactcggaggatttactag

SEQ ID NO: 189220 - DNA, 2169 bp, synthetic construct
  misc_feature 1..2169: note = Description of Artificial Sequence: Synthetic coding sequence
  source 1..2169: mol_type = other DNA
atggagaagaacggcaacaaccggaagctgcgggtgtgcgtggccacctgtaatcgcgcagattactccaagctggctccaatcatgttcggaatcaagaccgagcctgagttctttgaactcgatgtcgtggtcctgggatctcatctgattgatgattacggaaacacctaccggatgattgaacaggacgactttgacattaatacacggctgcataccatcgtgcggggggaagatgaggccgccatggtggagagtgtgggactcgcccttgtaaagctgcctgacgttctgaaccggctgaagccagacataatgatcgtccatggcgatcggtttgacgccctggctctagctacgtcggcagccctgatgaatattcgcattttacacattgagggaggagaagtttctggtactattgacgatagtattcggcacgccatcactaaactcgcccactatcacgtgtgctgtactcgatccgccgaacagcacctgatttctatgtgcgaagaccatgaccgcatccttctcgccggttgtccctcctatgacaagctccttagcgctaagaacaaagactacatgtcgatcatccgcatgtggttaggtgatgacgtaaagtcaaaggattacatcgtggccttgcagcatccggtgaccacagatattaagcattctataaaaatgtttgagctgaccctggatgccttaatctccttcaataaaagaaccttggtcctattcccaaacatcgatgcaggcagtaaggagatggtacgcgttatgagaaaaaagggcatcgagcaccacccgaactttcgggccgtgaagcacgtgccattcgatcaattcatacagctggtagcccacgctggttgtatgatcgggaattcgagttgcggcgtgagggaagttggcgccttcggtacccccgttatcaaccttggaaccagacagatcggccgggaaacgggcgagaatgtgctgcacgttcgggatgcagacacccaagataagattctccaggctttgcacctgcagttcggtaagcaatatccatgttcgaagatatatggagacggtaatgcggtccctaggatcttgaagttcttaaaaagcatcgacctgcaagagcctctccaaaagaaattctgctttccgcccgtgaaagagaacatcagccaagacatcgaccacatcctggaaactttgtcagctctggccgtggatctcggagggacgaatctgcgtgtcgccattgtgagtatgaaaggcgaaatcgtgaaaaagtacacacagtttaacccaaagacctacgaggaaagaatcaatctgatcttgcagatgtgtgtcgaagccgccgcagaggccgtgaagttgaactgtcggattctgggtgtgggcatttccacagggggtagggtaaacccccgggaggggatcgtattgcactccaccaaactaatccaagagtggaatagtgtcgacctgcgcacccccttgtctgacacgctccatctcccggtgtgggttgataacgacggaaactgtgccgctctggcagaaaggaagtttggacagggtaaaggactagagaatttcgtgacactaatcaccggaacgggtatcggtgggggcattatacatcaacacgagctgatccatggatctagcttttgtgctgcagagctgggccatctggttgtctccctggatggccccgactgctcatgcggtagtcacggctgtatcgaggcttacgccagcggtatggcactccaacgggaggccaaaaaactgcatgacgaagatttacttcttgttgaaggcatgtccgtgcccaaggatgaggccgttggggcattgcacctgatccaggctgctaagctcggtaatgctaaagcacagtctattcttcggaccgccggaactgccctgggccttggagttgtgaatatcttgcacaccatgaacccctccctggttattttatctggcgtattggcaagccactacatccacattgtcaaagacgttattagacagcaggctttatcaagtgttcaggacgtggatgtggtagtttccgatctggtggacccagctcttttaggcgccgcgagcatggttcttgactacacaacccgccggatctattag

SEQ ID NO: 189221 - DNA, 2262 bp, synthetic construct
  misc_feature 1..2262: note = Description of Artificial Sequence: Synthetic coding sequence
  source 1..2262: mol_type = other DNA
atggagacctacggctacctgcagcgggagagctgcttccagggcccacatgagctgtactttaaaaatcttagcaagcgcaataaacagatcatggagaaaaatggaaataatcgcaagctgcgagtgtgcgtggctacctgtaatcgcgcagactacagcaaactcgcacccatcatgtttggcataaagacagagcccgaattcttcgagctggacgtcgtggtgctgggatcacacttgattgacgactacgggaacacataccgcatgattgaacaggatgattttgacatcaatacccggttgcatactattgtgagaggcgaggacgaggccgcaatggtggagagtgtgggcttggccctggtgaagttgccagacgtactgaaccgcttgaagcctgatattatgatcgtccatggcgatcggttcgatgcactcgctctggccactagcgccgccctcatgaacattagaattctccacatcgagggcggggaagtgagtgggaccattgacgattcaattaggcacgcgattaccaaactggctcactaccatgtctgttgtaccagatctgcagagcagcacctgatcagtatgtgcgaagatcacgatagaattctcctggccggttgtccaagttatgacaagttgctgtcggctaaaaacaaagactatatgtctataatacggatgtggctcggggacgatgtaaaatctaaggactacattgttgccctccagcaccccgtcaccacagacatcaaacactccatcaaaatgtttgaattgactttggatgcactgatctccttcaataagaggacactggtattattccccaatatcgatgcaggttccaaagaaatggtgcgggttatgagaaagaaaggcattgagcaccaccctaactttagggcggtcaagcacgtgccattcgaccagtttatacaactcgtggctcatgcgggctgcatgatcggaaatagttcatgtggcgtgagagaagtgggcgcttttggaacacccgtaattaatttaggcacacgtcagatcgggcgggagaccggggagaacgtgttgcacgtcagagatgctgacacacaggacaagatcctccaggccctgcacttgcagttcggcaagcagtatccttgttctaaaatttatggcgatggcaacgcggttccccgaatcctgaaattccttaagagcatagatctgcaggagccactccagaagaagttttgctttcctcctgtaaaggaaaacatcagccaagatatcgatcatattttggaaactctctctgctctagctgtggacctgggcggcaccaatctgcgggttgccatcgtgtccatgaagggcgagatcgtgaagaaatatacacagtttaatcctaaaacgtacgaggagaggatcaacttaattcttcagatgtgcgtcgaagccgcagctgaggccgtgaagctaaattgccgcattctcggcgtaggcatctccactggcgggagagtaaaccctagggaaggcattgtccttcacagtactaagctgattcaagagtggaactcagtcgatttgcgaacgcccttatctgatactcttcacctccccgtctgggtcgataatgacggtaactgcgctgcccttgcagaacgcaaatttggccaaggaaagggactcgagaacttcgtcacactgattaccggcacaggaatcggcggcgggatcatccaccagcacgagcttatacacggcagctcattctgtgcagccgaattaggacacctggtcgtctccctcgacggacctgactgctcctgcggctcccatggttgtatagaggcatacgctagcggcatggccctccaaagagaggctaaaaagctgcacgatgaggacctcctgctggtcgagggtatgagcgttcctaaagatgaggctgtcggcgctctacacttgatccaggctgccaaactaggaaatgcgaaggctcagtctattttgcgcacagccggtacggcattgggcctgggggtggtcaatatcctacacaccatgaatcccagtttggtaattctgagcggtgtactagcttcgcactacattcacattgtcaaggacgtcatcagacagcaagcactgagtagtgtacaggacgtcgatgtggttgtatctgatctcgttgaccctgcactgctgggggcagcatctatggtattagattacactacacgccgcatttactag

SEQ ID NO: 189222 - DNA, 399 bp, synthetic construct
  misc_feature 1..399: note = Description of Artificial Sequence: Synthetic coding sequence
  source 1..399: mol_type = other DNA
atgttcgagctgaccctggacgccctgatcagcttcaacaagcggactctggttcttttccctaatattgacgcaggatctaaggaaatggtccgggtcatgcggaaaaaagggatcgaacatcaccccaattttagggcggtgaagcatgtgccatttgaccagtttatccaactggtggcacacgcaggttgcatgatcggaaactctagttgtggagtgcgagaggtcggggccttgacaaggctctatacttatgtgtcttgctataagcatactcatacacatactcacactcacccttcgtcctcaaacccgaagctgcggagccagaaagtcatacaatccgagaacaggggcaagtcctaccaggagggactgaaatatacctttttctag

SEQ ID NO: 189223 - DNA, 2169 bp, synthetic construct
  misc_feature 1..2169: note = Description of Artificial Sequence: Synthetic coding sequence
  source 1..2169: mol_type = other DNA
atggagaagaacggcaacaaccggaagctgcgggtgtgcgtggccacctgtaaccgcgccgattactccaagctggcaccaatcatgttcggcattaagactgagccggaattctttgagctcgatgtggtcgtgttgggcagccatctgatcgacgattacggaaacacgtaccgcatgattgagcaggacgacttcgacataaatacccgacttcatacaatcgtgcggggggaggatgaggccgcgatggtcgagagtgtcgggttggcactggtgaagctcccagatgtgctcaatcgtctaaagcccgacatcatgatagtacacggggatcgctttgacgccctggccttagctaccagcgccgccctaatgaatatcaggatccttcacatagaggggggagaggtgtccgggaccattgatgactccatccggcacgcgattaccaagttggcgcactaccacgtctgttgtacccgctccgccgagcagcatctcatcagcatgtgcgaggaccacgatagaattctgctggcaggttgccccagctacgataagctgttgagcgccaaaaataaggactacatgagcataatcaggatgtggctgggggatgacgttaagtctaaggactacattgttgccctgcagcaccccgtgacaactgacattaagcattccattaaaatgttcgaactgacactggacgctctgatatcctttaataagcgcactttggtgctctttcctaatatcgacgccggttccaaggaaatggtgcgcgtcatgaggaaaaaagggatcgaacaccaccccaacttccgcgccgtcaaacatgtgcccttcgatcagtttattcagctagtagcccacgccggctgcatgatagggaactccagctgtggggtgcgggaagttggcgccttcgggaccccagtcattaacctgggcacgcgtcaaattggccgagagaccggagaaaacgtcttacatgttcgggatgcagatacccaagacaaaattctgcaggcactccatctgcaatttggaaagcagtacccgtgctcaaagatctacggagatggaaatgcagtgccgcggattttaaaattcctaaagagtattgaccttcaagagcctttacagaagaaattttgctttcctcccgttaaagaaaacatctcacaagacatcgatcacatcctggagacactctccgccctggccgttgatttgggaggcaccaatcttcgagtagcgattgtgtccatgaagggagaaattgttaagaaatacacccagttcaacccaaaaacttatgaagaaaggattaatctgatcttgcagatgtgcgtggaggctgcagcggaggctgtgaaactcaattgccgcatcctcggcgtgggtatatcaacaggggggcgggtgaatccccgagagggaatagtccttcattcaaccaaactgatccaagagtggaactcagtggatttacgcacgcctttaagcgatactcttcacctacccgtatgggttgacaatgacggaaactgtgcagcccttgccgagcgaaagttcggccagggcaagggcctcgagaactttgtcacccttatcaccggaacaggtataggcggaggcattatccaccagcatgagctgatccacggatcctcgttctgcgctgctgaactggggcacctcgttgtgtccctcgatggcccggactgcagctgcggttcccacggctgtatcgaggcatacgcatcaggcatggcgctgcagcgagaggcaaagaaattacatgacgaagatcttttgctagtggaaggcatgtctgtgcctaaagacgaggccgtcggggccttgcacctgatccaagccgcaaagctgggcaatgctaaggcccagtctattctgaggaccgccggtactgcattaggtctcggcgtggttaacatactgcacaccatgaaccctagcctagttattctgtccggcgtcttagcttcacattacattcacatcgtgaaagatgtgattcgacagcaagcgctgtcctccgtgcaagacgtggacgtcgtcgtctccgacttggttgatcctgccttactgggcgctgcctctatggtgctggactataccacacggaggatttattag

SEQ ID NO: 189224 - DNA, 1947 bp, synthetic construct
  misc_feature 1..1947: note = Description of Artificial Sequence: Synthetic coding sequence
  source 1..1947: mol_type = other DNA
atggagaagaacggcaacaaccggaagctgcgggtgtgcgtggccacctgcaaccgggccgattattcaaaattggccccaatcatgttcggtatcaagaccgagccagaatttttcgaactcgatgtcgtggtgctgggctcccacctgatcgatgactacggcaacacgtacaggatgatcgagcaggatgacttcgacattaacactaggctccacactatcgtacgcggggaagacgaagccgcaatggtggagtctgtgggactggccttggtgaagctccctgatgtcctgaatcggctcaagccagatatcatgattgtacacggcgaccggtttgacgctctggcactggctactagtgccgcgttaatgaacatccgtatcttacacatcgaagggggcgaagtgtccggtacaattgacgacagcatcagacacgcgattaccaagctcgctcattaccatgtctgctgtacacggtccgcagagcaacatctgattagtatgtgcgaggatcatgaccggatactcctggctggttgcccatcctacgacaagctgctgtcggccaaaaataaggactacatgagtatcattagaatgtggctgggtgacgacgtgaagagtaaggactatattgttgcgcttcagcaccccgtgacaacggacattaaacactccatcaaaatgtttgaacttacactggacgcgctgattagcttcaataagcgtactctggtcctgtttcccaatattgacgccgggtccaaggaaatggtgagagtcatgcggaagaaaggcatcgagcaccatccgaatttccgcgccgtcaaacacgtacccttcgatcagttcattcaactggtcgcgcatgccggatgtatgatcggcaactctagctgtggcgtgcgcgaggttggcgcattcgggaccccggtaattaacttaggtacaaggcaaatcggtcgcgagacaggtgaaaacgttttacatgtgagagatgctgacactcaagataaaattcttcaagctttgcatctgcagtttggaaaacaatatccctgctccaaaatctacggcgacggaaacgccgtcccacgaatcttgaagttcttaaaatccattgacctgcaggagccgctgcagaagaaattctgcttcccacccgtgaaagagaatatttcacaagatatcgatcatattctcgaaactttgagcgctctggccgtcgatctgggggggaccaacctgagagtggccatcgtgtctatgaagggcgagatcgtgaagaaatacacgcagtttaaccctaaaacgtatgaagagcggatcaacctaattttgcaaatgtgcgtcgaggccgccgctgaggcagtcaaactgaactgccgtatactgggagtgggtattggcggtgggattattcatcagcatgagcttatccacgggagctccttctgtgccgccgagctcggccacctggtggtctctctcgatgggcccgactgctcctgcggcagccacggttgcatagaggcctatgccagtggaatggcactccagcgcgaggcaaaaaagctgcacgatgaggacctacttttagtggaaggcatgtcagtccctaaagacgaagccgtgggagccctacatctcatccaggccgcgaaactgggaaatgcaaaggcacaatctattttgcgtacagccgggaccgctctcggcctcggggtagtgaatatcctgcacacaatgaacccctctcttgtcatcttaagcggagtgcttgctagccactacatccacatagttaaggatgttatccgccaacaggccctcagttctgtccaggatgtcgatgtagttgtgtctgatctggtagaccctgcccttcttggtgccgccagcatggttctcgactatactacacgccggatatactag

SEQ ID NO: 189225 - DNA, 1839 bp, synthetic construct
  misc_feature 1..1839: note = Description of Artificial Sequence: Synthetic coding sequence
  source 1..1839: mol_type = other DNA
atgatcgagcaggacgacttcgacatcaacacccggctgcacaccatcgtgcgcggcgaggatgaagctgccatggtggagtctgtggggctggccctggtcaaactcccggacgtcctcaatagattaaaacccgatattatgatcgtgcacggggatcgatttgacgcattggcattggcaacttccgccgccctgatgaatatccgaatcctccacatagaagggggcgaagtaagtgggactatagacgactccatccgacatgctatcacaaagctcgcacactaccacgtctgctgtacaagaagcgcggagcaacacctgatcagcatgtgtgaggatcacgacaggatcctgttagcgggttgtccctcgtacgataaactgttatccgcaaagaataaggactatatgagtattatcagaatgtggctcggaagtaaagaaatggtacgggtaatgcgaaagaagggcatcgagcatcacccaaattttcgcgccgttaaacacgtcccatttgaccaatttatccagctcgtggcgcatgccggttgcatgattggtaacagttcttgcggtgttcgggaggtgggtgcgttcggaacccccgtcattaacctcgggaccaggcagataggcagggagaccggcgaaaacgttctgcacgtacgagacgctgacacacaggataagatactgcaggccctacacctgcagtttggcaaacagtacccttgctctaaaatctatggagatggcaacgccgttccgcggatccttaagttccttaagagcatcgatctccaggaacctctccagaagaaattttgtttcccccctgtgaaggagaacatttctcaggacatcgatcatatcctggagacactgtctgccttggcggtagatctcggggggactaacctacgggttgccatcgtcagcatgaaaggggagatcgtgaaaaagtacacgcagtttaatccaaaaacatacgaggagcgaattaacctgatcctacagatgtgtgtggaggctgcagctgaggctgtgaagctgaattgccgaattttaggggtgggcatttctacgggtggtagggtgaatcctcgggaaggtatagtcctccacagtacaaaactgatacaggaatggaattccgtggacttgcgcacccccctctctgatacactacatctgcctgtgtgggtcgacaacgacggcaattgtgcagcgctggctgaacggaaatttggacagggcaaggggctggagaattttgttaccctgatcacaggcaccgggatcggcggcggcatcatccaccagcatgagttgatccatggctctagcttttgcgccgcagagttaggacacctggtggtgtcactggatggaccagattgtagctgcggcagccatggatgcattgaagcatacgcgagtgggatggcccttcagcgcgaggcaaagaagctgcatgacgaggaccttctcctggtggagggcatgagtgtgcctaaggacgaggcagtcggcgccctgcacctgatccaggcagctaagctggggaatgctaaagcccaatctatcctgcgaacagctgggacagccttgggattaggcgtcgtgaatatcctgcataccatgaacccctcattggttattttatcaggtgtgttggcttctcactacatccacattgtgaaggatgtcattaggcagcaagctttgtccagcgtgcaggacgtcgacgtggtggtcagcgatctcgtcgaccctgccttgctgggggccgcctccatggtcctcgattatacaacacgccggatttattag

SEQ ID NO: 189226 - DNA, 870 bp, synthetic construct
  misc_feature 1..870: note = Description of Artificial Sequence: Synthetic coding sequence
  source 1..870: mol_type = other DNA
atgaagctgatcatcctggagcactacagccaggccagcgagtgggcagcaaagtacattaggaatcgaatcatccaattcaatcccggcccagaaaagtatttcaccctgggacttccgacagggagcacccctctgggatgttacaaaaaactcatcgagtactataaaaatggagacctgtcgtttaaatacgtgaaaacttttaatatggacgagtatgtgggtctcccccgggaccacccagaatcatatcattccttcatgtggaataacttctttaagcacattgatatccacccggaaaacacgcacatcctcgatgggaatgctgtggatctccaggccgaatgcgatgcttttgaagaaaaaatcaaggccgcaggaggtatcgaactgtttgtgggtggcattggtcctgacggccacattgcctttaacgaaccaggtagctcccttgtcagccggacacgagttaaaactctggcaatggatacgatcttggccaacgcacgcttctttgacggagaacttacgaaagtcccaacgatggcactgacggtaggagtagggacggtcatggatgctcgcgaggtcatgatcttgattactggggctcacaaggcattcgcactctataaagccatcgaggaaggtgtgaatcatatgtggacggtgagcgcattccaacagcatcctcggaccgtcttcgtctgcgacgaagacgccactttggagctcaaggtgaaaactgttaagtattttaaagggctcatgctggtgcataataagctagtggatcccctctacagcatcaaggaaaaagaaaccgagaagtctcaaagttctaagaaaccttactcagattag

SEQ ID NO: 189227 - DNA, 768 bp, synthetic construct
  misc_feature 1..768: note = Description of Artificial Sequence: Synthetic coding sequence
  source 1..768: mol_type = other DNA
atgaagctgatcatcctggagcactacagccaggccagcgagtgggcggctaagtacataagaaacaggataatccagttcaacccgggcccagagaagtatttcacacttgggctgccgactggacttccccgagatcaccctgagtcttaccactccttcatgtggaacaattttttcaagcacattgatatacatcctgaaaatactcacatactggacggcaacgctgtcgatctccaggcggaatgtgatgcgttcgaagagaaaattaaggctgcaggcggcatcgagcttttcgtaggagggattggcccagatgggcacatcgcgttcaatgagccagggtcctctcttgttagccgtaccagggtgaaaaccttggccatggataccatcctggcaaatgcacggttcttcgacggagaactaactaaagtgcccaccatggctctaacagtcggagttggtacagtgatggatgcacgtgaagtcatgatccttataaccggcgcccacaaggcctttgccctgtacaaggctattgaggagggtgttaaccatatgtggactgtgtcagcattccagcagcatccccggactgtgttcgtgtgcgacgaggatgctactctggagttgaaagttaagacagtgaaatatttcaagggattaatgctggtgcataacaagttggtggatcccctgtactctatcaaggaaaaggaaaccgagaaatcgcagtccagtaaaaaaccctactccgattag

SEQ ID NO: 189228 - DNA, 870 bp, synthetic construct
  misc_feature 1..870: note = Description of Artificial Sequence: Synthetic coding sequence
  source 1..870: mol_type = other DNA
atgaagctgatcatcctggagcactacagccaggccagcgagtgggccgccaagtacatcaggaacagaatcattcagttcaaccctgggcccgaaaaatactttaccctgggcctgcctaccggctccactccacttggatgttacaaaaagctcatcgagtactacaagaacggggacctcagctttaagtatgtgaagacattcaacatggatgagtatgtgggtctgcctcgcgaccacccagaatcataccattcattcatgtggaacaactttttcaagcacatcgatatacaccccgagaatactcacatattagacgggaatgccgtggatctgcaggctgagtgcgatgccttcgaagaaaagatcaaagccgcggggggcattgagctcttcgtgggcgggattgggccggatgggcacatcgcatttaatgagcctggatctagcctcgtgtcccgcactcgcgtgaagaccctagccatggataccatcttggctaatgccagattttttgacggagagttgaccaaagtgccaaccatggctctcaccgtgggagtgggaactgtgatggacgctcgggaggtcatgatcctgatcactggagcccataaagcctttgctctatacaaagcaatagaagagggagtgaatcacatgtggacagtgtcggccttccaacagcaccctcgcaccgtcttcgtttgtgacgaggacgccactcttgaacttaaagtcaagactgtgaagtactttaaaggcctgatgctagtccacaacaagttagttgatcccttgtattctataaaggagaaggaaaccgagaagtctcagagcagtaagaagccctatagtgactag

SEQ ID NO: 189229 - DNA, 417 bp, synthetic construct
  misc_feature 1..417: note = Description of Artificial Sequence: Synthetic coding sequence
  source 1..417: mol_type = other DNA
atgaagctgatcatcctggagcactacagccaggccagcgagtgggctgctaaatacatcaggaatcgtataatccagtttaaccctggccctgagaagtactttacactcgggctccctactggcagtactccgctggggtgttataagaaactgattgagtattataagaatggcgacctcagcttcaaatacgtcaagactttcaatatggacgagtatgtaggcctgccacgcgaccacccagagtcgtatcactcattcatgtggaataatttcttcaaacatatcgacatccatcccgaaaatacacatatcttagacggaaatgccgtggatttgcaggccgaatgtgacgcttttgaggaaaagatcaaagccgccggaggtatcgaactcttcgttggcgggatctag

SEQ ID NO: 189230 - DNA, 870 bp, synthetic construct
  misc_feature 1..870: note = Description of Artificial Sequence: Synthetic coding sequence
  source 1..870: mol_type = other DNA
atgaagctgatcatcctggagcactacagccaggccagcgagtgggcagccaaatatattaggaatcggatcattcagttcaatcccggacccgagaagtactttaccctgggcttaccaaccggaagcactccactcggatgctacaagaaactgatcgaatactacaaaaacggagacctttcctttaaatatgtgaagacttttaacatggacgaatacgtcgggctgccgcgggatcatccagaatcttaccactcattcatgtggaacaattttttcaagcatatcgatatccaccccgagaacacccacatacttgatggaaacgcagtcgacttacaggctgagtgcgacgcttttgaagaaaaaattaaggctgcggggggaattgaactgttcgtgggagggataggtcctgacgggcatatagcattcaatgagcctggatctagtctggtctcacgcacccgcgtaaagactctggccatggacacaatcctggctaacgccagattctttgatggggaactgaccaaggtccctaccatggctctgactgtcggagtcgggacggtgatggatgctcgcgaggtgatgattttaatcaccggcgcccacaaagctttcgccctgtataaggcaattgaggaaggcgttaatcacatgtggacagtctccgctttccagcagcatccgcggacagttttcgtgtgcgatgaagatgccacgctggagctgaaggtgaagaccgtcaagtactttaaggggttaatgctggttcacaataagctcgtggaccccctgtattccattaaggagaaggaaacagagaaaagtcagagctcaaaaaaaccctattccgactag

SEQ ID NO: 189231 - DNA, 90 bp, synthetic construct
  misc_feature 1..90: note = Description of Artificial Sequence: Synthetic coding sequence
  source 1..90: mol_type = other DNA
atgaagctgatcatcctggagcactacagccaggccagcgagtgggcagctaagtacattcgcaatcggatcattcagtttaatccttag

SEQ ID NO: 189232 - DNA, 870 bp, synthetic construct
  misc_feature 1..870: note = Description of Artificial Sequence: Synthetic coding sequence
  source 1..870: mol_type = other DNA
atgaagctgatcatcctggagcactacagccaggccagcgagtgggcagcgaagtatattagaaaccggattatccagtttaatcccggcccagagaaatacttcacgctcgggctcccgaccggcagcacaccgttagggtgctataagaagttgatagagtattataaaaatggggatctgtctttcaagtatgtaaagacttttaacatggacgaatatgtgggactgccacgcgaccacccagagagctatcattcctttatgtggaacaactttttcaagcatatcgacatacatcccgagaacacacacatcttagacggcaacgctgtcgacctgcaggcggagtgcgatgccttcgaagagaagatcaaagccgcaggcgggatcgagctatttgtggggggcatcggtccagatggccatattgccttcaacgagcctgggagcagtcttgtgtcccggacacgggttaaaactctggctatggacacaatccttgccaatgcacggtttttcgatggggagctgacaaaagttcccactatggcattgaccgtgggcgtgggaaccgtgatggatgcacgagaggtgatgatcctcatcacgggggcgcacaaggctttcgcactttacaaagccatcgaggaaggtgttaaccacatgtggaccgtcagcgccttccagcagcacccacgcacagtgtttgtgtgtgatgaagacgccaccttggagctaaaggtcaagaccgtaaagtattttaaaggactgatgcttgtccacaataaactggtcgacccactgtactctatcaaggagaaagagacagaaaagagccagtcctccaaaaaaccatatagcgattag

SEQ ID NO: 189233 - DNA, 486 bp, synthetic construct
  misc_feature 1..486: note = Description of Artificial Sequence: Synthetic coding sequence
  source 1..486: mol_type = other DNA
atgaagctgatcatcctggagcactacagccaggccagcgagtgggctgcaaagtatattcgaaatcgcatcatacagtttaatcccggcccagaaaagtatttcacacttgggctgcccacagggtccacccccctgggctgttataagaagctgattgagtactacaagaacggagacttgtcatttaaatatgtgaaaacattcaacatggatgagtacgtggggctgcctcgggaccatccagagagctaccactcctttatgtggaacaacttcttcaaacatattgacattcacccggaaaacactcatattcttgatgggaacgccgtggatctgcaagcagagtgcgacgcattcgaagaaaaaataaaagctgccggaggaattgaactgttcgtgggcggcatcggaccggacggtcatatcgcttttaatgagcctgggagttccctagtctctcggacccgggtaaagacctag

SEQ ID NO: 189234 - DNA, 639 bp, synthetic construct
  misc_feature 1..639: note = Description of Artificial Sequence: Synthetic coding sequence
  source 1..639: mol_type = other DNA
atgaagctgatcatcctggagcactacagccaggccagcgagtgggcagctaagtacatacgaaataggattattcagtttaatcccggtccagaaaagtattttacactgggtctgcccacaggatcaaccccactgggatgttataagaagcttatcgaatactacaaaaatggggatttgtcattcaagtacgttaaaactttcaatgagccaggttcctctctggtatctagaacccgagtaaagaccttggcgatggatacaatcctggctaacgctcggttcttcgatggcgagttaactaaggtccctacaatggctctcaccgtaggcgtcgggaccgtcatggatgctcgggaggtaatgatactcatcaccggtgctcataaagcctttgcattgtacaaggccattgaagagggagttaaccatatgtggactgtgtccgcctttcagcaacacccaaggacggttttcgtttgcgacgaggacgcaactttagaactgaaagtgaaaacagtgaaatacttcaagggcctgatgctcgttcataataagctggtggaccccctgtactctatcaaggagaaggagacagagaaaagtcagtcttccaagaagccttatagcgactag

SEQ ID NO: 189235 - DNA, 831 bp, synthetic construct
  misc_feature 1..831: note = Description of Artificial Sequence: Synthetic coding sequence
  source 1..831: mol_type = other DNA
atgcggctggtgatcctggacaactacgacctggccagcgagtgggccgccaagtacatttgtaaccgaattattcagtttaaaccagggcaggaccggtactttaccctgggactccctactggatctacgccgttaggatgctataaaaagctgattgaatatcacaagaatgggcatctaagttttaaatacgtaaaaaccttcaatatggacgaatatgtcggtttaccaaggaatcaccccgaatcctaccatagctatatgtggaataacttctttaagcacattgatattgaccctaacaatgcccatatcctcgatgggaatgccgcggacttacaggccgagtgtgatgcgttcgagaacaaaattaaggaggcgggcggtattgatttattcgtcgggggaatcgggccagatggtcatatcgcttttaacgagcccggctcgtcactggtttcaaggacacgtttgaagacacttgccatggatactattctcgctaacgcaaagtatttcgacggagatctgagcaaggtccctacaatggctcttaccgttggtgtaggcactgtgatggacgcacgtgaagtgatgattcttattactggagcacataaggcctttgcactgtacaaggccatcgaggaaggcgtgaaccatatgtggacagttagcgcattccagcagcacccccggacgatattcgtgtgcgacgaggacgctactcttgagctcagagtgaagacagtcaaatattttaaggggctgatgcacgtgcacaacaagctcgtggacccactgttctctatgaaggacggcaactag

SEQ ID NO: 189236 - DNA, 780 bp, synthetic construct
  misc_feature 1..780: note = Description of Artificial Sequence: Synthetic coding sequence
  source 1..780: mol_type = other DNA
atgcggctggtgatcctggacaactacgacctggccagcgagtgggcagctaagtacatttgcaatcggattatccagtttaagccaggtcaggatagatattttaccttgggtttacccaccgggagtacgcccctagggtgttacaagaagcttattgagtaccacaaaaatggccatctgagcttcaaatacgtgaaaacattcaatatggatgaatacgtgggactgcctaggaaccatcctgagtcttaccattcttacatgtggaataatttcttcaaacatatagacatcgacccaaataacgcacacattttagacggtaacgccgccgatttgcaggcagagtgcgatgcattcgagaacaagatcaaggaggctggaggcatagatttattcgtgggaggcattggaccagatggccacatcgcttttaacgaaccggggagctccctggtgagcaggacaaggctcaaaaccctggctatggataccatcctggcgaatgcaaagtatttcgatggggatctgagcaaagtgcctaccatggctctgaccgtcggtgtgggaacagtgatggacgccagggaagtgatgatcctgattactggcgcccacaaggcatttgctctttacaaggccattgaggagggggtgaaccatatgtggacagttagcgcgtttcaacaacacccacgaaccatattcgtctgcgacgaggacgctaccctggagttgcgggtcaagacagtaaaatatttcaaaggcgaacattag

SEQ ID NO: 189237 - DNA, 729 bp, synthetic construct
  misc_feature 1..729: note = Description of Artificial Sequence: Synthetic coding sequence
  source 1..729: mol_type = other DNA
atgcggctggtgatcctggacaactacgacctggccagcgagtgggccgccaagtacatttgcaatagaattattcaattcaaaccaggccaggatcgctatttcacacttggactgcctaccggccttcccaggaaccaccctgaatcatatcactcatatatgtggaataattttttcaagcacatcgacatcgaccccaataatgctcacattctggacgggaacgcagctgacctgcaggccgagtgcgacgctttcgagaacaaaataaaagaggcagggggtatcgatttgtttgtgggtggcattggccctgatggccatattgccttcaacgaacctggaagtagcctggtttcccggacgcggttgaaaacacttgcgatggataccatcctggccaatgcaaaatactttgacggggacctgagcaaggtgcccaccatggctctaaccgtgggagttggaacagttatggatgctcgcgaggtcatgatcctcatcaccggcgctcacaaagccttcgctttgtacaaagcaattgaggaaggagttaatcatatgtggacggtgtctgcattccagcagcacccacggactatcttcgtctgtgatgaagatgccacccttgaactgcgcgtgaaaacagtcaaatatttcaagggcctgatgcatgtccataataagctggtggaccctctgttctccatgaaagatggaaactag

SEQ ID NO: 189238 - DNA, 1287 bp, synthetic construct
  misc_feature 1..1287: note = Description of Artificial Sequence: Synthetic coding sequence
  source 1..1287: mol_type = other DNA
atgctgcggaccctgctgcggcggcggctgttcagctaccccaccaagtactattttatggtcttggtacttagtctcatcaccttctctgttttgagaatacaccagaaaccggagttcgtttccgtaagacaccttgagctggctggcgaaaacccaagctcagacatcaattgcactaaagtccttcagggcgacgtgaatgagattcagaaggttaaattagagatccttactgtgaaatttaagaagcgtccacgctggacacccgatgactatatcaacatgactagcgactgtagctcctttatcaaacgacggaagtacattgtcgagccattatctaaagaggaagccgagtttccaatcgcttatagtatagttgttcaccataaaatcgaaatgcttgatcgcctactccgggccatttacatgccccaaaacttctactgtattcatgtcgacacaaaaagtgaagatagctacctggctgccgtgatgggcatagcttcatgcttttccaatgtgtttgtggcgtctcgcctcgaaagcgtggtgtacgcctcttggtcccgagttcaggccgacctaaactgcatgaaagacctgtatgccatgtccgcgaactggaaatacctgattaacctctgtggtatggattttccaatcaagaccaaccttgagatcgtgcggaaactgaagttattgatgggggagaacaacctggaaacagagcggatgccctcccacaaggaagaaaggtggaaaaagagatacgaggttgtcaacggtaagttaacgaatacgggaacagtcaagatgttgccaccactcgaaaccccactgttcagcggatcagcctacttcgtcgtcagcagagagtacgtcggctacgtgttgcagaatgagaaaattcagaagttgatggagtgggcccaggatacttactcccccgatgaatatctttgggcaactattcagcgcattcccgaagtccctgggagcctgccagcctctcataagtacgacctatccgatatgcaggctgtggcccgattcgtgaaatggcagtacttcgaaggggatgtgagcaaaggggctccttaccccccatgcgacggggtgcatgtaaggtccgtgtgtatatttggggcaggcgaccttaactggatgcttcgcaaacatcatcttttcgctaacaagtttgatgtggacgttgacttattcgctatccaatgcctggacgagcatttacggcacaaggcgttggagacccttaagcactag

SEQ ID NO: 189239 - DNA, 1287 bp, synthetic construct
  misc_feature 1..1287: note = Description of Artificial Sequence: Synthetic coding sequence
  source 1..1287: mol_type = other DNA
atgctgcggaccctgctgcggcggcggctgttcagctaccccaccaagtactacttcatggtgctggtactgtcgcttatcacattcagtgtactgcggattcatcagaagccggaatttgtgtcagtgcgacacctggagctggcaggtgagaatccaagttccgatataaactgcactaaagtgctacagggcgacgttaatgaaattcaaaaagtgaaactggagattttaactgttaagttcaaaaagaggccacgttggactccagacgattatataaacatgacaagtgactgtagctcatttatcaagcgacgtaagtacatcgtggagcccctgtccaaggaagaggcagaattccccattgcttattctatcgtggtgcaccacaagatcgagatgcttgaccgcttgctgcgggccatttacatgccgcagaatttttattgtatccacgtcgacaccaagtcagaagactcatacctcgccgcagttatggggatcgcctcttgtttcagtaacgttttcgtggcctccaggcttgagtctgtcgtgtatgcaagctggtcacgggtccaggcagatctgaattgcatgaaggatttatacgccatgagcgccaactggaagtatctgatcaacctttgtgggatggacttccccatcaagaccaacctcgaaatcgtgagaaagctgaagctgctgatgggtgagaacaatctcgaaaccgagcgcatgccctcacacaaggaggaaagatggaaaaaacgttacgaggtggtaaacggaaaactgaccaatactggaaccgtcaaaatgcttccaccgctggagaccccactgtttagtggcagcgcctacttcgtagtgagtcgagagtacgtaggttacgtcctccagaacgaaaaaatacaaaagctcatggaatgggcacaggacacctatagtccagatgaatacttgtgggcaacaattcaacgcattcccgaggtgccggggagtctgcccgccagtcacaagtatgacttgtccgacatgcaggcagttgcacgctttgttaaatggcagtactttgaaggagacgtctctaaaggggcaccctatccaccttgcgacggggtgcacgtcaggtcagtgtgcatttttggcgcaggagacctgaactggatgttacggaagcaccacctctttgctaacaaatttgacgtcgatgttgacttgtttgctatccagtgtctcgacgagcacctgcgacataaggcgcttgagacattgaaacactag

SEQ ID NO: 189240 - DNA, 1287 bp, synthetic construct
  misc_feature 1..1287: note = Description of Artificial Sequence: Synthetic coding sequence
  source 1..1287: mol_type = other DNA
atgctgcggaccctgctgcggcggcggctgttcagctaccccaccaaatattatttcatggtcctggtgctgagtcttataacattttctgttttgaggattcatcaaaagcctgagtttgttagcgtgcgacacctggagctcgccggcgaaaaccccagtagtgatatcaattgtacgaaagtcctgcagggggatgtaaacgagattcaaaaggtcaagttggaaatcctgaccgtcaaatttaagaaacgtcctcgctggaccccggacgattacattaatatgactagtgactgttccagcttcattaaacggcgaaagtatatcgtggagcctctgtccaaagaagaggcagagtttcccatcgcttactccattgtggttcatcacaaaattgaaatgttagatcgcctgcttcgagcaatatacatgccgcagaacttctattgtatccacgttgatactaagagcgaggatagttatcttgcagctgtcatgggtattgcttcatgtttctctaatgtgttcgtggcttccaggctcgaatccgtggtttatgcgtcctggagtcgcgtccaggccgatctgaactgtatgaaggatctgtacgcaatgtccgcaaactggaaataccttatcaatctctgtgggatggacttcccaataaagaccaaccttgagatcgttcgcaaactaaaactcctgatgggggaaaacaacctggagacagaaaggatgccttctcataaggaggaaaggtggaagaaacgatacgaggtagttaacggaaaattgacaaacacagggactgttaaaatgctgccacccttggagacgccgctctttagtggaagcgcctacttcgtggtttcccgcgagtatgtcgggtatgtgttacagaacgagaagatccagaagctcatggagtgggcgcaggacacttactctccagacgagtatctatgggccaccatccaaaggatcccagaggtgcccgggtcgctgcctgcatcacataagtatgatctgtccgatatgcaggccgtggctcggttcgtgaaatggcaatattttgaaggagacgtatctaaaggagccccctatccgccttgcgatggggtccatgtgcgctctgtatgtatattcggggccggcgatctcaactggatgctcaggaaacaccacctgttcgctaataaatttgatgttgacgtggacttgttcgccatccagtgtcttgatgaacatttgcgccataaagccctcgagacccttaaacattag

SEQ ID NO: 189241 - DNA, 1287 bp, synthetic construct
  misc_feature 1..1287: note = Description of Artificial Sequence: Synthetic coding sequence
  source 1..1287: mol_type = other DNA
atgctgcggaccctgctgcggcggcggctgttcagctaccccaccaaatactattttatggttttagttctgagtctcatcaccttttctgtgttaaggatacaccagaagcctgaatttgtaagcgtacggcacctggagctggcaggggagaacccttctagtgatatcaattgcaccaaagtgcttcaaggcgacgtgaatgagatccagaaggtgaagctggagatcttgacagttaaatttaaaaaacgacccagatggactcccgatgactacatcaacatgacatctgattgtagcagcttcatcaagagacgcaaatatattgtggagccccttagcaaggaggaagccgagtttccaattgcctactcaatcgtcgtgcaccataagatcgagatgcttgatcgacttttgcgtgcaatttacatgcctcaaaatttttactgtatccacgtggatactaagagcgaggattcctatctcgccgctgtcatgggcatagcctcctgcttttccaatgtgtttgtggctagccgcctcgaatctgttgtgtatgctagctggagcagggtacaagcagatttgaattgcatgaaggacttatacgcgatgtccgccaattggaagtatttgattaatttgtgtgggatggattttcctattaagactaaccttgagattgtccgcaaactgaaactcctgatgggcgagaataaccttgagactgaacggatgccatcacataaagaggaacggtggaaaaagagatatgaagtggttaatggtaagcttacaaataccggcaccgtgaagatgctgcctccgctcgagacaccacttttctctggcagcgcctacttcgtggtgtcccgggaatacgttggttacgttctgcagaacgagaaaattcaaaaactaatggaatgggcccaggatacgtacagccctgatgaatatttatgggctaccatacaacggattccagaagtgcccggatccctgcccgctagccacaagtatgacctgagcgatatgcaagcggtggcccgcttcgtgaagtggcagtattttgaaggcgacgtgagcaagggggccccctatccgccatgcgacggagtgcacgtgagaagcgtctgcatcttcggcgcaggggacctaaattggatgctccggaaacatcatctgtttgccaacaagttcgacgtggacgtcgatctgtttgctattcagtgtcttgatgaacacctccgacacaaagctttagaaaccttaaaacattag

SEQ ID NO: 189242 - DNA, 1209 bp, synthetic construct
  misc_feature 1..1209: note = Description of Artificial Sequence: Synthetic coding sequence
  source 1..1209: mol_type = other DNA
atgaacttctggcggtactgcttcttcgccttcaccctgctgagcgtggtgatcttcgtcaggttctacagttcccagctgagcccccctaaatcctatgagaagctgaacagctcgtccgagcggtatttccggaaaacagcatgtaaccacgccctggagaagatgcccgtgtttctgtgggaaaacatccttccttcacccctgagaagtgtcccctgtaaggactatcttacgcagaatcactatataacctctccgctctccgaagaggaagctgctttccccctggcttatgtaatggtaatccataaagacttcgacacgttcgaaagactgtttcgagccatatacatgcctcagaatgtatattgtgtgcacgttgatgaaaaagcgccagctgagtacaaggagtccgtgcgacagctcctttcctgcttccagaatgctttcatagcatcgaaaacggagagtgtggtttatgccggcattagtcgcctgcaagccgatctcaactgccttaaggatttggtggcgagtgaggtcccatggaaatacgtcatcaacacctgcggccaggatttccccctgaagaccaatcgtgagatagtgcaacatctgaaaggattcaagggtaaaaatatcactcctggtgtcttaccaccagaccacgcaatcaagagaacaaagtacgtccaccaggagcacaccgataagggcgggttctttgtcaaaaatacaaacatcctaaagacttccccacctcatcaactgaccatatactttggtaccgcttatgtggcactcactcgggactttgtggatttcgtgctgcgagatcagcgtgccatcgacttgcttcagtggtcaaaagatacatactcaccagatgaacacttctgggttacgctcaatcgggttagcggcgtgcctggttctatgcccaatgccagttggaccggaaatctacgcgctatcaagtggtcagatatggaggacagacacggaggatgtcacggccattacgtccatgggatatgtatctatggcaacggggacttgaagtggcttgtgaattcaccatcactgttcgcaaataagtttgaattgaatacgtatcctctcacggtggaatgtctagaactgcgccaccgggagagaacactaaatcagagtgagaccgccatacaaccttcatggtatttttag

SEQ ID NO: 189243 - DNA, 1203 bp, synthetic construct
  misc_feature 1..1203: note = Description of Artificial Sequence: Synthetic coding sequence
  source 1..1203: mol_type = other DNA
atgcccctgagcatgcggtacctgttcatcatcagcgtgagcagcgtgattatcttcatagtcttcagcgtgttcaactttggaggcgacccgtcattccagcggcttaacattagcgaccctctgaggctgacccaggtttgtactagctttatcaacggaaagacacggttcctttggaaaaataagcttatgattcacgaaaagtcctcttgtaaggagtatctgactcagtcccattacataaccgctccgttgtcaaaggaggaggcagattttcctctagcatacattatggtcattcatcaccacttcgatactttcgctcggctctttcgcgccatatacatgcctcagaatatctattgcgttcatgtggacgaaaaggccacaactgagtttaaggacgccgtagagcagctgctttcatgctttcccaatgcattcctcgcaagtaaaatggagccagtggtgtatgggggcattagccgcctccaggctgacctcaactgtattcgggacttgagcgccttcgaagtcagctggaaatatgtgattaacacttgtggccaagacttcccattgaagactaacaaggaaatcgtccagtatctgaaaggatttaaaggaaagaacattactcccggagttctgccccccgcccacgcaatcggaaggactaagtacgtgcaccaggagcatcttggtaaagagctgagctacgtcatcagaaccactgctctgaagccccccccgccacataacctcacgatatacttcggctctgcgtatgtcgcgctttcgagggagtttgcaaatttcgtgctgcatgaccctagggcggtggatctcctgcagtggtctaaggacacgttttctccagacgagcacttctgggtcacattaaataggattcccggagtacctggaagcatgcccaatgcctcctggaccggcaatctgagagctataaaatggtccgacatggaggaccgtcacgggggatgccatggacactacgtgcatgggatctgcatctacggcaacggggacctgaaatggctagtcaattcccccagtcttttcgctaataagtttgagctgaacacatacccactgactgtggagtgcctcgaactccgccacagggaaaggacgctcaaccaaagcgaaacagcgatccagccgtcctggtatttctag

SEQ ID NO: 189244 - DNA, 1209 bp, synthetic construct
  misc_feature 1..1209: note = Description of Artificial Sequence: Synthetic coding sequence
  source 1..1209: mol_type = other DNA
atgatgggcagctggaagcactgcctgttcagcgccagcctgatctccgctctgatcttcgtcttcgtctacaatactgagctttgggagaataagagatttctgcgggccgctctaagcaacgctagcctacttgccgaggcatgccatcaaatcttcgaaggcaaggtgttttatccaactgaaaacgctctgaaaaccaccctggacgaagcgacgtgttacgaatacatggttcggtcccattatgtgaccgaaacattgagtgaggaggaagccggtttcccactggcgtacacggtcaccatacacaaagactttggcaccttcgaacgactgttccgcgcaatttacatgcctcagaatgtgtattgcgtccacctggatcaaaaagcgaccgatgcttttaagggagccgtgaagcagcttctcagctgcttccccaacgctttcttggcgtcaaagaaggagtcagtggtttacggagggatatcgcgcctgcaggccgatctcaactgtctggaagaccttgtggcctccgaagtaccttggaagtacgtgatcaacacctgcggacaggattttccactcaagacgaacagagagatagtgcaatatctgaagggctttaagggtaagaatatcaccccgggtgtattaccgcccgatcatgcagtgggcaggaccaaatacgtgcatcaggagctgctcaatcataaaaacagctatgtgatcaagacaaccaagctcaaaacgcctcctcctcacgatatggtcatctactttggaaccgcgtacgtggcactgactcgtgacttcgcaaactttgtgctccaggatcaactggccctagacctcctgagctggtccaaagatacctattctcccgacgagcacttttgggtgaccttaaatcggattcccggcgtgcctggatcaatgccaaatgcctcttggactgggaatctgcgcgccattaagtggagcgacatggaggatcgtcacgggggttgtcacgggcactatgtgcacggcatctgcatctatggtaacggcgacctgaaatggctggtaaactcacccagcctctttgccaacaaattcgagttgaatacctaccctttaaccgttgaatgcctcgagctgcgacaccgcgaaagaacacttaatcagtctgaaactgcaatccagcccagctggtacttttag

SEQ ID NO: 189245 - DNA, 1209 bp, synthetic construct
  misc_feature 1..1209: note = Description of Artificial Sequence: Synthetic coding sequence
  source 1..1209: mol_type = other DNA
atgatgggcagctggaagcactgcctgttcagcgccagcctgatctcagccctgatattcgtcttcgtgtacaacacagagttatgggagaacaagcggtttttgcgagccgcgctgtcgaacgcttcactgttggctgaggcatgccatcagatatttgagggaaaggtgttctacccaactgagaatgccctcaaaacaacattagacgaggccacgtgttacgaatacatggtccggtctcactacgtgacagagaccctctctgaagaggaagctggatttcccctggcctataccgtgaccatacataaagattttgggacctttgaaagactatttcgggcaatatacatgccacagaatgtctattgcgtgcacctggatcagaaggccacagacgcattcaagggagctgtcaagcaactgcttagttgcttccccaacgctttcttagcgagcaaaaaagagagcgtggtctacgggggaatcagtcgactccaggcagatctgaactgtctggaagacctggttgcaagtgaggtgccctggaaatacgtaattaacacctgcggccaggattttccattaaagactaaccgcgagattgtgcagtacctaaaaggctttaagggcaagaacatcacccccggagtactgccaccagatcatgccgtaggtcgcaccaagtacgtgcaccaggaactgctcaatcataagaactcatacgtgattaagactacaaagctgaaaacccctcccccccacgatatggtaatatatttcggcaccgcttatgttgcccttacgagggattttgcgaactttgtcctgcaggatcagttggcactcgacttgctttcctggtctaaagacacgtatagcccagacgaacacttttgggtgaccctcaaccggattcccggcgtgcctggctcaatgcctaacgccagctggaccggcaatctgagagctattaagtggagtgatatggaggaccgacacgggggttgtcacggccattatgtgcacgggatctgtatctacggaaacggtgacctgaaatggttagtcaattctccttccctctttgcaaataagtttgagctaaatacctatccactgactgtcgaatgtcttgaactgcgccacagagaaagaactctgaaccaatcggagacagcgatacagcctagttggtatttctag

SEQ ID NO: 189246 - DNA, 1317 bp, synthetic construct
  misc_feature 1..1317: note = Description of Artificial Sequence: Synthetic coding sequence
  source 1..1317: mol_type = other DNA
atggtgcagtggaagcggctgtgccagctgcactacctgtgggccttaggttgctatatgctcctggccactgtcgccctcaagctgtcattcagattaaagtgtgatagtgatcacctgggactcgagtctcgtgagtcccagtcgcaatactgtaggaacatcctgtataattttctgaagctacccgcaaaacgcagcataaattgttcgggtgtcaccaggggcgatcaagaggccgtcctccaggccattctgaacaacttggaggtcaagaagaagagggaaccgtttacggacacacactatttgtccctgacacgagactgtgagcactttaaggccgaacgcaaatttattcaattccctttgtcgaaggaagaagtggaattcccaatcgcttactccatggtcattcacgaaaaaatcgagaacttcgaacgcctgctccgcgctgtctacgccccgcagaacatttattgcgtgcacgtggatgagaaaagccctgagactttcaaggaggcagttaaagctattatttcgtgttttccaaacgtcttcatagcttccaagcttgtcagagtcgtctacgcctcctggtcaagggtgcaagcggacctcaactgtatggaggatctgctgcagagcagcgtgccctggaagtatttcttaaatacatgtggcacggactttcctataaagagcaacgccgaaatggtgcaagctctaaagatgctcaatggtaggaattcaatggaatccgaagtgccacctaaacataaggaaacacggtggaaataccactttgaggtggtgcgcgatacattacatcttacaaataaaaagaaagacccgcccccatacaacctcaccatgtttacgggtaatgcttacatcgtcgcaagtagggatttcgtgcagcacgtgcttaagaacccaaagtctcagcagctgattgagtgggttaaagatacctactcacccgacgaacacctttgggcaacgctgcagagagcacgatggatgcccggctcggtccccaatcaccccaagtacgacatctctgacatgacctccattgctcgactcgtaaagtggcagggccatgaaggggacatcgataaaggggccccttatgccccgtgttctggaatccaccaacgggccatctgtgtttatggcgctggggatctgaactggatgctgcagaatcatcacctccttgccaacaagttcgacccaaaggtcgacgataatgcccttcaatgcctggaggagtatcttcgatacaaggcaatctacggcactgaactctag

SEQ ID NO: 189247 - DNA, 264 bp, synthetic construct
  misc_feature 1..264: note = Description of Artificial Sequence: Synthetic coding sequence
  source 1..264: mol_type = other DNA
atggtgcagtggaagcggctgtgccagctgcactacctgtgggccctaggctgctatatgctgctggcaaccgtcgccctgaaactgagtttcaggctcaaatgtgactccgatcacttaggcttggagagccgcgaaagtcagagccagtactgtaggaacatattatataatttcctaaagctgcctgccaagcgctccatcaactgcagtggggtcactcgtggagatcaggaagccgttctgcaggccattctcaactag

SEQ ID NO: 189248 - DNA, 462 bp, synthetic construct
  misc_feature 1..462: note = Description of Artificial Sequence: Synthetic coding sequence
  source 1..462: mol_type = other DNA
atggtgcagtggaagcggctgtgccagctgcactacctgtgggccctggggtgttacatgctattagccaccgtggcacttaaacttagctttcgcctgaagtgtgactcagaccatctcggcctcgagtcaagggagtcacagtcacagtactgccgaaatatcttgtataactttctaaaactaccggccaagcgaagcatcaattgctcaggcgtgacacgcggagaccaggaggctgtactccaagcgatcctgaataatctcgaggttaagaagaagcgcgagccttttacagacactcactatctatccctcaccagggactgtgaacattttaaggccgaaagaaagttcatccaattccccttgtcaaaggaggaggttgagtttcccattgcttacagtatggtgatccatgagaagatcgaaaattttgaacgcctcctgagagccgtgtag

SEQ ID NO: 189249 - DNA, 162 bp, synthetic construct
  misc_feature 1..162: note = Description of Artificial Sequence: Synthetic coding sequence
  source 1..162: mol_type = other DNA
atggtgcagtggaagcggctgtgccagctgcactacctgtgggccctgggatgctatatgctgctggccacggtggcattgaaactctctttcagactcaaatgcgactcggaccatctcggattagagtctagggagagtcagagccagtactgtaggtag

SEQ ID NO: 189250 - DNA, 1317 bp, synthetic construct
  misc_feature 1..1317: note = Description of Artificial Sequence: Synthetic coding sequence
  source 1..1317: mol_type = other DNA
atggtgcagtggaagcggctgtgccagctgcactacctgtgggccctggggtgttatatgctccttgctacagtcgcactgaaattatctttccgccttaagtgtgactcggaccatctcgggttggagagcagggagtcccagtcacaatactgccgcaacatcctgtataatttcctgaagctcccggcaaaaagatccattaactgtagtggcgtgaccaggggcgaccaggaggctgttctgcaggcaatcctaaacaatttagaggtgaagaagaaaagagagcccttcactgatacacattatctgtctctcactcgagactgtgaacatttcaaggcagaaaggaaatttattcaattccccctgtccaaggaagaagtggagttccctatcgcttatagtatggtgatccatgaaaaaatcgaaaacttcgagcgcctgctgagagcagtgtatgcacctcagaatatttactgtgtgcacgtcgacgaaaagtcaccggagaccttcaaggaggccgtcaaagccatcatcagctgttttcccaatgtttttatcgcttctaagctcgtgagggtggtctacgcttcctggtctagggtccaagctgatctcaattgcatggaggatttattgcaatctagcgtgccatggaagtatttcctgaatacatgcggcacagactttccaattaagtcgaatgctgagatggtgcaggcactgaagatgctcaacgggcgcaactcgatggagagcgaggtacccccaaagcacaaagagactagatggaaatatcactttgaggtggttcgggatactttgcatctaacaaataaaaagaaggatcctccgccctacaacctgaccatgttcaccgggaatgcatatattgtggcctctcgggattttgtacagcatgtgctcaaaaatcctaagagccagcagctcattgagtgggtcaaggacacctattctccggatgaacacctatgggctacattacaacgcgcccgctggatgccaggcagtgtcccaaaccacccaaagtatgacatttctgatatgacaagtatcgcccgcctggtgaaatggcaaggtcacgaaggagatatagacaaaggagcgccatacgccccgtgcagtggcatacatcagagagccatttgcgtgtacggcgcaggcgatctgaattggatgttgcagaaccaccaccttctcgccaataaatttgaccccaaagtggatgacaacgccctccagtgtctcgaggagtatctgcgctacaaggcaatctatggtaccgagctctag

SEQ ID NO: 189251 - DNA, 1041 bp, synthetic construct
  misc_feature 1..1041: note = Description of Artificial Sequence: Synthetic coding sequence
  source 1..1041: mol_type = other DNA
atggagagcaccctgggcgccggcatcgtgatcgccgaggccctgcaaaaccagcttgcgtggctggagaatgtgtggttatggattactttcctgggagaccctaaaatacttttcttgttctattttcctgccgcatactacgcctcaagaagggtgggcatcgcggtcctgtggatcagcctcattacagaatggttgaatctgatttttaagtggttcttattcggagaccgaccattttggtgggtccacgagtccggctattatagccaggcacctgcgcaggtccatcagttcccatcgagttgcgagaccggcccaggtagtccctctgggcattgtatgatcaccggagcagctttatggcctattatgactgcactgagcagccaagtggcaactagagcaagatccagatgggtccgcgttatgccaagcctggcctattgcactttcctcctggcagtgggactgtctcgaatctttattttggcccatttcccacatcaggttttagccggcctgataaccggcgctgtgctcggatggcttatgacacctagagttcccatggagcgagaattaagtttttatgggttgactgctcttgccctgatgctcggcacctctctaatctattggacattattcacactcggcctagacttaagttggagcatttctcttgcctttaagtggtgtgagaggcctgagtggatacacgtcgacagtagaccctttgcgagtctgtcaagggacagcggcgccgcactgggactaggcatagctctgcattcaccatgctacgcccaagtccggagggctcagctgggaaacggtcagaagattgcatgtctggtgcttgcaatggggctcctcgggccgctcgactggttgggtcaccctccccaaattagtctgttttatattttcaacttcctcaaatacaccctctggccttgcttggtcctggctttggtgccgtgggcggtgcacatgttcagcgcacaggaagcccctccgattcacagctcctag

SEQ ID NO: 189252 - DNA, 465 bp, synthetic construct
  misc_feature 1..465: note = Description of Artificial Sequence: Synthetic coding sequence
  source 1..465: mol_type = other DNA
atggacttcctgcaccggaacggcgtgctgatcatccagcacctgcagaaagactaccgagcttattacacctttcttaacttcatgagtaacgttggggacccacgtaacattttttttatctattttcccctgtgctttcagtttaaccaaactgtgggaacaaagatgatttgggtggccgtcatcggcgactggttgaacctgatttttaagtggattctgttcggccaccgaccctattggtgggtgcaggagacgcaaatctaccccaatcacagctctccatgtctcgaacagttccctaccacatgcgagacaggacccggatctccttctggacatgctatgggtgcaagttgtgtctggtatgtcatggtgactgcagccttaagccacaccgtctgcggaatggacaagttctcaataaccctgcatcggcacgctgggggacggggactgtag

SEQ ID NO: 189253 - DNA, 1068 bp, synthetic construct
  misc_feature 1..1068: note = Description of Artificial Sequence: Synthetic coding sequence
  source 1..1068: mol_type = other DNA
atggacttcctgcaccggaacggcgtgctgatcatccagcacctgcagaaagattatcgagcttattatacatttctgaatttcatgtcaaacgtaggagatccaagaaatatcttttttatttacttccctctctgttttcagtttaatcagaccgttggcaccaagatgatctgggttgctgtcatcggagattggcttaatctaatcttcaaatggattctatttggtcaccggccatactggtgggtccaggagactcaaatttatcccaaccattcatcaccctgtctagaacagttcccgaccacctgcgagacgggacctggatcaccttctggccacgctatgggagcatcatgcgtttggtatgtaatggtgacggcggccctatctcatacggtgtgtgggatggacaaattctcgatcaccctacaccgccttacctggtctttcctgtggagcgttttctggttgatccagatatccgtttgtatctctagagtattcatcgcaacccatttcccccaccaggtgattttaggcgtgattgggggtatgttggtggcggaggcgttcgaacacacacccggcattcagaccgccagtctcggaacatatctcaaaacaaatctcttcctctttctgttcgcagtgggcttctatttactgttgagggttctgaacatagatttgctttggtcagtgccaatagctaagaaatggtgtgctaatccagattggatccatattgacaccactcctttcgcgggccttgttcgtaacctcggggtgctctttggactcggtttcgcgatcaactcagaaatgtttctgttatcctgtcgcggcggaaataactatacattgtcttttcggctgctgtgtgccctgacgtcgctcaccattctccaactgtatcacttcctccagattcccacccacgaggagcatctgttctatgtgctgtccttttgtaaaagtgccagcattcctttaactgtggtggccttcattccttacagcgtccacatgctaatgaagcagtctggaaagaagtcacagtag

SEQ ID NO: 189254 - DNA, 1677 bp, synthetic construct
  misc_feature 1..1677: note = Description of Artificial Sequence: Synthetic coding sequence
  source 1..1677: mol_type = other DNA
atggccgccctgacccgggacccccagttccagaagctgcagcagtggtacagggagcacagatcagagctaaaccttcgtcggttgttcgatgccaacaaagacaggttcaaccatttcagcctgacattaaacaccaatcatggacacatcctggtggactatagcaaaaaccttgttacagaggatgtgatgaggatgctcgtcgatctcgccaaaagcaggggggtggaggcagcgagggaaaggatgttcaacggtgagaagattaattataccgagggacgggcagttctgcatgtcgcactccggaatcggtctaacacacccattctcgtggatgggaaggatgtgatgccagaagttaacaaagtcctggacaagatgaaatccttttgccagcgcgtccgtagcggagattggaaaggttacacaggcaagactattacagacgtgatcaacatcggcattggcggttccgatttaggaccgttaatggttaccgaggctcttaagccctatagcagcggcggtcctcgcgtgtggtatgtgagcaacatcgacgggacacatattgcgaaaactctggcccagcttaacccagaatcttccctgttcatcatcgctagcaagacttttacaacccaggagacaataactaatgcagagacagcaaaagagtggtttttgcaggcggcaaaggatccctctgctgtcgctaagcatttcgtggcgctgagcacaaacacaacaaaagtcaaggagtttggaattgatcctcagaacatgttcgagttttgggattgggtgggcgggagatattccctgtggtctgctattggactttcaatagcactccacgttggctttgataactttgagcagctcctctctggcgcccattggatggatcagcactttaggaccacccctctggaaaagaacgcccctgtgctgctggcactgttaggtatctggtatatcaattgctttggctgtgagacacacgcaatgttaccctacgaccaatacctgcaccgcttcgccgcatacttccagcagggtgacatggaatcgaatggcaaatacatcaccaagagcggcacccgagtggatcaccaaacagggcccattgtgtggggggagccaggaacgaacggccaacacgccttctaccagctgatccaccaaggtaccaaaatgattccttgcgatttccttattcccgtccagacccagcatccaatccggaagggcctacatcacaaaattttgctggcgaatttcctggcccaaaccgaggcccttatgagaggaaaatccactgaggaagcccgcaaggaattgcaggctgcgggaaagagtcccgaggaccttgagagactgctgccacataaggtcttcgaaggtaatcgaccgactaatagcattgtcttcaccaaactgaccccatttatgcttggtgctttggtcgcaatgtacgaacataagatctttgtccagggaataatttgggatatcaactccttcgatcagtggggggtcgaacttggcaagcagctggcgaaaaagattgagcctgagctcgatggcagcgcgcaggtaactagccacgacgcatctacaaacggcttgattaacttcataaaacagcagagggaggcccgtgtacagtag

SEQ ID NO: 189255 - DNA, 1563 bp, synthetic construct
  misc_feature 1..1563: note = Description of Artificial Sequence: Synthetic coding sequence
  source 1..1563: mol_type = other DNA
agccggcacggccggagccaccccggcccccccgtgcccgaggccgcagccatggttccccgagctcccctgcgcgctgagcctgctccgccgctgaggtgccagcagggccctctccaacctctgcaagtgcgcgcgggcaggagaagggggctccctcgggccgccccagggaccggccatgctggactaggctccgggggcggcgggagcggggccagaggtcctcagtccccaacttccagacccaggaccggtgctcaagccgagagtgcccttcggccctggagtctgctcggcgtgagatcgtggggtctcgcagcctccccaggggttagtgctcccgggctcctcaggtatgaggagaaacgggcccccccgtgggggcactttcctagctcgtcaccttgctcatcaggacacttgtcccgcgggagttttcgttcttgcgaagaacgaccttggctgacacagcaggccggcaaaggatgtccttttccctctgcgcccggacacatgtctctgggtgcgtccgcggggcgggcggcacgggccggggtctttgaaggggccggatggaaggatggggacgtcgggcgtgactcatgtaggaggcacttgtgcacaaccggaaagtgggagggcgtgttcgagcagattatgggaggttccgcagctaagggcgctctgatcacagatacaggaggaggcgggggtggagaacggctgtggctgagggctcgtaggcccgacggtcacccttgtcatcttgacggatgtctgtccaacctgagacaaaaagtggaggcactgggacgcggcggcccacccctgcagtctgggttactcattcagggtctgcctgccagcacagtatgtgaagacggttttttcctttgggccgccgtggctgaccatccaggcggacccgccggtgaccgccatcaccattgtgcaggctggcctagaccattatggggcgtcgggcaaggtggatgtttcttctgggagcagctgctactgcgtgcctggcttccagcaagggagacccgtgtctggagcgcggcttcacccagtttttgttcattgaccctgaatacaaaccatggacacattctggtggattacagcaagaatctggtgacagaagacgttatgcgaatgttggttgatttggccaagtcccgcggcgtggaggctgcaagagagcgaatgttcaacggtgagaaaattaactataccgaggttagtcggccacacattcctagcggagcatcatttctgcccttcggagtctatctcacggtgtccaggattacgctgtgcctccaccccttcagttgggcgatgctcctgttgaacgaggggccggaggggctgttccctccagcatgctccagagcattgggatgtgcttttcacaagatcggcttggttagcagcctcgagtggttccctgtatctgcatgggaggagcacatttcctacccgcagggggaatttctaaaggccgatatctttctggagaaactgaccttaatttacccgcaatgtaagttttag

SEQ ID NO: 189256 - DNA, 1710 bp, synthetic construct
  misc_feature 1..1710: note = Description of Artificial Sequence: Synthetic coding sequence
  source 1..1710: mol_type = other DNA
atggtggccctgtgcagcctgcagcacctgggcagcagcgaccccagggccctacctaccttgccaacggccacatcgggccagaggcctgctaaacgtaggagaaagagccctgccatggctgcgctgaccagggacccccagtttcagaagctgcagcagtggtacagagaacaccgttctgaacttaacctgaggaggctgttcgatgcaaacaaagatcgcttcaaccacttttcccttaccctcaacacaaaccacggccacatcctcgtggactactccaaaaatcttgtgaccgaagacgtgatgcgtatgctagtcgacttggcgaagtctagaggagtcgaagcggcccgggagcggatgtttaacggcgaaaagattaactatactgaagggagggcagtcctacacgtcgcactgagaaatcgctctaacactcccatcctggttgatggaaaagacgtgatgccagaggttaataaggtgctggataaaatgaagagcttttgtcagggcccactaatggtgacagaagctcttaagccttattcttccggaggacccagggtctggtatgtttcaaacatagacggaacacatattgctaagacgctggcccagcttaatccggagtcttccctctttattattgcttctaaaacctttacgacacaagagacaattactaacgctgagacagccaaggaatggtttctgcaagctgccaaagacccgagcgcagttgctaaacattttgtggcattgtccaccaacaccaccaaggtgaaagaatttggcatcgaccctcaaaacatgttcgaattctgggactgggttggaggaagatactccctctggagcgcgatcggtctcagtatcgccctccacgtggggtttgacaattttgagcagctgttaagtggcgcacactggatggaccagcattttcgcaccacacccttggagaaaaatgcaccagttttgctggcactgttgggtatctggtacatcaattgcttcggttgtgagacgcatgccatgttgccctatgaccagtacctgcatcgttttgcggcctattttcagcaaggtgacatggagagtaacgggaagtacatcacaaaaagtggaacaagagttgaccatcagacagggcccattgtctggggagagcctggaacgaatggccagcacgctttctaccagcttatccaccaggggacaaagatgatcccctgcgattttttgattccagtccagacacagcatccaatccggaaaggactgcatcataagattctcctggctaacttcctagcccaaacagaagcgttgatgcgcgggaagtcaacagaggaggcacgtaaagagctccaggctgcaggcaaatcacccgaggatttggaacggcttctcccgcataaagtgtttgaaggcaatcgtccaaccaactctatcgtctttacaaagttgactccattcatgctaggcgctctggtcgcaatgtacgagcataagatattcgtgcaaggtattatctgggacatcaactcttttgaccaatggggcgttgaactcggaaaacagctggctaagaaaatagagcctgagctggatggctccgcacaggtgacttcacacgacgcatccaccaatggcctcatcaactttattaaacagcagagagaagcccgcgtgcagtag

SEQ ID NO: 189257 - DNA, 2901 bp, synthetic construct
  misc_feature 1..2901: note = Description of Artificial Sequence: Synthetic coding sequence
  source 1..2901: mol_type = other DNA
atggccgccgtggccgccgtggccgcccggcggcggcggagctgggctagcctcgtattggcgtttcttggtgtctgtctggggatcaccctcgctgtggaccgcagtaacttcaagacctgcgaagagtcctctttctgcaagcgtcagcggtcaatcaggccaggcctcagcccatatcgcgccctcctcgatagcctacagctcggccccgatagcctgactgtgcacctcattcacgaggttactaaagtgttgttggttctcgagctgcagggattgcaaaaaaacatgacacggtttcgcatcgatgaactggagcccagaagacctcgatatcgagtacccgatgtcctggtagctgaccctccaattgccagactgtcagtgagcggcagggacgaaaatagcgtggaacttactatggccgaaggtccttacaaaattatcctcacggctaggcccttccggttggaccttcttgaagacagatcactgctgctaagtgtgaacgctcgcggcctcttagagtttgagcaccagcgcgcccctagggtgtcattcagcgataaggtgaatctgaccctgggttcaatttgggataagatcaagaatttgttttcccgacaaggctccaaggatccagccgagggcgatggggctcagcccgaggagacccccagagatggcgacaaacctgaggagacacagggaaaagccgagaaggacgaaccaggtgcttgggaagagacctttaagacgcattctgactcgaaaccttatggccccatgtcagtaggcctggacttttctctgcccggcatggaacacgtctatggcatccctgagcacgccgacaacttgcgcctgaaagtgaccgaaggaggagagccttaccgactgtacaatctggacgtatttcagtacgagctatataaccccatggcgctgtacggcagtgtgccggttctgctggctcacaacccccaccgcgatctgggaatcttttggctcaatgcagcagagacatgggtggatatctcttcgaacaccgccggaaaaaccctgttcggaaaaatgatggactacttgcagggatcgggcgaaactccccagaccgatgtccgttggatgagcgaaacggggattatcgatgtgtttcttctcctgggtccgagcattagcgacgtgtttagacagtatgcgagtctgaccggaacacaggctctccctccgctgttctcactagggtaccaccagagcagatggaattaccgggatgaagccgatgtgcttgaggtggatcaaggttttgacgatcacaatctcccatgtgatgtaatttggttggatatagaacacgccgatggaaagaggtacttcacttgggatcctagccgttttccgcaacccagaacaatgctggaaagactggcatcgaagcgcagaaaactcgtagctattgtggatccacatattaaagtggactctggatatcgggtccacgaggagcttcgaaatttagggctctatgttaagacaagagacgggtcggactatgaggggtggtgctggccgggcagcgcaggataccctgatttcacaaacccgacaatgcgtgcgtggtgggcaaacatgttttcctatgataattacgaggggtcagcacctaatttgttcgtctggaatgacatgaatgagccaagtgtgttcaacgggcccgaggtcacaatgctcaaagacgcccaacactatgggggctgggagcaccgggacgtgcataacatctacggtctctacgtacacatggcaacagcagatggtctccgccagaggagcggcggaatggagaggccatttgtgctggcccgggccttttttgcaggtagtcagaggttcggcgcggtttggaccggggataacacagcggagtgggatcacctgaagatcagtatacccatgtgcctgtcactcgggctagtgggcctctccttctgcggagcagatgttggcggcttctttaagaatccagagcccgaactgctcgtgcgatggtatcagatgggagcctatcaacccttctttcgagctcatgcccatctcgacaccggccgccgagagccctggctgctcccctcacagcacaatgatatcatccgggacgcccttgggcagagatactccctcctaccattttggtacactctcttgtaccaggcacatcgcgagggtattcccgtgatgcgacctctttgggtccagtaccctcaagacgtcacaaccttcaatattgacgaccagtacctcctcggagatgccctacttgtccacccagtttcagattctggagcccatggcgtgcaagtatatctgcccggtcaaggcgaagtctggtacgacatccagagctatcagaagcaccatggcccacaaacgctgtacttaccagttactctgagctcaatccctgtattccaacggggcggcactatcgtacctcgatggatgcgggttcgacgttcatctgagtgcatgaaggatgatccaattaccctgtttgtcgccttatccccccaaggcactgcccagggagagctcttcctagatgatggacacacctttaattaccagacacgccaggagtttcttctcagacggttttctttttcaggcaataccctggtgtccagcagtgctgaccccgaaggccactttgagacgcccatttggatagaacgggtggtgatcatcggcgctggcaagccggcagccgttgttttgcaaacaaaaggcagccctgagtccaggctcagctttcagcatgacccagaaacgagcgtgctcgtccttcgaaagcccggcattaacgttgcctctgattggagcatacacctccgatag

SEQ ID NO: 189258 - DNA, 2835 bp, synthetic construct
  misc_feature 1..2835: note = Description of Artificial Sequence: Synthetic coding sequence
  source 1..2835: mol_type = other DNA
atggccgccgtggccgccgtggccgcccggcggcggcggagctgggcttccctggtcctggcctttctgggcgtgtgtttgggcatcacccttgcagtggatagatccaattttaaaacatgcgaggaatcatccttttgcaagaggcagcgttccatccgccccggactgtcaccctatagggccctgctggacagccttcagctggggccagacagtctgaccgttcatctgatccacgaggttacgaaggttctcctcgtgctagaattacaaggactgcagaagaatatgactcgcttccggatcgacgaacttgagccacgtaggccccgctaccgggtccccgatgtgttagtcgcagatccccccattgcccggctttcagttagcggcagagacgagaattccgtggagctgacgatggccgagggcccatataagattattctgactgctcgccccttccggttagatctgttggaagatcgctccttgctgcttagcgtgaatgctcgcgggctcctggaatttgagcaccagcgcgcccctcgggttagccaaggatccaaggatcccgccgaaggcgacggcgctcagccagaggaaactcccagggatggcgacaaaccagaagagacccagggcaaggccgaaaaggatgaacctggagcctgggaagagacattcaagacccacagcgattccaaaccttacgggcccatgtccgtaggtctcgacttctccctccccggcatggagcatgtctacgggattccagagcatgccgataatctgcgtcttaaggtgacagagggtggtgagccttatcgcctgtataacttagacgttttccagtatgagttatataaccctatggcactgtacggtagtgtaccggtattgttagcccacaacccacacagggacctcgggatcttttggctgaatgccgcagagacctgggtggatatctcctctaacacagctggtaaaaccctgttcggaaaaatgatggactacctccagggctcgggggagactccgcagaccgacgtgcggtggatgtctgaaaccggtattatcgatgtatttttgcttctcggaccctctatctcagacgtcttcagacagtatgccagcctgacaggaacccaggcccttcctcccctcttttcactgggttatcatcagtcacgctggaattacagagacgaggccgacgttctcgaggtggaccaaggtttcgacgatcataatctaccttgcgatgtgatttggctggatatcgagcacgcggacggcaaacgatactttacgtgggatcccagccgattcccacaaccccgcactatgctggaacgactagcctcaaagcgtcggaaacttgtggccatcgtcgacccccacattaaagtggatagtggctaccgcgtccacgaagagttgcgcaacctgggtctgtacgtgaaaacacgggatgggagtgattatgaaggctggtgctggccaggtagcgctgggtatccggactttacgaaccccacaatgcgcgcttggtgggctaacatgttcagctacgataattacgaggggtccgcccctaacctttttgtttggaacgacatgaatgagccttctgtatttaatggccctgaggtcaccatgcttaaagacgcccagcattacggaggttgggaacacagagatgtgcacaatatctacggcctgtatgtgcacatggcaacagccgacgggctgcgccagagatctggaggtatggagagacctttcgttctcgcccgcgctttctttgctgggtcccagcgatttggcgcagtatggaccggagacaacacggcggaatgggatcatttgaaaatttctattcccatgtgcctctctctcggtctggttggcttgtccttctgcggcgccgacgtaggtggcttttttaaaaaccccgaaccagagcttttggtccgatggtatcagatgggagcctaccagccgttttttcgtgctcatgctcacctcgataccggccggagagaaccttggctgcttccttcccagcacaatgacatcatccgcgacgcactcggacagagatactccttactgcccttctggtatacattgctgtaccaggcacacagggaggggattccagtaatgagaccactgtgggttcagtatccccaggatgtgacgacttttaacatagatgatcagtatctcctgggcgacgccttacttgtacacccggtgagcgatagcggggcccacggtgtccaggtttacctgcccggccagggcgaagtgtggtacgacattcagtcctatcaaaagcatcacggaccgcagacactgtacctgccagtaacgctctctagtattcccgtgttccagaggggcggtaccatagtgcccaggtggatgcgggtccggcgatcatccgaatgtatgaaagatgacccaattaccctatttgtagcgctctcaccacaggggaccgcccaaggggagctgtttttggacgacggtcataccttcaactaccaaacccgccaggaatttctgttgagacgtttcagctttagcggaaacacactggttagctcgagcgccgatcccgaaggccacttcgagaccccaatttggattgagcgcgtagtcatcatcggcgctggaaagccagctgcggtggtcctccaaaccaaagggtcacctgagtccaggttatcattccaacacgatcccgagacttcggttctggtcctcagaaagcccggaatcaacgtggcgtcagattggagtatacacctgcgatag

SEQ ID NO: 189259 - DNA, 2544 bp, synthetic construct
  misc_feature 1..2544: note = Description of Artificial Sequence: Synthetic coding sequence
  source 1..2544: mol_type = other DNA
atgacccggttccggatcgacgagctggagccccggcggccccggtatcgcgtgcctgacgtcctggtagccgatccacccattgcgcgtctctccgtcagcggacgtgacgagaactctgtcgagctaactatggccgaaggcccatacaagatcattctgactgcccggccattcagactggatctgctcgaagatcgaagtctactgctgtctgtgaatgctcgtggactgctggagttcgaacaccagcgtgcccccagagtctcacagggctctaaagacccagctgagggcgatggagcccagccagaagagactccaagggacggcgataagcccgaggagacccaaggcaaagcggaaaaagacgaaccaggagcttgggaagagacgttcaagacccacagtgattctaagccatatggccctatgagtgtggggttggacttttcgctgccggggatggagcacgtctacggcatacctgaacacgctgacaatctccgcctgaaggtgaccgagggtggggaaccatatagactgtacaatctggatgtttttcagtacgagctgtataacccaatggccctgtatggcagtgttcccgtgctgttagctcacaacccccatagagatcttggcattttttggctgaacgcagctgagacctgggtcgatataagttcaaacaccgctgggaaaaccctgtttggcaaaatgatggactacctgcaaggtagtggtgagacaccccagacggacgttaggtggatgagcgaaactggcattatcgacgtttttctgctactgggaccatcaatctccgacgtctttcgtcagtatgcttccttaacaggtacccaggctctgcccccactgttcagcctcggctaccaccagtctcgctggaactatagggacgaggcagatgtcctggaggtagaccagggatttgatgaccataacttaccttgtgacgtcatctggctggacattgaacatgccgacggtaagagatacttcacatgggatccgtcaaggttcccccagcccaggaccatgttggagagactcgcgagtaaaagacggaaattggtggctatcgtggatccacacatcaaagttgacagcgggtaccgggtccatgaagagctccgaaacctcgggttgtacgtcaagacccgcgacggtagtgattacgagggctggtgttggccgggatctgcagggtacccggacttcacaaatccaactatgagggcttggtgggcaaacatgttttcgtacgacaattacgaaggatctgctcctaatttgttcgtctggaatgacatgaacgagccctcggtcttcaatgggcccgaagtgacaatgctcaaggacgcacaacactacgggggatgggagcacagagatgtgcataacatatatggcctgtatgttcatatggccacagcggacggattaagacagagaagcggtgggatggaaaggcccttcgtgttggcgagagccttctttgccgggtctcagaggtttggggctgtttggaccggggacaatactgccgagtgggatcacctaaagatatctatcccaatgtgtctctccctggggctcgtcggattgtcattttgcggtgccgatgtcgggggcttcttcaaaaacccggaaccagaactgctggtcagatggtaccagatgggggcataccagccgtttttccgagcgcatgcccacctcgataccggacggagagaaccctggctgcttccttcccagcacaacgatatcattcgcgacgcgctgggccagaggtacagcctgttacctttctggtatacgctactgtatcaagcacaccgtgaaggtattcccgtgatgcggcctctttgggtgcagtatccccaggatgttaccacattcaacatcgatgatcaatacctgctgggagatgccctgctcgtccacccagtctcagacagcggcgcacatggagtccaggtgtatttgccaggccagggagaggtgtggtatgatattcagagctaccaaaagcaccatggcccccagacattgtatttgcccgtcaccctgtcatctatacccgtctttcaaagaggaggcaccatagtccctaggtggatgcgcgtgaggcgatcctctgagtgcatgaaagacgatcccatcaccttgtttgtggctctgtcccctcagggcactgcccagggcgagctgtttttggacgacggtcatacattcaactaccaaacaaggcaggagtttctgcttcgaaggttcagcttcagcggtaataccctcgtgtcttcttcagccgatcctgagggacactttgaaacccccatttggattgagcgggttgtgatcatcggcgcagggaaacccgcagccgtcgtcctgcagaccaaaggcagcccagaatccaggctgtccttccagcacgatcccgaaactagtgtcctggtacttagaaagccaggaatcaacgtcgcatccgactggagcattcacctgcggtag

SEQ ID NO: 189260 - DNA, 2745 bp, synthetic construct
  misc_feature 1..2745: note = Description of Artificial Sequence: Synthetic coding sequence
  source 1..2745: mol_type = other DNA
atggaggccgccgtgaaggaggagatcagcctggaggacgaggccgtggataaaaatatcttcagagactgtaacaagatcgcattctacagaaggcaaaagcaatggctctcgaaaaaatccacataccaagccttgctggactccgtgactacagacgaagacagcacacgcttccaaataataaatgaagcaagtaaagtgccattactggccgagatatatggcatagagggaaacatttttcgactcaaaatcaatgaggaaaccccactgaaaccacggttcgaggttcctgacgtattgacttcgaagcctagtacggttaggctgatatcctgcagcggagacacaggatcactgattctggcagatgggaagggtgacttgaagtgtcatatcacagccaaccctttcaaagtggacttagtgtccgaagaggaggttgtcatttctatcaactctctgggccagctgtacttcgaacatttacaaatcctacataagcagagggctgccaaggagaatgaggaagagacaagcgtggatacaagccaggaaaatcaggaggatctgggcttgtgggaggagaagttcggaaagttcgtcgacattaaagctaacggtcctagctccatcggtctggatttctcactccacggattcgagcatttgtacggcatacctcagcacgccgaatctcaccagctcaaaaacacaggggatggagacgcgtatcgcctgtacaacctggatgtgtacggttaccagatatatgacaaaatgggcatctacggctccgttccgtatctcctggcacacaaactgggtcgaacgattggcattttctggctcaacgcttcagaaaccttggtggaaattaatactgagccagcggtggagtatactctgacccagatgggcccagttgcggcaaaacagaaagttcgcagccgcacccatgtccactggatgtcagagagcggaattattgatgtcttcctgttaactggacccactccctctgacgtcttcaagcagtacagccatcttactggcacacaggccatgccgccactcttttccctgggttatcatcaatgcaggtggaattatgaggacgagcaggacgtaaaagctgttgacgccggtttcgacgagcatgatataccttatgacgccatgtggctggacatcgagcatacagagggcaaacgatactttacttgggacaaaaatcgattcccgaaccctaaacgaatgcaggaacttctgcggagtaaaaagcgaaaactggtggtaatcagtgacccacacatcaagattgaccccgattacagcgtatacgtgaaagccaaggaccaggggttctttgtgaaaaaccaggagggggaagatttcgaaggagtttgttggcctgggctaagttcctatctggacttcacaaaccccaaggtgcgtgaatggtattcctctctgtttgccttcccagtatatcaagggtctactgacatactgtttctgtggaacgatatgaatgaaccgtctgtctttagagggccggagcagacaatgcagaaaaatgcaatccaccacggcaattgggagcacagggagctacataacatttacggattttaccatcagatggccactgccgaagggctcattaagcgctctaagggtaaagaaagacccttcgtgctgactagatccttcttcgctggctcacagaaatatggcgccgtgtggaccggcgataataccgctgaatggagcaatctgaagatttcaatacctatgcttctgactctgtccatcacaggaatatcattttgcggcgcagacattggcggatttatcggaaacccggaaaccgagcttctcgtgcgctggtatcaggccggggcctaccaaccattttttagaggccacgccactatgaatactaagcggcgcgagccatggttattcggggaggagcatacgagactcatccgggaagcgatcagagaacggtacgggctactcccatattggtatagtttgttttatcatgcccacgttgcctcccagcccgtgatgcgccctctgtgggtcgaatttccggacgagcttaaaactttcgacatggaggacgagtacatgctaggcagcgccctattggttcatcccgtcaccgagcccaaagcaactacggtcgacgttttcttacctggctcaaacgaggtgtggtacgactacaaaactttcgcccactgggagggagggtgcaccgtgaagatccctgtggctctggatactatcccagtgtttcagcggggcggaagtgtgatccctataaaaaccacggtcgggaagtccacagggtggatgactgagtccagttacggcctgcgcgtggctcttagcaccaaggggagctccgttggcgaactatatctagacgacgggcactccttccagtacttgcatcagaagcagttcctgcaccggaagttctctttctgctctagcgtgcttatcaacagtttcgccgatcagaggggtcactatccctccaagtgtgtggtggaaaagatactggtgctcggtttcaggaaggaaccaagttcagtcaccactcactcgagtgacggcaaggaccaacccgtcgcctttacctactgcgctaagacttcaattttatctcttgagaagctgagccttaatatcgcaaccgattgggaggtgagaatcatctag

SEQ ID NO: 189261 - DNA, 849 bp, synthetic construct
  misc_feature 1..849: note = Description of Artificial Sequence: Synthetic coding sequence
  source 1..849: mol_type = other DNA
atggaggccgccgtgaaggaggagatcagcctggaggacgaggccgtcgacaaaaatatctttcgcgactgtaataaaattgcattttacagaaggcagaaacagtggttgtcgaagaaatcaacttaccaggcacttctcgacagcgtgaccactgacgaagattccactagattccagataatcaatgaggcctccaaggtgcggtgtcaagatcagagcccaactacactcgatgcttttaaagggaaagagaccacagtgcaggaggaaactcaggatctgtctacaagacaacaccttgcccagaaagaggctgaggagcccgacaagcagggtcaaatcacttgggatattagcaacgtggccccgaaaactgagaatttcgaggatctccttgaacagaccccctgcagtgcctgcttgcagggttttaccagagataacactagcagttcattcagtgaggatgcgggcatatccttatccaccagtgtaaagctcccacttgccagcagttctaagcctaacgagaatgaggcgctccccaaccaaccgccctctcagcaaattagacacaactataggctgctggcctccactgtgagtgctgagatggcaaggaatagacagttgatttgggagctcgccaggcagtccgaagcccatctggataggccggtggttttaggtgaacaggcatccgcacagcgcgaggttgcgtcgatcctttgccgaaaatctgtcctggctatcaaccagctggccgcaaccgtcgagggcacgatatcagtgctgcaacagttcaacgagttactggatcaccctctcgatccaggtcggtcttag

SEQ ID NO: 189262 - DNA, 1230 bp, synthetic construct
  misc_feature 1..1230: note = Description of Artificial Sequence: Synthetic coding sequence
  source 1..1230: mol_type = other DNA
atgcggcggtacctgcgggtggtggtgctgtgcgtggcctgcggcttctgttctttactatacgcgttcagccagcttgctgtgtctctcgaagaaggcactggtggaggcgggggaaagcctcaagcagcggtagcttcctggctcgccgggggggggcgcggggctgttagaggcgccggagtagcaggccccgccgcacacccaggcgtgtctgatcgctatagcttgaagattcagcctgtagaaaaaatgcatttggctgtagtcgcctgtggagagagactcgaggaaacgatgactatgttaaagtctgccattattttttcgatcaagcctctgcagtttcacatttttgctgaggatcagcttcaccacagctttaagggacgccttgataattggtcatttctgcagactttcaattacactttgtatcctatcacgttcccatcagagaacgctgccgagtggaaaaaactgtttaaaccctgtgcttcacagaggctgtttctgccacttattttaaaggaggtggattctttgctttacgtagatacagatatcctgtttcttcggcctgtggacgacatttggagcctcctcaagaaatttaacagtacccagattgccgctatggcaccagagcacgaggaaccgaggattggatggtataaccgttttgctcgtcatccctactacgggaagacaggcgtgaacagtggcgtgatgctaatgaatatgactagaatgcgcaggaagtattttaagaatgatatgaccactgtaagactgcaatggggagatatcttaatgcccctgctgaaaaagtataaactgaatattacatggggagaccaggacctgttgaatattgtattcttccacaacccagaatcactctttgtgttcccttgccagtggaattatagacctgaccactgcatttacgggtccaattgccaggaagcagaagaggggggaatatttatcctccatggcaaccggggcgtgtaccacgacgataaacagcctgctttccgcgccgtatatgaggccctacgcaactgctcgtttgaagatgataacatacggtcactgctgaaacccctggaacttgaactgcagaagaccgtgcatacatactgcggcaaaatctataaaattttcatcaagcagctggccaagtctgtgagagatcggtacgccaggagccccaaagaaaagtag

SEQ ID NO: 189263 - DNA, 1323 bp, synthetic construct
  misc_feature 1..1323: note = Description of Artificial Sequence: Synthetic coding sequence
  source 1..1323: mol_type = other DNA
atgcggcggtacctgcgggtggtggtgctgtgcgtggcctgcggcttttgctccctgctgtacgctttttcccaattagcagtgtcccttgaggagggcacaggggggggcggcggcaagcctcaggcggccgttgccagttggctggctggcggcggccgtggcgctgtgcgaggagctggcgtggcaggacctgctgcccaccctggggtgtcggataggtgcaaggatttctcactgtgttactggaacccttattggatgctgccttccgatgtctgtgggatgaactgcttttgggaagctgcgttcagatattctctgaaaatccagccagtggagaaaatgcacctggctgtggttgcatgtggcgagagactcgaagaaactatgacaatgctgaaatctgcaatcatcttctccataaagcctctccagtttcacattttcgcagaggaccaattgcaccatagctttaaagggcgccttgataactggtcttttttacagacctttaactacacattgtacccgattacattcccctctgaaaatgctgcagaatggaagaagctttttaagccttgcgccagccagcggctgttcctccccctgatactgaaagaagttgatagtctgctgtacgtggatactgacatcctgttcttgaggcctgttgacgacatctggtcacttctcaaaaaattcaatagcacccagattgcagcaatggccccggaacacgaagagcccaggattgggtggtacaatcgcttcgctaggcatccttattacggcaagacaggggtgaattccggggtgatgctcatgaacatgactcgaatgcgtcgcaaatactttaagaacgatatgacaacagtccggttacagtggggagatatcctcatgcccctgttaaagaaatataaactcaacatcacctggggtgaccaggatcttttgaacatagtcttcttccataacccagagtccttgttcgtgtttccctgtcaatggaactaccgcccggaccattgcatttacggctccaactgtcaggaagccgaggagggaggaatattcatcctgcacggtaaccggggcgtgtaccatgatgacaaacagcccgctttccgagccgtttatgaggccctgaggaactgtagcttcgaagatgacaatattcggtccttgctcaagccactggaactggagcttcagaagactgttcacacatactgcggaaaaatttacaaaatcttcatcaaacagctggcaaaatcagtcagggatcgctatgctagatctcctaaggaaaagtag

SEQ ID NO: 189264 - DNA, 1332 bp, synthetic construct
  misc_feature 1..1332: note = Description of Artificial Sequence: Synthetic coding sequence
  source 1..1332: mol_type = other DNA
atgaagctgcggagcaaggccgccgccctgctgctgctggccctggcagcgctgctgctcgctctgctgagcctccgggcagggagagcggagcctcctgctctcccagcccggcctgcatcagcccctcagagacatcctgcgccagtccctgctcgctggcctgggccaggggccctacctggcgctagtcccggtgtaaggcgacgcagacctccgcggccacggccccgcgctggaaggagaggagcagccagacttgagaaactggccagaagaccgggggagccacgctctttccaggctgtgcttccacctgaactgtggattcatctggccgtggtagcctgcgggaatcggctggaagaaactctcgtcatgctcaaatcggcggtgttgttctcccatcgtaagatccagttccacatcttcacggaggattcactgaagcctgaattcgacaaacaattaagacagtggccggattcttataccaaaaaattcgagcacagaatctaccctatcactttctctgtgggcaacccccaagagtggaagaagctttttaagccatgcgccgcacagagattattcctgcccgttattctgaaagatgtagactcactgctctatgtcgataccgatgtcttgttcctacgtcccgttgatgacatctggaagctactacgattgtttaactccacccagttagcagcaatggcccctgaacacgagatcccaaagatcggctggtattcaaggtttgcacgtcaccccttctacgggtccgccggcgtcaatagtggggtaatgcttatgaacttgacacggatccgcagtacccaattcaaaaactcgatgattccgactggcctggcctgggaagacatgctgtacccactgtaccaaaagtacaagaatgccatcacatggggagaccaagacctactgaacatcatcttctacttcaatccagagtgtctgtatgtgttcccttgtcagtggaactaccgacccgaccactgtatgtatggctccaattgtagggaggcagaacacgaaggcgtgtccgttctccatgggaaccggggcgtctaccacgatgacaagcaaccaactttccgagccctctatgaagccatcagagactttccctttcaggacaatctattccagtcaatgtattatcccttacagctcaagtttctagagactgtgcatactctgtgcggtagaatcccacaagtattcttaaagcagatagagaagactatgaagagagcctatgagaaacacgtgatcattcatgtggggcctaatcaaatgcattag

SEQ ID NO: 189265 - DNA, 1854 bp, synthetic construct
  misc_feature 1..1854: note = Description of Artificial Sequence: Synthetic coding sequence
  source 1..1854: mol_type = other DNA
atgcggtgcctggccgcccgggtgaactacaagaccctgatcatcatctgcgctttatttactctggtgaccgtactattgtggaataagtgttccagcgacaaggcaattcaatttccgcggcggagcagctccgggtttagagtagatggctttgagaaacgggctgccgcgtcagaaagcaataattatatgaatcacgttgcaaaacagcagtcagaggaagccttcccccaagagcagcagaaggcccctccagtggtgggtgggtttaatagcaatgtgggctctaaagtcttaggactgaagtatgaggagatagattgcctcatcaatgacgagcacaccatcaaaggcaggagggaaggtaacgaggtcttcttaccttttacctgggtggaaaaatattttgatgtgtatggtaaagtcgttcagtacgacggttatgatagatttgagttcagccattcttacagcaaggtttacgcccagagagccccataccatccggacggcgtgttcatgagctttgagggatataatgtggaagttagggaccgcgttaagtgcatctctggagtggaaggagtgccgctatctacacagtggggcccacaaggatacttttaccccatacagattgctcaatatggacttagtcattacagcaaaaacctgacagagaaacctccccacatcgaggtttacgaaacagccgaagacagagataaaaataagcctaatgattggacggtgcccaaagggtgttttatggccaatgtcgctgacaaatcaaggttcacaaatgtgaagcaattcatagcaccagaaaccagtgagggggtgtcactgcagctcggcaatactaaggacttcatcatctctttcgacctgaaatttttgactaatgggtctgtctccgtggtgctggaaacaacagaaaaaaatcagctgttcacgatccattatgtgtctaatgctcaactgatcgccttcaaggagagggacatctactacgggattggaccaagaacaagctggagcaccgtcactcgcgacctggtcacagatctgagaaagggtgtcggtcttagtaatacaaaagcagtcaagccaaccaagatcatgccaaaaaaagtggtgcgtctgattgctaaggggaaggggtttctagacaacatcaccatctcaaccaccgcccacatggctgccttctttgctgcttctgattggctggtgcgaaaccaggacgagaagggcgggtggcctatcatggtgactcgaaagctgggggagggatttaagtccctggaacccgggtggtactctgccatggctcagggccaagcaataagcacactggttagagcatacctgctaactaaggatcatatattccttaacagtgcgctccgcgcaacagcaccctataaatttctatcagaacagcatggggtgaaagccgtgttcatgaacaagcatgactggtatgaggagtacccaaccacaccgtccagtttcgttctcaacggctttatgtattcattgattggtttatacgacctgaaagaaaccgcgggagaaaaattagggaaggaagcccgatccctgtatgagcggggcatggagtccctgaaggccatgctccccctttatgataccggcagcggtacgatctatgacttacgacactttatgctgggtatagccccaaatctcgcgcgctgggactatcacactacccatatcaaccaacttcagctgctctcaacaatagatgagtcccctgtgtttaaagaatttgtgaaacgttggaaatcataccttaaggggtctcgggcaaagcataactag

SEQ ID NO: 189266 - DNA, 1662 bp, synthetic construct
  misc_feature 1..1662: note = Description of Artificial Sequence: Synthetic coding sequence
  source 1..1662: mol_type = other DNA
atgaaccacgtggccaagcagcagagcgaggaggccttcccccaggaacagcaaaaagctccccctgtggtcggggggtttaattctaacgtgggttcaaaggttctcggactgaaatatgaggagatcgactgtctcataaacgatgagcatacaatcaagggccgcagagaggggaacgaggtttttctgccatttacatgggttgaaaaatatttcgacgtatacggtaaagttgtgcaatatgacggatacgacaggtttgagttctcccattcctattctaaagtgtatgcccagcgagccccataccaccctgacggagttttcatgagtttcgaaggatataacgttgaggtccgcgacagagttaagtgcatctccggcgttgaaggagtaccattgtccacccagtggggcccccagggctacttctatccaattcagatcgcgcagtatggcctgtcccactattcgaagaatttaaccgagaaaccgccacacattgaagtttatgagaccgccgaagatcgggacaagaataagcccaatgactggaccgtccctaagggttgttttatggcgaacgtggccgataagtctcgttttactaatgttaaacagtttatcgcgcccgagacgtcagaaggcgtctcgctgcagcttggtaacacaaaagattttattatctccttcgatttgaagttcttgaccaatggctctgtgtcagtggtgctggaaacgactgagaaaaaccagctcttcacaatccattacgtaagcaatgcacaactgatcgctttcaaagaacgggacatctattacggcatcggcccaagaacaagttggagcacagttacacgcgatcttgtgaccgaccttcgcaagggcgtggggctgagtaacaccaaagccgtaaaacccactaagatcatgcctaagaaggttgtgcgactgatcgccaagggcaaagggtttctggataacattacaatctccactactgcgcatatggctgctttcttcgcggcctccgattggctcgtacggaaccaggatgagaaaggtgggtggcccatcatggtgacacgtaaactgggcgagggtttcaagagcctggaacctggctggtattctgcaatggcccagggacaagctatttctaccttggtgcgggcttatctgctcacgaaggaccatatctttctgaactcagccttacgtgccacagccccctacaagtttctgagcgaacagcacggggtgaaggcggtcttcatgaacaaacacgattggtacgaggaatatcctacaacaccttcctcctttgtactgaatggttttatgtatagcctgatcggactttacgacctgaaggagactgccggcgagaagctcggcaaggaggctagatctttgtacgagaggggaatggagagcctgaaggctatgctgcccttgtatgatacaggcagtggaacaatctatgatctgcgtcattttatgctcggaatcgcaccgaatcttgctcggtgggactatcacactacacacattaatcagttacagctcctcagcactattgatgagtcccctgtgtttaaggaatttgtgaaaaggtggaagtcgtaccttaagggcagtcgagccaagcacaattag

SEQ ID NO: 189267 - DNA, 1956 bp, synthetic construct
  misc_feature 1..1956: note = Description of Artificial Sequence: Synthetic coding sequence
  source 1..1956: mol_type = other DNA
atggcccggggcagcgccgtggcctgggccgccctgggccccctgctgtggggctgtgcactgggcctccaggggggaatgctttatcctcaagaatctccaagccgtgagtgtaaggaactagatggcctctggagctttcgcgcggatttttcagataaccgaaggagagggtttgaggagcagtggtaccggcgcccactctgggaaagcggccccaccgtggatatgccagtgccatctagctttaatgacatttctcaggactggaggttacggcatttcgtgggctgggtgtggtatgaacgcgaagtgatactgcccgagagatggacacaggacttgaggacaagagtggtgctcaggataggcagtgcccactcttacgccatcgtgtgggtcaatggagttgacacactcgaacacgaaggcggctacctgcctttcgaggccgatatttcaaacctcgtacaggtggggcctctgccttcccggctccgaataaccatcgccatcaataataccctgacccccacaacgctaccacctggcactatccaataccttaccgacaccagcaaatatcccaaggggtacttcgtgcagaatacgtactttgacttctttaactatgccggcctccaaagaagtgtattgctctacaccactcctacaacctacatcgacgacattacagtcaccacgagtgtcgagcaagatagcggccttgtcaactatcagatctccgtgaaaggatctaacctgtttaagctggaggtgcgcctgctcgacgccgagaacaaggtggtcgctaacggcacaggtactcaaggtcaactgaaagtgccgggggtttcgttatggtggccgtacctaatgcatgagcggccggcttatctctattcccttgaggttcagttgaccgcccagaccagtctgggccctgtcagtgacttttataccctgccggtagggattcggacggttgccgtcacgaaatcccagttcctcatcaacggcaaacctttttacttccacggcgtgaacaaacacgaggacgcagacatccgcggcaaaggattcgattggccattgctcgtgaaggactttaacttgcttcgatggctgggggccaatgcattccgaacctcccactacccatatgccgaggaggtgatgcagatgtgcgaccgatatggaatcgtagtcatcgatgagtgccccggtgtgggcttagcactgcctcaattcttcaataatgtctcccttcaccatcatatgcaggttatggaagaggtggttagacgcgacaagaatcaccctgcggtggtgatgtggtctgtcgcaaatgagcctgcctcccaccttgagagcgcaggttattacttaaagatggtgatagcccacactaagagcctggaccctagtagacctgttaccttcgtgtctaattcaaactatgccgcagataagggcgcaccctatgtcgacgtcatatgtcttaacagctactactcatggtaccacgactatggccacttagaactgatccaactgcagctggctacccaatttgaaaattggtacaagaaataccagaaacctatcattcagagcgaatatggcgctgagactatcgccggatttcatcaggatccacctttaatgtttacagaggagtaccagaagagcttactggaacagtatcatctgggactcgatcagaagcgtaggaagtacgtggtgggggagctcatatggaattttgccgacttcatgacggagcagtcccccaccagagtcttgggaaacaaaaaaggaatttttacccgccagcgccaacctaaaagtgccgcttttctgttgcgagaaagatattggaagatagctaacgagacaagatatccccacagcgtggcaaaatctcagtgcctggagaacagcctgtttacttag

SEQ ID NO: 189268 - DNA, 1803 bp, synthetic construct
  misc_feature 1..1803: note = Description of Artificial Sequence: Synthetic coding sequence
  source 1..1803: mol_type = other DNA
atggcccggggcagcgccgtggcctgggccgccctgggccccctgttgtggggctgcgctctaggcttacagggtggaatgctttacccccaagaaagtccatccagggagtgcaaggagctggacggcctctggagtttccgagccgatttctcagataaccggcggcgcgggtttgaagagcagtggtaccggaggcctctgtgggagagcggccccaccgtagacatgcccgtcccctcttccttcaatgatatttctcaagactggcgtttacgtcacttcgtcgggtgggtctggtacgagcgggaagttatcctccccgagcgctggacacaggaccttcgtactcgggtagtcctcaggatcggcagcgctcatagctacgcgatcgtgtgggtgaacggcgtcgacactctggaacacgaaggcggctaccttccgtttgaagcagatatttcaaacctggtacaggtaggccctctcccttctcgcctccgcataacgattgccattaacaataccttaacgccgaccactctgcctccaggaaccattcagtacctgaccgatacgtctaagtatcccaagggatacttcgttcagaacacttacttcgacttcttcaattacgcaggattgcagagaagcgtgctgctgtataccacacccaccacctacatcgacgacatcactgtgaccacctctgtcgagcaggacagtggcctggttaattatcagatcagtgtcaagggctctaatctttttaaactggaggtgcgcctgttagacgccgaaaataaggtggtagcaaacggaacaggcacccaagggcagctcaaggtgcccggggtctcactctggtggccttacctgatgcatgaacgtcctgcctatctgtactcgcttgagatacggggcaaaggctttgattggcctctgctggtcaaggacttcaatctactgcggtggcttggcgcgaatgcatttagaacatctcactatccttatgctgaggaggttatgcagatgtgtgatagatacggcatcgtcgtaatcgacgaatgtcccggcgtgggccttgcccttcctcagtttttcaacaatgttagtctgcatcaccatatgcaggttatggaagaggtcgtgaggagagacaagaaccatccagccgttgtcatgtggtctgttgccaatgaacccgcctcacacctcgaatcagcgggttattacctgaagatggtcatcgcacatacaaagagtttagatccgtccaggcccgtaaccttcgtgtctaatagcaactacgccgctgataagggggcgccctatgtggacgtcatctgccttaactcctattactcctggtaccacgactatggccacttggagctcatacagctgcaactcgccacccagtttgagaattggtataagaagtaccagaagcccatcatacagagcgagtacggcgccgagactatcgccgggttccatcaagaccctcctctgatgttcaccgaggaataccagaagagccttctggaacaataccatctgggactcgaccagaagcgacgcaaatatgtggtgggagagctgatctggaatttcgccgacttcatgacagagcaaagccctacacgcgtactggggaacaaaaaagggatttttacaagacagagacagccaaaatcagccgccttcctgctcagagagcggtattggaagatcgcaaacgaaaccaggtatccacacagcgtggcgaagtcacaatgtctcgagaattctctttttacctag

SEQ ID NO: 189269 - DNA, 675 bp, synthetic construct
  misc_feature 1..675: note = Description of Artificial Sequence: Synthetic coding sequence
  source 1..675: mol_type = other DNA
atggccagcagcacccccagcagcagcgccaccagcagcaacgccggggcagatccgaacacaacaaacctgcgccccaccacatatgatacctggtgtggcgtcgcgcatgggtgcacccgcaaacttggcctgaaaatatgtggctttctgcagcgcacaaatagcctggaggaaaagtcccggctggttagcgcctttaaagagcgtcagtccagtaagaatctcctctcttgcgaaaactcagacagagatgcccgcttcaggcgcaccgaaaccgacttctccaatctgtttgcacgggacctgctgccggccaagaacggggaagagcagaccgttcaatttctgctcgaggtggtggatatccttctgaactatgtgcgcaagacattcgacagatctaccaaagttctagactttcaccacccacatcagctactggaggggatggaggggtttaacctagagctgtcagaccatccggagtccctggagcagatcctcgtcgattgtcgggacacgcttaaatacggcgtgcgaaccggtcacccccgctttttcaaccagctttccaccggactggacattattggactcgccggggaatggctgacctctactgctaacactaacatgcctagtgacatgcgcgagtgttggttgcttcggtag

SEQ ID NO: 189270 - DNA, 1785 bp, synthetic construct
  misc_feature 1..1785: note = Description of Artificial Sequence: Synthetic coding sequence
  source 1..1785: mol_type = other DNA
atggccagcagcacccccagcagcagcgccaccagcagcaacgccggggccgaccccaataccacgaatctccggccaaccacctatgatacttggtgtggcgtggcccatggctgcactaggaaactgggattgaaaatctgtgggtttctgcagcgtacaaatagcctagaagaaaagagccgccttgttagtgcttttaaagagaggcagagctctaaaaacctgctcagctgcgagaatagtgacagagatgcccgtttcagacgaacagaaaccgacttctccaacctattcgcaagggatctcctgccggcaaaaaatggtgaggagcaaacagttcagtttctgctggaagtagtggacatactgctgaattacgtgcgtaaaacttttgataggtcgaccaaggtcttggactttcatcacccccaccagctgctcgagggcatggagggttttaatctggaactatcagaccaccctgagtcgctggagcagattttagtcgactgcagagatacattgaagtacggagtcaggacagggcaccctcgtttctttaaccagttgtctaccggcttggacattattggcttggctggagagtggctcacctctaccgctaacacaaacatgttcacttacgagattgcccctgtgtttgtgttaatggagcagataaccctgaaaaagatgagggaaatcgtagggtggtcttctaaagatggcgacgggattttctccccagggggtgcaatcagcaatatgtacagtattatggctgcacgctacaaatatttcccagaagtgaagactaaaggaatggcagccgttccaaaattagtcctgttcacctccgagcagagccattactccataaaaaaagcgggagctgcgctgggttttggtacagataacgtgatccttataaagtgtaatgaacgggggaaaattatccccgctgactttgaggcaaaaatcctagaggctaagcagaagggatatgtcccgttttatgtaaatgctacagccggcactaccgtctacggggctttcgatcctatccaggagatcgccgatatctgtgaaaaatacaacctatggctacacgtggacgctgcgtggggggggggcctgctcatgagtagaaagcaccgccataagctgaacggcattgagcgtgccaacagtgtgacatggaatccccataaaatgatgggcgtgctgttgcagtgctcagcaatactcgtgaaggaaaagggcattttgcagggttgcaatcaaatgtgtgccgggtatttgtttcagcccgataaacaatacgacgtaagctatgacacaggcgacaaggctatacagtgcggtagacatgtggatatatttaagttctggctgatgtggaaggcgaagggaactgtcggctttgagaatcagatcaacaaatgtttggaactggctgaatacctttatgcgaaaatcaaaaacagagaggagttcgaaatggtattcaatggtgaacccgagcacaccaatgtttgtttctggtatatcccccaatccttgcggggtgttccagactcaccccaaagacgagaaaagctgcataaagtggcaccaaagattaaagccctgatgatggaaagcggtaccacgatggtcgggtaccagccacagggcgacaaggcaaacttctttcgaatggtcatttcaaaccccgccgctactcagtccgacatcgattttctcatcgaggagattgaacgtcttgggcaggacctctag

SEQ ID NO: 189271 - DNA, 675 bp, synthetic construct
  misc_feature 1..675: note = Description of Artificial Sequence: Synthetic coding sequence
  source 1..675: mol_type = other DNA
atggccagcagcacccccagcagcagcgccaccagcagcaacgccggggctgatcccaacactactaatctgcgacccaccacctacgatacatggtgtggagtagcccatggctgcactcgaaagctgggcctcaaaatttgcggatttctgcagcggacgaattcactagaggagaagagccggctggtttctgctttcaaggagcgacaatcgagcaagaacttgctgtcttgcgaaaactccgatagagatgcacgctttagaaggacagaaactgacttttccaacctcttcgcacgggatctgctgcccgcaaagaacggcgaggaacaaactgtacaatttctgctggaagtcgtggatatcctactgaattatgtgaggaagaccttcgaccgatccaccaaagtgctggatttccaccatcctcaccagctgctggaggggatggagggctttaatctcgagctgtcagatcatccggaatccctcgaacaaattctcgttgattgtcgagacaccttgaagtatggggtccgtacgggacacccacggttcttcaatcagctaagcaccggccttgacattattggcttggcaggagagtggctgacgagtactgctaatacgaacatgccaagcgacatgcgtgagtgttggttgttacgatag

SEQ ID NO: 189272 - DNA, 114 bp, synthetic construct
  misc_feature 1..114: note = Description of Artificial Sequence: Synthetic coding sequence
  source 1..114: mol_type = other DNA
atggccagcagcacccccagcagcagcgccaccagcagcaacgccggggccgaccctaataccaccaacctgcgccctacaacgtacgatacgtggtgtggcgtggcccactag

SEQ ID NO: 189273 - DNA, 258 bp, synthetic construct
  misc_feature 1..258: note = Description of Artificial Sequence: Synthetic coding sequence
  source 1..258: mol_type = other DNA
atggccagcagcacccccagcagcagcgccaccagcagcaacgccggcgcggatccaaacacaacaaacctccggcctacaacgtacgacacctggtgtggcgttgcgcacggatgtacccggaagctgggcctgaaaatatgcgggttcctgcagcgcaccaactcattggaggagaaaagccggcttgtgtctgcttttaaagagaggcagtccagcaagaatctcctgtcatgcgaaaactcagaccgtgattag

SEQ ID NO: 189274 - DNA, 348 bp, synthetic construct
  misc_feature 1..348: note = Description of Artificial Sequence: Synthetic coding sequence
  source 1..348: mol_type = other DNA
atggccagcagcacccccagcagcagcgccaccagcagcaacgccggcgccgacccgaataccactaatctgcgtcctaccacgtacgatacttggtgtggtgttgcacatggttgcacacgaaaacttggtctgaaaatctgtggatttttacagcggaccaacagcctagaggagaagtctagactggtgagcgcctttaaagaacggcagtctagtaaaaacctgctgagctgtgagaactctgacagggatgcccgctttaggagaacggagaccgactttagcaacctctttgctagagatctacttccagccaaaaatggcgaggagcaaacagtccagtag

SEQ ID NO: 189275 - DNA, 366 bp, synthetic construct
  misc_feature 1..366: note = Description of Artificial Sequence: Synthetic coding sequence
  source 1..366: mol_type = other DNA
atggccagcagcacccccagcagcagcgccaccagcagcaacgccggcgccgaccctaatactacgaatctgcgtccgaccacttatgatacatggtgcggggtggcgcacggatgtacacgtaagctgggcctcaaaatatgcggattccttcaacgaaccaacagcttggaggaaaaatctcgattggtaagcgcctttaaagagcggcagagtagtaaaaacttactgtcctgcgaaaactccgacagggacgcccggttcaggcgcacggagaccgacttctcaaatttgtttgcgcgcgatcttttacctgccaagaatggggaagagcagactgtccaattcctgttggaagtggtctag

SEQ ID NO: 189276 - DNA, 1758 bp, synthetic construct
  misc_feature 1..1758: note = Description of Artificial Sequence: Synthetic coding sequence
  source 1..1758: mol_type = other DNA
atggccagccccggcagcggcttctggagcttcggcagcgaggacggatctggtgactccgaaaatcccggcacagctcgagcctggtgtcaggtggcccagaaattcacgggcggtataggaaacaaactttgtgcactcttgtacggagacgccgaaaaacccgcagagtccggcggtagccagcctccacgcgcagcggcccgcaaggcagcgtgcgcctgtgatcagaagccttgcagctgctctaaagtcgatgtgaactacgcttttctccatgccaccgacttactccctgcctgtgatggcgaacgaccaacccttgcatttctgcaggacgtaatgaatattctgctccagtacgtggtcaagagcttcgacaggtccactaaggtgattgattttcattacccaaatgaactcttacaggagtacaattgggaactggccgatcagccccagaatcttgaagaaattctgatgcattgccaaactacactgaaatatgctattaaaactggccacccccgctattttaatcagctcagcaccggcctcgacatggtggggctcgcggccgactggcttactagtaccgcaaacacaaacatgttcacgtatgagatagcacctgtctttgtgctcttggaatacgtgacactaaagaaaatgcgcgaaatcataggctggccaggaggcagtggcgatggaattttttccccaggcggcgcaatttctaacatgtacgccatgatgatcgcccggttcaagatgttcccagaagttaaggagaaagggatggccgcacttccacggctgattgcttttactagtgagcacagccacttcagtctgaagaaaggagccgccgccctgggcataggcaccgactctgtcattctgatcaaatgtgacgaacgaggcaagatgataccttcagacctggaacggcggatactcgaggcaaagcaaaaagggttcgtgcccttcctcgtgtcagctacggccgggactacagtgtacggagcatttgaccccctcctggcagtggccgacatttgcaaaaagtataagatctggatgcacgtggatgccgcttggggaggtgggctccttatgagcaggaagcacaagtggaaactgtcgggagtggagcgggccaattcagtgacttggaacccacacaaaatgatgggagtgccccttcagtgcagtgccctgctcgtaagagaggaggggctcatgcagaactgtaatcagatgcatgcttcatacctgttccaacaggataagcactacgacctcagctacgatacgggtgataaggctcttcagtgcggaaggcacgtcgatgtattcaagttgtggctgatgtggcgcgccaagggcactacaggcttcgaagctcatgtggacaagtgcttagaacttgccgaatacctctacaatatcattaaaaatcgagagggctacgaaatggtgttcgatggcaagccccagcacactaacgtttgtttttggtatatccctccctccctgagaacactggaggataacgaggagcgaatgagtaggctatcgaaggtggccccagtgatcaaggctagaatgatggagtacgggactaccatggttagctaccaacctctaggcgacaaggttaacttctttagaatggttatctcgaatcccgctgccacacatcaagacatcgacttcttgatcgaggagattgagcgcctgggtcaagacctatag

SEQ ID NO: 189277 - DNA, 390 bp, synthetic construct
  misc_feature 1..390: note = Description of Artificial Sequence: Synthetic coding sequence
  source 1..390: mol_type = other DNA
atgaacatcctgctgcagtacgtggtgaagagcttcgaccggagcacaaaggttattgattttcactaccccaatgaactgctgcaggaatataactgggagttagccgaccagccccagaatctggaggaaattctgatgcactgccagaccactcttaagtacgctataaagacagggcacccccgctatttcaaccagctgagcacagggctagatatggtcggcctcgctgcagattggctgactagcacggcaaacacaaacatgtttacatacgagatcgctccagtgttcgtcctgctggagtacgttacacttaagaagatgcgtgaaatcattggatggcctggaggatccggcgatggcatcttctcacccggaacatag

SEQ ID NO: 189278 - DNA, 1758 bp, synthetic construct
  misc_feature 1..1758: note = Description of Artificial Sequence: Synthetic coding sequence
  source 1..1758: mol_type = other DNA
atggccagccccggcagcggcttctggagcttcggcagcgaggacgggtcgggagatagtgagaatcccggcaccgcccgggcatggtgccaagtcgctcagaagttcaccggtggcattgggaacaagctgtgcgccctgctgtacggagatgcagaaaaaccagcggagtctggcggtagccaacctcctagagcagccgctcgcaaggccgcatgtgcctgcgatcagaagccttgcagctgctctaaggtagacgtgaactacgcattcctccatgcaaccgatctgttaccagcgtgcgatggcgaacgacctactttagcgtttctgcaggatgtcatgaacattctgctgcagtacgtagttaaatcttttgatcgcagcacgaaagtcatcgacttccattacccaaacgagctcttgcaagaatacaattgggagctcgccgatcaaccccagaatttggaggagattctgatgcactgccagacaactttgaaatatgcgatcaagaccggacaccctcgttactttaatcagctgagcacgggtctggatatggtggggctagcagcggactggctcactagcaccgctaacaccaacatgtttacttacgaaatcgcacccgtgtttgtccttctggagtatgtgactttgaaaaagatgagagaaattatcgggtggcccggtggatcgggcgatgggatcttttcacccggcggcgctatttctaatatgtacgccatgatgattgcgcgctttaagatgttccctgaagttaaagagaaagggatggcggcactgccacgcctgatcgcatttactagcgagcacagtcacttttccctaaaaaagggagctgccgctctgggcattgggacagactctgtgatactgataaaatgcgacgagcgtggcaagatgattccatctgacttggaacgacgcatcctggaggcaaaacagaaggggtttgtgccgtttctcgtttctgctaccgcgggcactacggtttacggggccttcgaccctcttttggctgttgccgacatttgcaaaaagtataagatttggatgcacgtcgacgccgcgtggggcggaggcttgctgatgagtcgtaaacacaaatggaaactgagtggggtggagcgtgctaatagtgtgacatggaaccctcacaagatgatgggtgtccctctgcagtgctcagcacttttggtgcgcgaggagggtctgatgcaaaactgcaatcaaatgcatgcctcttacctgttccaacaggataaacactacgatctgtcatatgataccggtgataaagcactccagtgcggcagacatgttgacgtatttaagctgtggttgatgtggcgcgcaaagggtaccaccggcttcgaagctcacgttgacaagtgtttggagttggcagagtatctttataatattataaaaaaccgtgaagggtacgaaatggtgtttgatggaaagcctcagcataccaacgtctgcttctggtacataccccctagcctgaggaccttggaggacaacgaggaacgaatgtccaggttatcaaaagtggcaccagtaattaaagcgcgcatgatggagtatggcaccactatggttagctaccaaccattaggcgacaaagtcaacttttttaggatggtgatctccaaccctgctgccacgcaccaggatatagatttccttatcgaggagatcgagcggctcggccaggatctctag

SEQ ID NO: 189279 - DNA, 567 bp, synthetic construct
  misc_feature 1..567: note = Description of Artificial Sequence: Synthetic coding sequence
  source 1..567: mol_type = other DNA
atggccagccccggcagcggcttctggagcttcggcagcgaggacgggtcaggcgatagtgagaatcccggaactgccagagcgtggtgtcaggtggcgcagaaatttacaggcgggattgggaacaaactgtgtgcccttctgtatggggatgccgagaagcctgctgagagtggaggatcacaaccacctcgcgcagccgcaagaaaggccgcttgcgcatgcgaccagaaaccatgttcctgcagcaaggtggacgttaattatgctttcttgcacgcaacggatctgcttcccgcgtgtgatggggagaggcctactttggcgtttctgcaggacgtaatgaatatcctattgcagtacgtggtgaagtcttttgaccggtcaaccaaggtcattgacttccattaccccaatgaattgctacaagaatacaattgggaactcgcggatcagccccagaacctggaggagattctgatgcactgccagactacgttgaagtatgccattaaaactggcatcgttagcagcaagataatcaagctgttcttccgtctgcagtag

SEQ ID NO: 189280 - DNA, 1677 bp, synthetic construct
  misc_feature 1..1677: note = Description of Artificial Sequence: Synthetic coding sequence
  source 1..1677: mol_type = other DNA
atgtaccggtacctgggcgaggccctgctgctgagccgggccggccctgctgccctaggatcggccagcgctgacagcgccgccctgcttggatgggctcgggggcagcccgcagctgcacctcagcctgggctcgccctagctgctaggagacactattcagaagcagtcgcagaccgggaagatgaccccaatttctttaaaatggtagagggtttctttgacaggggtgcgtctatagtggaagacaagctggttgaagacttacggactagggaaagcgaggagcagaagaggaacagagtgagaggcatccttcggatcataaaaccatgtaatcacgtgttatcgcttagcttcccaatacggcgcgacgacggttcctgggaggtgatcgagggataccgggctcagcatagccaacacaggaccccctgcaaaggcggtattagatactccacagatgtctccgttgatgaagttaaagccctggccagtctcatgacatataagtgtgcggtggtcgacgtgcctttcggaggagccaaggctggggtgaaaattaacccaaaaaactatactgataatgagctagaaaagataaccaggagatttactatggagctcgcaaaaaaaggattcatagggcctggcattgatgtccccgcccctgacatgtccacgggtgagcgggagatgtcttggatcgccgatacctatgcgtccacaatcggacattacgatatcaatgcccacgcttgtgtgaccggaaagccaatatctcaggggggaatacatggcaggatctccgccacagggcgaggcgtgttccacgggatcgaaaatttcatcaacgaagctagctacatgagtatcctcggcatgacccccggcttcggggataagacgtttgtcgtccagggctttggcaatgtgggcctgcattccatgcggtatctccatcgctttggagctaaatgcatcgccgtcggggagagtgatggctccatatggaatccagatggcatcgatcctaaggagctggaggatttcaaacttcagcacggctcgatcttaggttttcccaaggctaagccatatgaaggctctattctcgaggcagattgcgatatcttaattcccgccgcatccgagaagcagttgaccaagtccaacgcacctcgggtgaaggctaagattatcgccgagggcgctaacggaccgacgacaccagaagcagacaagatcttcctggagagaaatattatggtcatccctgacctttatctcaacgccggaggggtcaccgtaagctactttgagtggctaaagaatctgaaccacgtctcttacggaagactgactttcaagtacgagcgggattccaattatcatctgttaatgagcgttcaggagtccttggagcgcaagtttggcaaacacggcggcacaatcccgatcgttcccacagctgaatttcaggaccgtatcagcggcgcctcagaaaaggacatcgtccactcaggactggcgtacactatggagagaagtgctagacaaattatgcggaccgccatgaagtataatttgggactcgatctccgcacagccgcttatgtgaatgcgatcgagaaagtgtttaaggtgtacaacgaagctggagttactttcacttag

SEQ ID NO: 189281 - DNA, 1548 bp, synthetic construct
  misc_feature 1..1548: note = Description of Artificial Sequence: Synthetic coding sequence
  source 1..1548: mol_type = other DNA
atgtaccggtacctgggccccggcaccgcccggcggcggcccgccgctggcgctggtattggacgtcccgccccccttcagaggggtgggggaaggccgagagggcgtccacagttgctgcaggacggcggaggactcctccggagtcgtcgccaacaccgcggaggacaggcaggaggaggccctgaggaccctggcgaacggggcgcggaagccgaacctggggcacggcaccccgcagaccaccaggcactgcagccatgtgcagaaagtctgctgccccagcacagccagcatcgcaccccatgtaagggaggaattcgttatagcactgatgtttctgtggatgaagtgaaagctttagctagcctaatgacctacaaatgcgccgtggtggatgttccattcggcggcgctaaggcaggagtcaaaatcaatcctaaaaactacaccgacaatgagctggaaaagatcacccgaagattcactatggagctcgctaaaaaaggatttatagggcctggtatcgacgtacccgcaccggacatgtccacgggggaacgcgagatgtcatggatcgctgatacatacgcaagtacaatcggccattatgatattaacgcccacgcctgcgtcaccggcaagcccatctctcagggaggcatccatggacgtataagcgccaccggccgcggagtctttcatggaatcgagaacttcataaacgaggctagttacatgtccatcttgggaatgacgcccggcttcggggacaagacttttgtggtgcagggattcggcaatgtgggactacatagtatgcgctatctgcaccgattcggagcgaagtgtatcgccgtcggggaaagcgacggaagcatttggaaccctgacggaattgatcccaaggagctcgaggattttaagctccaacacggatccatattgggttttccaaaggctaagccctatgagggtagcatcctggaggccgactgtgacatcttgatccccgctgccagcgaaaagcaactgacaaagtccaatgctccacgggttaaggctaaaataatcgctgagggggccaacggacccaccacacccgaggccgataagatttttctggagcgcaatatcatggtcatccctgacctgtatctcaatgccggcggggtaacagtcagttacttcgagtggctgaagaaccttaatcatgttagctacggacgactgacattcaagtatgagcgagactctaattaccacctgctgatgtcagtgcaagagagtctggagcgcaaattcggcaaacatggagggacgattcctatagtgccgactgctgagtttcaggaccgcatcagtggcgcatctgagaaggacattgtgcattccggcctcgcctacacaatggagcggagtgcccggcagatcatgcgcacagcaatgaaatacaatctcgggcttgacctgagaaccgctgcctacgtgaacgctattgagaaggtctttaaagtctacaatgaggccggggtgaccttcacatag

SEQ ID NO: 189282 - DNA, 1473 bp, synthetic construct
  misc_feature 1..1473: note = Description of Artificial Sequence: Synthetic coding sequence
  source 1..1473: mol_type = other DNA
atggtggagggcttcttcgaccggggcgccagcatcgtggaggacaaactggtcgaagacttgcgaaccagggagagcgaagaacagaagaggaatcgagtgaggggaatcctgaggatcataaagccatgtaaccacgtcctgtcactaagcttccccatacgccgggacgacggttcatgggaagtcatagagggctatcgggcccagcattctcagcaccgcaccccctgcaaaggtgggattaggtacagtaccgacgtgtccgtcgatgaagtcaaagctctcgctagcctcatgacctacaagtgtgccgtggtagacgtgccttttggaggggccaaggctggcgttaaaattaatcccaagaactatacagataatgaacttgagaagataacccgtaggtttaccatggagttggctaaaaagggattcatcgggcctggaatagatgtgcccgccccagacatgtctactggcgagagagaaatgagttggatcgctgacacatacgctagtaccatcggccattacgatatcaacgcccacgcctgtgtcaccggaaaaccaatatcccaggggggaattcatggtcggatttctgctacaggccggggagtcttccatggcattgagaatttcattaatgaggcaagctatatgagcattctcggtatgacacctggcttcggagacaagaccttcgtggtgcagggatttggcaacgtgggcctccactccatgagatacctccaccggttcggcgctaaatgtatcgccgtgggcgaatcagacggtagcatctggaatccagacggaatcgacccaaaggagcttgaggacttcaaacttcaacacggctccattttggggttccctaaagctaagccttatgagggctcgatactggaggcagactgcgacattttgatcccggccgcaagcgaaaaacagctcactaaatccaacgcaccccgggtgaaggctaagattatagctgagggggccaatgggcccaccacgcccgaggcagataaaattttcctggagcgcaatattatggtgatccccgatctctacctgaacgctgggggcgtgactgtgagctatttcgagtggctgaaaaatctgaaccatgtatcatatggaagacttacgttcaaatacgagcgggattcgaattatcacctcttgatgagtgtccaggaatccctagaacgaaagttcggcaagcacggcgggactatacccatcgtgccgactgccgagttccaggatcgcatatcaggtgccagcgaaaaggatattgtccatagcggcctcgcctatactatggagcggtcagcgcgccagattatgcgtaccgctatgaaatataatttggggctagacctgcgcacggcagcgtacgtgaatgccatcgaaaaagtgtttaaggtctataatgaggcgggagtcacttttacttag

SEQ ID NO: 189283 - DNA, 774 bp, synthetic construct
  misc_feature 1..774: note = Description of Artificial Sequence: Synthetic coding sequence
  source 1..774: mol_type = other DNA
gagaacttcatcgtggagggcttcggcaacgtgggcctgcacagcatgcggtacctacatcggtttggtgccaagtgcattgccgtcggagagtctgatggcagcatctggaatcctgacgggatcgatcctaaagaactcgaggatttcaagctccagcacggatccatactcggattccccaaagcgaagccttacgagggcagtatactggaggcagattgtgatatactcatacccgccgcctctgaaaagcaactgacaaaaagcaacgccccaagagttaaagccaaaatcatcgctgagggagcaaatgggccgacgactcccgaggcagacaaaatcttcctggagagaaacatcatggttatacccgacctgtatctgaacgcgggcggcgtgaccgtgagctacttcgagtggcttaagaacctgaatcacgtgtcatacgggcggttaacctttaaatatgaacgggattcaaactaccacctcctgatgtcagtgcaggaatccctcgaacgtaaattcgggaagcacggaggaactatcccaatcgttcctacggcagaattccaggatcggattagcggagcatccgagaaggatatagtgcacagcggattagcgtacaccatggaacgaagcgcccgccagatcatgaggactgccatgaaatacaacctcggcctggatctgcgcacggcagcttacgttaacgcgatcgagaaggtgttcaaggtgtacaacgaggctggcgtcaccttcacatag

SEQ ID NO: 189284 - DNA, 1176 bp, synthetic construct
  misc_feature 1..1176: note = Description of Artificial Sequence: Synthetic coding sequence
  source 1..1176: mol_type = other DNA
atgacctacaagtgcgccgtggtggacgtgcccttcggcggcgccaaagcaggagttaagataaatcctaagaactacactgataacgaacttgagaaaatcacacgaagattcactatggagttagcaaagaaaggtttcatcgggcccggcatagacgtccccgctcctgatatgagcacaggtgaaagggagatgtcatggatcgccgatacatacgcaagcacaatcgggcactacgatattaatgctcatgcttgtgtgaccggaaagcccataagccagggtggaattcacggtcggatctctgccaccgggagaggggtcttccatggcattgaaaattttatcaacgaagctagctacatgtccatcttgggaatgacccccgggttcggtgacaagaccttcgtggtacagggcttcggaaacgtggggctgcattctatgagatatctccaccggttcggcgctaaatgcattgccgtgggagaatccgacgggtcgatctggaacccggatggtattgatcccaaggagctagaagattttaagctgcagcatggctcgattctgggattccctaaagccaagccctacgagggttctattctggaggccgattgcgacatcctcatccccgccgcatccgaaaaacagcttactaaaagcaatgctccgcgtgtgaaggcgaaaatcatcgccgagggagcaaacggtccaaccacccccgaggccgataagatatttttggaacgcaatataatggttattcccgatttgtacctcaacgccgggggagtgacggtgtcgtacttcgagtggctcaaaaatttaaatcacgtgtcttacgggagactgaccttcaagtacgaaagggactctaattatcacctgctcatgtctgtccaagagtccttagaaaggaagtttgggaaacacggcggtacaataccgatagtgccaacggccgagtttcaagaccggatctctggtgcatctgaaaaggacatcgtccatagcggattggcatacactatggagcgtagcgctcgccagattatgcgcacagcaatgaagtacaacttgggccttgatctacgaactgctgcatatgtgaacgctatcgaaaaggtcttcaaggtgtataatgaagccggagtcacgtttacatag

SEQ ID NO: 189285 - DNA, 1278 bp, synthetic construct
  misc_feature 1..1278: note = Description of Artificial Sequence: Synthetic coding sequence
  source 1..1278: mol_type = other DNA
atgacctgcccctgcgacaacgccagcagcgtgttcctgggcttctgtatcaggtattccacagatgtctccgttgacgaggtgaaagcacttgcttctctgatgacgtacaaatgcgctgttgtggacgtaccatttgggggggctaaggccggagtgaaaattaacccgaagaattataccgataatgaactggagaaaatcaccaggcggttcaccatggagctggccaagaagggcttcatcggccccggtatcgacgtgcctgcgcccgatatgagtacgggagaaagagaaatgtcctggatcgcagacacttacgctagtacaattggccattatgatataaacgctcacgcctgtgtgactggcaaacccatcagtcagggtggaatccatggcaggatttccgcaaccggtcgcggagtgtttcacggtatcgagaactttatcaatgaagcctcgtacatgtctattctgggtatgacaccgggtttcggagataaaacattcgttgtccaggggttcggtaacgtgggtctgcattctatgagataccttcatagatttggcgcgaagtgcatcgcagttggagagtcggacggatccatttggaaccctgacggcatcgacccaaaagagctggaggatttcaaactgcagcatggctcgatcctggggttccccaaagccaagccatatgaaggtagcatcctggaggccgactgcgacatcctgatacccgcagcttctgagaagcagttgacaaagagcaacgctcccagagttaaggctaagatcatagccgagggcgccaacgggcctacaactccggaagcagacaagatttttctcgaacgtaacatcatggtaatacccgatttatatttaaatgctggcggagtcactgtgtcatacttcgagtggctgaagaacctgaatcacgtctcatacggccgccttacctttaagtacgaaagggatagcaattaccacttattaatgagcgtacaggaatccttggaacggaagttcgggaagcacggcgggaccatccctattgtccccacagcagagtttcaggataggatttctggtgcttctgaaaaggacatagtgcattccggattagcttacaccatggagagaagtgcccgccaaataatgcgcacggccatgaaatacaacctcgggctggatcttcgaactgcagcttacgtcaatgcaatcgaaaaggtgtttaaggtctataacgaagccggcgttactttcacttag

SEQ ID NO: 189286 - DNA, 1677 bp, synthetic construct
  misc_feature 1..1677: note = Description of Artificial Sequence: Synthetic coding sequence
  source 1..1677: mol_type = other DNA
atgtaccggtacctggccaaggccctgctgcccagccgggccggcccggccgccctgggttccgccgccaatcatagtgccgctctcctaggccgtggacggggtcaacccgctgctgctagtcaaccaggcctggcgcttgccgctagacggcattattctgagctagtggccgatcgggaggatgaccctaatttctttaaaatggtagaaggcttcttcgatcgaggggccagcattgttgaggacaagcttgtgaaggacctcaggacccaagaatctgaggaacagaaacggaaccgagtgagaggtattttacgcatcatcaaaccatgtaatcacgtgttgtccctttcatttcctatccggcgggatgatggctcctgggaagtgattgagggctatcgggcccaacattcccagcaccggaccccttgtaagggcggaattcgctatagcacagacgtcagcgtggacgaagtcaaggcgttggcctccttaatgacttataaatgtgctgtggtggatgtcccattcggaggggcaaaagcaggggtaaaaataaacccaaagaattatacagaaaacgagttggagaaaataacaaggcggttcaccatggagcttgccaaaaagggcttcatcggcccaggagtcgacgtgcctgccccggatatgaatacgggagaaagggagatgtcttggattgcggatacatatgcttctactatcggacattacgatatcaatgctcacgcctgcgtgacaggcaagcctatttcccaaggcggtattcacggaaggatttctgctacaggacgaggtgtgtttcacgggatcgaaaacttcatcaatgaagccagctacatgagcattctgggcatgacccctggatttagggataaaactttcgtggtacagggcttcggaaatgttggactgcactctatgcgctatctgcataggtttggtgctaaatgcatagccgtcggcgaaagcgatggctctatttggaatcctgatggtatcgatccaaaggagttggaggacttcaaactccaacacggatcgatactgggctttccgaaggctaaaccttatgagggaagcatccttgaagttgattgcgacatcctgataccagctgccaccgagaaacaactcacaaagagtaatgctccccgggttaaagcgaagattatcgcggaaggagcaaatggcccaacaacacctgaggccgacaagattttcctcgagcggaatatcctggttatccccgatctgtatctaaatgctgggggtgtgacagtgagctactttgagtggctcaagaacttaaatcatgtgagctacggacggttaactttcaagtatgagagagatagcaattatcacctgctgctttcagtgcaagagagtttggaacggaagtttggaaagcacggcgggacaatccccatcgtacccaccgccgaattccaagactctatatctggcgcgtcagagaaggacatagttcatagtgcactcgcctacaccatggagcgctcagccagacagattatgcacacagccatgaaatataacctcggccttgacttgagaacagccgcatatgttaatgcgatcgaaaaggtgttcaaggtgtattctgaggccggggtgacctttacctag

SEQ ID NO: 189287 - DNA, 3342 bp, synthetic construct
  misc_feature 1..3342: note = Description of Artificial Sequence: Synthetic coding sequence
  source 1..3342: mol_type = other DNA
atgatcgccgtgagcttcaagtgccggtgccagatcctgcggcggcttacgaaagacgaatcaccttatactaaatctgcttcacagactaagccaccagacggggctctggccgttcggcgccagagcatccctgaggagtttaaaggtagcacagtggtcgaactgatgaagaaggagggcaccaccctcgggctaaccgtttcgggcggtattgacaaagacggcaagcccagagtgtccaacctccgccagggtgggattgccgcacgcagcgatcaactcgacgtgggggattatatcaaggccgtcaatggaataaatctggccaagttccggcatgacgagataattagcctcctgaaaaatgtgggcgagagagtagttctggaagtggagtacgaacttccccctgtctctgtgcagggcagtagtgttatcttccgcacggttgaagtgactctgcataaggagggcaataccttcggatttgtcattcggggcggagcacatgacgatcgcaacaaatctcggccggtggtcataacctgcgtgaggcccggaggcccagctgaccgagaggggacaatcaagcccggcgatcgcctactgagtgtggacggcattcggctgctgggcactacacatgcagaagcgatgtcaattttgaagcaatgtggacaggaagcagctctactgatcgagtacgatgtgtcagtgatggattctgtcgcgaccgccagcggcccattattggtcgaggttgccaaaacaccaggagctagcctgggcgtggccctgacaacaagcatgtgctgcaataagcaggttatagtcatcgataagatcaaaagtgctagcatcgcagatagatgcggtgccctgcacgtgggcgatcacatcttgagcatcgacggaacctccatggaatattgcaccctggccgaagcaacgcagtttttggccaacactacagaccaggttaagctcgaaattctgccccaccaccagacacggctcgctctgaagggccccgaccacgtaaagatacagcgtagcgatcgacaactgacgtgggacagctgggcctctaatcactcttccttacacacaaatcatcactacaatacataccaccccgatcattgccgggtacccgccctgacattccccaaggcccctccgcctaattctcccccagcactggtgtcctcttccttcagtcccacctcaatgtcggcctattctctgtcttcactcaacatgggcacccttcctcgctctctctacagcacttccccccgagggactatgatgcgtcgccggctgaagaagaaggacttcaaaagctccctgagtttagccagctccacagtcggactggctggccaggttgtgcacaccgaaaccacggaggtggtactcactgccgacccagttacaggatttggcattcaactccagggaagcgtcttcgctaccgaaacactgagctctcccccgcttatcagctatatcgaagcggacagccccgcagagcggtgcggagttttgcaaatcggagaccgggtgatggcaatcaacgggatacccacggaggattctacctttgaagaggctagccaattgctgagggatagttcaattacctctaaagtgaccttagaaatcgagttcgacgtggcagagtcagtaatccctagcagcgggacgtttcatgtcaagttacccaagaaacacaacgttgagctgggcatcactatatcctcacccagcagtaggaaaccaggagatcctttggttatatctgacatcaaaaagggctcggtggctcaccgcacagggacactggagttaggagacaagctgctcgcaatcgacaacattcgattagacaattgttccatggaggatgcagttcagattctacagcaatgcgaagatctggtgaagctcaaaattcgcaaggacgaggacaacagcgacgagcaggagagcagcggtgccatcatctacaccgtggaattaaagaggtatgggggccccctgggcattaccataagcgggaccgaagaaccttttgatccaattattattagttcattgaccaaggggggtttggccgagcgtactggagcaattcatataggagaccgcatcctggctatcaattccagttctctgaaagggaaacccctttcagaagccatacacctgcttcaaatggctggcgaaaccgtcactctgaagataaagaagcagacggacgctcaaagcgcatcttcccccaaaaagtttccgatcagttcccacttatcagatcttggggatgtggaagaagatagttcacccgcccagaagcccggcaagttgtccgacatgtatccaagtaccgtgccctcagtcgacagtgctgtggatagctgggacggttctgccattgatacgtcttacggcacacagggcaccagctttcaggccagcggttacaatttcaatacctatgattggcgtagccctaaacagcggggatctctatctccagtcacaaaaccacgctctcagacataccctgacgtaggtctgagctatgaagactgggatcggtctaccgctagcggatttgcaggtgccgcagatagtgcagaaaccgagcaggaagagaacttctggtcgcaggcgctggaagacctggagacatgtgggcagagtgggatcctgcgggaactggaagctaccataatgagcgggtcaacgatgagtctgaaccatgaggctcctacgcctagatctcagctggggaggcaggccagcttccaggagcgatcatctagtaggccgcattactctcagaccaccaggtctaataccctacctagcgacgtgggtagaaagagcgtgacgctccggaaaatgaagcaagaaataaaagaaatcatgtcacctacacccgttgagctccacaaagtgacactctacaaggactcagatatggaggactttgggttttccgtcgccgacggacttttggaaaagggcgtgtacgtcaaaaacatccgccccgcgggccccggggatctgggtggactaaaaccatacgaccggctcttgcaggtcaatcatgtgagaacccgagactttgactgttgtctggttgtgcccctgatcgccgagtctgggaacaaactagacctggtgatctctagaaatccccttgcatcccagaagagtattgaccagcagtctctccctggggactggtctgagcagaacagcgcttttttccagcaaccttctcacgggggcaacctagaaacccgggagcccaccaacaccctgtag

SEQ ID NO: 189288 - DNA, 3387 bp, synthetic construct
  misc_feature 1..3387: note = Description of Artificial Sequence: Synthetic coding sequence
  source 1..3387: mol_type = other DNA
atgatcgccgtgagcttcaagtgccggtgccagatcctgcggcggctgactaaggatgagtcaccatacactaaatccgctagccagacgaagccacctgacggagccctcgccgttcgtaggcaaagcatccccgaagagttcaaaggctctacagttgtggaactgatgaaaaaggagggcaccactctgggcctaacagtgtccgggggaatcgacaaggacggcaagcctcgggtgagtaaccttagacaaggtggtatcgcggcgcggtcagaccaattggacgtgggagattacataaaggcagtaaacggaatcaatctggccaaattccgacatgacgagatcatctccctgttgaaaaatgtcggggagagagtggtcctggaggtcgagtacgaactgccacccgtgtccgtgcaaggaagctcagtcatatttagaaccgttgaggtgacccttcacaaggagggaaacacattcggctttgttatcagaggaggggcccacgacgataggaataaatcaagacccgtcgttatcacatgcgtgaggcctggcggcccagctgacagggagggtactattaagccgggagataggcttctgagtgttgatggaattaggcttcttggaacaacccatgctgaagccatgagcatcctgaagcagtgcgggcaggaggcggctctactgatagagtatgatgtgagtgtaatggatagtgtggcaacggccagcggtcccctgctggtcgaggtggcaaagactccaggggcatccctgggggttgccctgacaacctccatgtgctgcaacaagcaggtgatcgtgatagacaagattaagagtgcttctattgccgataggtgcggtgctctgcatgtgggagaccacattctctccatcgatgggacatcaatggagtactgtaccttggcagaggctactcaatttctggcaaacaccacagaccaggtgaagctagaaattctgccacaccatcagacaaggctcgcccttaaaggaccagaccatgtgaaaatccagaggagtgataggcagctcacatgggactcatgggcctccaaccacagcagccttcatactaatcaccactacaacacgtaccatcctgatcattgtcgagtgcccgccctgacatttccgaaagcccccccccccaacagtcctccagcgctggtttcgtcctctttttcacccacatctatgtcagcttatagtctgtcgtccctgaacatgggtactttaccacgcagtctgtattctacttcacctcgcggaaccatgatgcgccggcgactcaaaaagaaggacttcaaatcgagcctttctctcgcttcctctaccgtagggctagctggacaggtggtgcatacagagaccactgaggtcgtgttgaccgcagatcccgtaacagggttcggcatccagcttcagggatcggtctttgcgacggaaacactcagctctcctcctttaatatcctatatcgaagctgatagccctgccgagcgttgcggagtccttcagattggtgatagagttatggccatcaatggaatccctaccgaagattctacctttgaggaagccagccagctcctgcgggatagtagcatcacctcaaaggtgacactggaaattgagttcgatgtggccgaaagcgtaatcccctctagcggcacgtttcacgtcaaacttcccaagaagcacaatgtagagctcggaatcactatctccagtccatcatccagaaagcctggcgatccccttgtgatctcagacatcaaaaaggggtcggtggcccatcggaccggaactctggagctcggggataagttgctggctatagacaatatccgtcttgataactgctccatggaagatgctgtgcaaatcctccagcaatgtgaggacctcgtaaaacttaaaatcagaaaggatgaggataatagtgatgagcaagagagctccggtgccattatctacaccgtcgagctgaagaggtacggcggccctttgggcatcactatcagcggaaccgaggagccattcgaccctattatcatatccagcctcactaaaggcggcctggctgaaagaacgggagctatccacataggggaccgaatcctggctataaactcatcgtcactcaagggcaaacccctgagcgaggccattcatctgctgcagatggcaggggaaacagtgactttgaagatcaaaaaacagaccgatgcacagtctgccagctctccaaaaaaatttcccatctcttcacacctgtccgatctgggagacgtagaagaagacagctcaccagcccaaaaacccggcaagctcagcgatatgtacccaagcaccgttcccagtgtggatagtgcagtagatagctgggacgggtccgcaatcgacactagttatgggacacagggtacttctttccaggcctcggggtataatttcaacacctacgattggagatcaccaaagcagagaggctcactcagccctgtaaccaaacctcgatcccagacttatcccgacgtgggacttagctatgaagactgggaccggtctaccgcatccgggtttgcaggcgctgccgactcagccgagacagaacaggaggagaacttctggtcccaggctcttgaggacttggagacttgcgggcagagtggcatcctgcgggagctcgaggagaaggctgatagacgggtcagtctgaggaacatgacccttctagccacaattatgagcggatcaaccatgtcgctgaatcacgaagcccctacgccgcgctcacagttgggacgccaggctagcttccaggagagaagtagctctaggccccattactcgcagaccacccgatccaatacactgcctagcgatgtgggccggaaatctgtaacactgcggaagatgaagcaggaaattaaggagattatgagtcccacgcctgtcgagctccataaagtgaccctgtacaaagactctgacatggaggactttggtttcagtgtcgccgacgggctcctggagaaaggggtctatgttaagaacattaggccggcaggtcctggtgacctgggcggactcaagccctacgaccgactccttcaggtaaaccatgtacgtacccgggacttcgattgctgtctggtcgttcccctcatcgctgagagtggaaacaagctagaccttgtgatttcaagaaacccactagcaagccagaaatctattgaccagcagagcctacccggcgattggtctgagcaaaactccgccttctttcaacaaccgtcccatgggggcaacttagaaacaagagagccaaccaataccctgtag

SEQ ID NO: 189289 - DNA, 3231 bp, synthetic construct
  misc_feature 1..3231: note = Description of Artificial Sequence: Synthetic coding sequence
  source 1..3231: mol_type = other DNA
atgatcgccgtgagcttcaagtgccggtgccagatcctgcggcggcttactaaagatgaatccccgtacaccaagtccgcgtctcaaaccaaaccccctgatggtgctctggcggtccgtcggcagagcatccctgaggagtttaagggaagcactgtggttgagctgatgaaaaaggagggaacgactctcggactgactgtctctggtggcatcgataaggatggcaagcctcgtgtgtccaatctgcgccagggaggcatcgcggctcgtagtgatcagctggacgtgggagactacataaaggcagttaatgggatcaacctcgcaaagttccgccatgacgagataattagcttactcaagaacgttggcgaacgggtcgtgctggaggtggaatacgagttgcctccagtgtccgtgcaagggtcaagcgtaatatttcggaccgtggaagtgactctgcataaggagggcaacacatttgggttcgtcatcagaggcggtgcccacgatgatagaaataagtctagacctgtggtgattacttgtgtccgacctggaggtccggccgaccgcgagggcacaattaaaccaggcgacagacttttgtccgttgacgggattagacttctggggactactcatgctgaggctatgagcatcctcaagcagtgcggccaggaagcggctctgttaatcgaatacgatgtgtccgtgatggacagcgttgcgacagcctctgggcctttacttgttgaggtggctaagacccctggcgcctcactgggggtcgcactcactacgagtatgtgttgtaataagcaggtcatcgtgatcgataagattaaaagcgccagcatagctgacaggtgcggagcgctgcacgtgggggaccacatcctctctatcgatggaacttccatggaatactgcactctagccgaggctacccagtttcttgccaacaccactgaccaagttaagctggagattctgccccaccatcagacacgactggctctcaaggggccggatcacgcagcattggttagttctagctttagcccgacctccatgagcgcatattccctgtcttctctgaacatggggacgctgcctcgcagcttgtactcaacttcccccaggggaacaatgatgaggcggcgccttaagaagaaggactttaagtcaagtctgtccctcgcgtctagcaccgtggggctggcgggccaggtggtacataccgagacgacggaggtggttttgaccgcagatccagtgactggatttggcatccagttgcaaggcagcgtgttcgccactgaaacactttcttcgcctcccttgatctcgtatatcgaagctgatagccctgcagaacgctgcggcgtcctacagattggcgacagggtgatggcaattaatggcatccccactgaagacagcaccttcgaagaagcctctcaactcctgagagactcttctattacatctaaagttactctcgagatcgagttcgatgtggccgaaagtgtgattccctccagtggtacgtttcatgtgaaactgcctaagaagcacaatgtcgaactgggaataacaattagttctccatccagcaggaagcctggggatcccctggtgatatccgatatcaagaaaggatcagtggctcaccgcaccggtacgctggaactgggagacaagctgctggcgatcgataatatcaggcttgataactgctccatggaggatgcagttcaaatcctgcagcagtgcgaggaccttgtgaaattaaagatacgaaaagacgaggacaattctgatgagcaggagtccagcggggcaatcatctacaccgtggaacttaagcgatatggtgggccgctaggaatcaccatctccggaacagaggagcccttcgatcccataattatctcatcgctgactaagggtgggcttgcagagaggacaggagcgattcacatcggggatcgaatcctagccatcaattcctctagtcttaaggggaagccgctcagtgaggctatacacctgctgcagatggccggcgagacagtgactctaaagataaagaagcagaccgacgcccagagcgcctcatccccaaaaaaatttcccatctcttctcacctaagcgacctgggagatgtggaagaggattcctctcctgcacagaagcctgggaagctttcggatatgtatcctagcacagtccctagcgtggatagcgccgtggacagttgggacggcagcgcaatcgataccagttacggtactcaggggaccagcttccaagcttctggatacaattttaatacgtatgactggcgctctcctaaacagaggggatcactgtccccagtaaccaaacctaggagccaaacttatccggatgttggcctttcctatgaagactgggacagatctactgcctccggatttgcaggggctgcggactccgctgagacagaacaggaggagaatttttggagtcaggccctcgaagacctcgagacgtgcgggcagagcgggatattgcgggaacttgaggaaaaagccgatagacgggtttcactgagaaatatgacactgcttgccacaatcatgtccggtagcactatgtccctgaaccatgaagcacctaccccgcggtcccagctgggccggcaggctagctttcaggaaaggagttcttccaggcctcactattcccagaccacaagatcgaatactctacctagcgatgtggggcggaagtccgtgaccctgcgaaagatgaagcaagagatcaaagaaattatgagtccaacccccgttgaactacataaggttaccctgtataaagattctgatatggaggactttggatttagcgtggccgatgggctgctggaaaagggcgtctacgtaaagaacataagacctgctggccctggtgacctgggaggactgaagccatatgatagactcctgcaggtcaatcatgtgagaactcgcgacttcgattgttgcctggtcgttccgctgatcgctgaatctggtaacaaactggatctcgtcatatccagaaacccactagcatcgcagaaatcaatcgaccagcagtccctcccaggcgactggtctgaacagaatagtgctttctttcagcagcctagccatggcgggaatctcgagacaagggagccaactaacaccttgtag

SEQ ID NO: 189290 - DNA, 2511 bp, synthetic construct
  misc_feature 1..2511: note = Description of Artificial Sequence: Synthetic coding sequence
  source 1..2511: mol_type = other DNA
atggtgcagttcagcaccagcgagttccggctgaccccccacatcgataatctggaggttgctaatagtttcgccgttactaacgcattttgcagtcaattctctcgtggcgtgtatgccatattcggcttctatgacaagaagtctgtcaatactataacgtccttctgtggaacactccacgtttcatttatcactccgtcctttccgactgacggcacccacccattcgtcatacaaatgcgcccagatcttaaaggggccctcttatctcttattgagtattaccagtgggataagttcgcctacctatatgattccgacaggggtttgtccacgttgcaggctgtgttggacagcgcagcggaaaaaaagtggcaagtcacagcaatcaatgtaggcaacatcaataatgataaaaaggatgaaatgtatagaagtctgtttcaggacttggagctgaagaaggagcgccgcgtgatcctggactgtgaaagggataaagtcaacgacatcgtggatcaagtcatcaccatagggaaacacgtcaagggttaccattatatcattgccaacctggggtttaccgatggtgaccttctgaagatacaattcggcggtgccaacgtgtccggcttccagattgtcgactatgatgacagcttggtatccaaattcatcgagcgctggagcaccttggaggagaaagagtaccctggagcacacacaacgactattaaatacaccagcgccttgacatacgacgctgttcaggtcatgacagaggccttcaggaatctccgcaagcaacggatcgaaatatctcggagaggtaatgctggggactgcctggctaatcctgccgttccctggggccagggcgtagaaatcgaacgggcactgaagcaggtgcaagtcgagggactgagtggaaacatcaagtttgaccagaatggcaagcgaattaattataccattaatatcatggagttgaaaaccaacggacccaggaaaatcggctattggtcggaagtagacaaaatggtagtgacactcaccgagcttccctctgggaacgatacatctggactcgaaaacaaaactgtagtggtcaccactattttggagtcaccctacgtaatgatgaagaagaaccacgaaatgctggaggggaacgaacgctatgaaggttactgtgtcgatttggctgcagaaattgcaaagcactgtggattcaagtataagctaactattgtgggtgacggcaagtacggcgcaagagatgcggataccaagatctggaatggtatggtgggcgaactggtgtacgggaaggcagatatagccatagccccactgacgatcactctggtgcgggaggaagtcattgacttctcaaagcccttcatgagtctggggatttcaatcatgattaaaaaaccccagaagtctaagcccggcgtgttttctttcctagacccactggcctacgaaatctggatgtgcatcgtgtttgcctacattggcgtgagtgtggtgctgtttcttgtttcaagattttcaccctacgagtggcacaccgaagaattcgaagacggacgggaaacccagtcctctgagagcacaaacgaattcggcatcttcaattctctgtggttctccctaggcgcttttatgcagcaggggtgcgatatctcccctcgtagcctttctggtaggattgttggtggagtctggtggttctttacattgatcatcatttcatcttatactgcgaatttagcggcctttcttaccgtcgaacggatggtgagtcctatcgaaagcgccgaggatttaagcaagcagaccgagatcgcttatggtacgttggattccggttccacaaaggagttcttccgccgttccaaaatagcagtgttcgacaaaatgtggacttatatgcggtccgccgaaccgagcgtatttgtgcgcacaaccgccgaaggagttgccagagtcaggaaaagcaaaggcaagtatgcttacctgctcgagtcgacaatgaatgagtatatagagcaaaggaaaccatgtgacactatgaaagttggtggcaacctagattcaaaggggtatggcattgcaacgcctaaaggttcttccttgaggacacccgtgaatttggctgttctgaaactgtccgagcaaggagtactcgataaattgaaaaataaatggtggtacgataaaggagaatgcggtgccaaagactccggctctaaagagaagactagcgcactgtcgctgtccaatgtcgccggagttttctatatactagtgggaggattaggcctggctatgctcgttgcgttgattgaattttgttacaaatcacgcgcggaggcgaagagaatgaaagttgccaagaacgcccagaatatcaacccaagcagcagccaaaacagccagaactttgctacctacaaagaaggttacaatgtgtatggcatcgaatctgtcaagatctag

SEQ ID NO: 189291 - DNA, 2706 bp, synthetic construct
  misc_feature 1..2706: note = Description of Artificial Sequence: Synthetic coding sequence
  source 1..2706: mol_type = other DNA
atgagcaccatgcggctgctgaccctggccctgctgttcagctgctctgttgcaagggccgcgtgtgatccaaagatagttaacattggtgccgtgttgtccactaggaaacacgagcaaatgttccgagaagcagtgaatcaggccaataagaggcacgggtcctggaagatccaactgaacgcaactagcgtgacgcacaagccaaacgcaattcagatggcactgagcgtgtgtgaagatctcatcagtagtcaggtctacgcaatcctcgttagtcatcctcctactcctaacgaccacttcacacccacaccagttagctataccgctggcttttacaggatccctgtactgggactcactacaaggatgtcaatttactccgacaagagtatccacctcagctttctgcggacagtgcccccatattcacatcaatcgagcgtatggttcgaaatgatgagagtttattcttggaaccacattatcctgctcgttagtgacgatcacgagggtcgggccgcgcagaaaaggcttgagaccctgcttgaagagagggagtcaaaagccgaaaaggtcctccagttcgaccccggaactaaaaatgtcaccgcactcctcatggaagccaaagagctcgaggcaagggttattatcctctccgctagcgaagacgatgccgccaccgtgtaccgagctgcggcaatgctgaatatgacagggtctgggtatgtgtggctggtcggagagcgggagatttccggaaatgcacttaggtacgccccggacggtattctcgggcttcagctgataaatgggaaaaacgagtccgcccacatttcagacgctgtcggtgtagttgcccaggcggttcacgagctcctggaaaaggagaacatcaccgaccctccccggggctgcgttggaaatacaaatatctggaagacagggcctctattcaaaagagtcttaatgtcctccaagtatgcagatggggtcacaggacgggttgagtttaacgaagatggagacaggaaattcgctaactactctattatgaacctgcaaaatcgtaagctggtgcaggtgggtatctacaacggtactcacgttattccaaacgataggaagattatttggccaggaggcgaaaccgagaaaccgagaggttatcagatgtctaccaggctgaaaatagtcacaattcatcaggaaccatttgtctacgtcaagcccaccctgtctgacggaacatgcaaggaagaatttacagtgaacggcgaccctgtcaaaaaggtgatatgtactggacctaacgacacatcaccaggtagccccaggcataccgtgccacagtgttgttacgggttctgtatcgacctgctgattaaactggcaaggaccatgaattttacttatgaggttcaccttgtggccgacggaaaattcggcacgcaagagcgcgtgaacaacagcaataagaaagagtggaacggcatgatgggagaactgctgtctggccaggcagacatgatcgtggccccactgaccatcaataatgagagggcccagtacatcgagttttcaaagccttttaagtaccagggactcactatcctggtcaaaaaggagatcccacggtccaccctcgattcctttatgcaaccctttcaatccacgttgtggctgctcgttggattgtccgtgcatgttgtagccgtaatgctgtacctattggaccggtttagtcccttcggtagattcaaggtgaattcagaagaagaggaagaggatgctctgacgcttagtagcgccatgtggttctcctggggggtcctgttgaattcgggtatcggtgaaggcgcccctcggagcttctccgctcggatactaggaatggtgtgggccgggtttgccatgatcattgtggcctcctacaccgcaaacttggcagccttcctcgtgctggataggcccgaggaacgcatcactggtatcaatgacccacgactgagaaacccctcagataagttcatatacgccacggttaagcagtctagcgtggacatttattttcggaggcaagtcgagcttagcacaatgtatagacatatggagaaacacaactacgagtcagctgctgaggcgatccaggcagtccgagataataagttgcacgcttttatatgggattcggccgtgctagagttcgaagcatctcagaaatgcgatctcgtcacgaccggtgaactattttttagatctggctttggcattggcatgaggaaggactcaccctggaaacaaaatgtgagtctgtcgatccttaaatcccacgaaaacgggttcatggaagacctggacaagacatgggtgcgctatcaggaatgtgactcccgcagtaatgctccagccacgttaacatttgagaacatggctggcgtgttcatgctcgtagccggtggcattgttgccggcatatttctcatcttcattgagattgcatataaaaggcataaagatgctcgcagaaaacaaatgcaactggcctttgctgccgttaacgtgtggaggaagaacctccagtccaccggcggtgggagaggggccctgcaaaaccagaaagacacggtgctcccacgccgtgctatcgagcgagaagagggtcaactgcaactttgctcccggcacagggaaagttag

SEQ ID NO: 189292 - DNA, 2658 bp, synthetic construct
  misc_feature 1..2658: note = Description of Artificial Sequence: Synthetic coding sequence
  source 1..2658: mol_type = other DNA
atgagcaccatgcggctgctgaccctggccctgctgttcagctgcagcgttgcccgggcggcctgcgaccccaaaatagtgaacattggagctgtacttagcactagaaaacacgagcagatgtttcgcgaagccgtcaaccaggcaaacaagcgccacggctcctggaaaattcaactgaacgccaccagtgtgacacataagcccaatgcaattcagatggcactgtcggtgtgcgaagatttgatctcttctcaagtttacgccatcctggtatcccatccacccacacccaacgatcactttactcccacccctgtgtcttacacagccggtttttataggatccctgttcttggattgaccacccgcatgtctatttacagtgataaatcaatacatctgagcttcctacgcacggtgccaccgtactcacaccagtcttccgtctggttcgaaatgatgagggtgtattcctggaatcatatcatcttgttggtgtccgacgaccacgaaggtagagccgctcagaagcgcctcgagactttgctcgaggaacgggagtctaaggccgagaaagttttgcagttcgaccctgggaccaagaacgtgaccgcgctgttgatggaggcgaaagaacttgaagctagggtcataattctgtctgctagtgaagacgacgcagcaacggtttacagagcggctgccatgctgaacatgactgggtctggctacgtatggctagtgggtgagcgcgaaatttctggaaatgctctgagatacgctcccgacggcattctgggtttgcagttgattaacggaaaaaatgaaagcgcccacatcagcgacgccgtgggagtggtggcccaagcagtgcatgaactgctcgaaaaagagaatatcacagatcctcctcgcggttgcgtgggaaacaccaatatctggaaaactggtccgctgtttaaacgggtgctgatgagcagtaaatacgctgacggagtgaccggacgtgtggagttcaacgaggacggagaccggaagttcgctaactacagcatcatgaatcttcagaacaggaaacttgttcaagtgggcatctataatggaacccatgttatcccgaacgatagaaaaattatctggccgggaggcgaaaccgaaaagccgcgggggtaccagatgagcactagactgaaaatcgttacgatccatcaggaaccctttgtgtatgtcaagccgaccctcagtgatggcacctgtaaggaggagtttacagttaacggagaccccgtgaagaaagtgatctgtacagggccgaacgatacaagccccgggagccctcgccacaccgtcccccagtgctgctatggcttttgcatagacttactgattaagttagcccggacaatgaattttacctatgaggtgcatttggtcgcagacggaaagttcggcacgcaggaacgggtaaacaacagcaacaagaaggagtggaatggcatgatgggtgagcttctgtccggtcaggccgatatgattgttgctccattgacgattaacaacgaacgagcccagtacatagagtttagcaaaccctttaaatatcagggcctgactatcttggtgaagaaggagatccctcgttctacccttgacagttttatgcagccttttcaatccacattatggcttctcgtcggtctctcggtgcacgtcgtcgccgttatgctctatctgctcgacaggtttagcccctttgggagattcaaggtcaatagcgaagaagaggaagaagacgcgctgaccctgagctccgcaatgtggtttagttggggcgtgctgctaaatagtgggatcggcgaaggcgcccctagaagcttctctgctaggatccttggcatggtctgggcgggattcgccatgattattgtggcttcttacaccgcgaatctggcagctttcctggtgctcgatcgaccagaggagagaataacaggcattaatgaccctcgccttcgcaaccctagcgataagttcatctacgcaactgtgaagcagagcagcgtggatatttatttccggagacaggtcgagctcagcaccatgtatcgccatatggaaaaacacaattatgagtcggccgctgaggcaatccaggctgtgagggacaataaattgcatgcgtttatctgggattctgcggttctcgagttcgaagcatcacaaaagtgcgatctcgtgaccactggcgagctgttctttcggtccggcttcgggatcgggatgcggaaagactctccttggaagcagaacgtttctctgtcgatcctgaagtcacacgaaaacggctttatggaagacctggacaaaacttgggtgcgatatcaagagtgcgacagcagatcaaacgcacccgccactcttacattcgagaatatggccggcgtctttatgcttgtcgctggcggaattgtagcaggaatattccttatctttatcgagattgcgtacaaacgacacaaagatgctcggaggaagcaaatgcagctcgcatttgcagctgtaaacgtctggagaaagaatctgcaacagtaccatcccactgatattacgggacctctgaatttgagtgaccctagtgtttccacagttgtgtag

SEQ ID NO: 189293 - DNA, 2769 bp, synthetic construct
  misc_feature 1..2769: note = Description of Artificial Sequence: Synthetic coding sequence
  source 1..2769: mol_type = other DNA
atggtgcagctgcggaagctgctgcgggtgctgaccctgatgaagttcccatgctgcgtactcgaagtactcctgtgcgcgctggccgctgccgcccggggccaggagatgtacgccccacacagcatccgcatcgagggcgacgttactcttgggggcctcttccctgtgcatgcaaagggcccatctggggtgccatgcggggacatcaagagggagaacgggattcacagactcgaggccatgctctacgctctcgaccagatcaactcagaccctaacctcctccctaacgttacactgggagctagaatactggacacctgtagccgggatacctatgctctggagcagtcactgaccttcgtccaggcattaattcagaaagatacctctgatgttaggtgcacaaacggggagcctcccgtgttcgtaaagccagaaaaggtcgtgggggtgatcggagcatctggttcatcagtgagtatcatggtcgccaatattctccggttgtttcagattccgcagatctcctacgcttctaccgcacctgagctcagtgacgatcgccggtacgatttcttcagccgtgtggtgccccccgattctttccaagcacaggcaatggtggatattgtgaaagccctggggtggaactacgttagtactcttgcctccgagggctcgtatggggaaaaaggcgtggaaagtttcactcaaatttccaaagaagcggggggcctgtgcatcgctcaatccgtgcgcatacctcaggaacggaaagaccgcactatagactttgacagaatcatcaaacagttattggacaccccgaattcaagggccgtggtcattttcgccaatgacgaggacattaagcagattctggccgctgctaagagggcagaccaagtgggacactttttgtgggtagggtcagacagctggggatctaagattaatcctttgcaccagcacgaggacatcgccgagggcgcaataaccattcagccgaaacgtgcgactgtggaagggtttgacgcatatttcacgtcaaggaccctggagaacaatcggcgtaatgtttggtttgccgaatactgggaagagaattttaactgcaaacttactatcagcggctccaagaaggaagatacagacagaaagtgtacgggtcaagagcggatcggcaaggacagtaattacgagcaggagggtaaagtccagttcgtgatcgacgctgtgtacgccatggcacatgcgctgcatcatatgaacaaagacctttgtgcagattaccggggagtgtgtccggagatggaacaagcaggcggtaagaaactgctgaagtatatcaggaacgtcaactttaatgggtccgccggtacacccgttatgttcaacaagaatggggacgcaccaggtcggtatgacattttccagtaccagaccacgaatacctctaatccggggtaccgcctgatcgggcagtggaccgatgagcttcaattaaacattgaagacatgcaatgggggaagggagtccgggagattccagcatcagtgtgtacactgccttgtaagccaggccagcgcaagaagacccaaaaagggaccccatgttgctggacttgcgaaccatgtgatgggtaccagtaccagttcgatgagatgacctgccaacattgtccctatgatcagaggccaaacgaaaaccgaacagggtgtcaggatatccccatcatcaagctagaatggcacagcccctgggccgttattccggtgttcctggccatgctcggaattattgctaccatcttcgtgatggccacatttataagatataacgacacacctatagtgagggcctctggtagagagttgtcatacgtgctgctgactggaatttttttatgctatattattaccttcctaatgattgctaagccagacgtggcggtgtgttctttccggcgcgtcttccttgggctggggatgtgtatatcatatgccgctctcctgacaaaaactaaccggatctacaggatatttgaacaaggaaagaagtcggtcacggctccaagactcatcagtcccacctcccagcttgctataaccagctcattaatttcagtgcagctgttaggcgtcttcatctggttcggtgtggatccccccaacattatcatcgactatgacgagcataagaccatgaatcctgagcaggctcgcggagttctcaaatgtgatatcaccgacctgcaaatcatctgttcgcttggctactctattctactgatggtcacctgcaccgtgtacgccataaaaaccaggggagtgcctgaaaatttcaatgaggcaaagccaatcggtttcaccatgtacacaacatgcattgtgtggcttgcattcattccgatcttttttggtaccgctcagtccgcggagaaactgtatatccagacgacaaccctcaccatctcaatgaacctctccgcgtctgtggctctcggaatgttgtatatgccgaaagtctatatcattatcttccacccagagctcaatgtccagaaacgcaagagatcattcaaggccgtcgttacagctgctaccatgagcagcaggctgtctcataaaccgtcagaccgtcctaacggcgaggccaagactgaactctgcgagaacgttgacccaaacaattgtattccacccgtgaggaagtctgttcaaaaatccgttacctggtataccatcccccccacagtctag

SEQ ID NO: 189294 - DNA, 2685 bp, synthetic construct
  misc_feature 1..2685: note = Description of Artificial Sequence: Synthetic coding sequence
  source 1..2685: mol_type = other DNA
atggcccggcagaagaagatgggccagagcgtgctgcgggccgtgttttttctggttctgggactgctaggccacagtcacggtggtttcccaaacacgatctcaattggaggcctttttatgaggaacaccgtacaggagcactctgcattcaggtttgcagtgcagctttacaatactaatcagaatactacggagaagcccttccatcttaattaccacgtggatcacctggattctagtaactcctttagcgttactaacgcattctgttctcagttctcccgaggagtatacgccatattcggtttttatgatcagatgtccatgaatacccttaccagcttctgcggggcactgcacacctcttttgtgacacctagcttcccaaccgatgcggacgtccagttcgtcatccagatgagacccgccctgaagggagcaatcctgtccctgctcggacactataagtgggaaaagtttgtgtatctgtatgataccgagcgaggtttttcaatactgcaggcaattatggaggccgcagttcagaacaactggcaggtaactgcgaggagtgtgggaaacatcaaagacgtgcaagagtttaggaggattatcgaggaaatggaccgtcggcaggagaagcgctatctgattgattgtgaagtggagagaatcaacaccatcctggagcaagtcgtaattctggggaagcactctcggggctatcattacatgttagccaacctgggcttcacagacattctcttggaacgtgttatgcatgggggagcgaatatcactggatttcagatcgtcaacaatgaaaatcccatggtgcagcagttcatccagaggtgggtgcgacttgacgaacgcgaattcccagaggccaaaaacgcacccttaaaatacacttccgcactcactcatgacgccatcctcgtgattgcggaggcatttagatacctgcgcaggcagcgagttgatgtgagcaggagggggagcgccggagactgcctggccaaccctgccgttccctggtctcagggtattgacatcgagagagctctgaagatggtgcaggtacagggaatgacaggcaacatccagttcgacacatacggacgcaggaccaactataccattgatgtgtatgagatgaaggtcagtggctcgcgtaaagcggggtactggaatgagtacgagcgatttgtgccattcagcgaccaacaaataagcaacgattctgcctcgtcagaaaatcgcacaatagtggttacgacaattcttgaatccccctacgtcatgtataaaaaaaaccacgagcagctggaggggaacgaacgctatgagggttactgtgttgacttagcatatgagatcgccaagcatgtgcggatcaaatacaaattatctatcgtgggcgatggtaagtacggcgctcgcgacccggaaaccaagatttggaacggaatggtgggcgaattggtctacggcagagcagatatagccgtggccccactgacgattactctggtcagggaggaagtgatcgattttagtaagccattcatgtcactgggcatcagtataatgataaaaaagcctcaaaagagcaagcctggggtcttttctttcctggacccactggcttatgagatatggatgtgcattgtctttgcgtacatcggcgtgagcgttgtgctgtttctggtttctcggttcagcccgtatgagtggcacctggaggataataacgaagagcctcgtgacccccaatcgccccccgatcctcccaacgagtttggcatcttcaattccttgtggttcagccttggggccttcatgcagcagggatgcgatatctccccccggagcctcagcggccgaatcgtaggaggcgtgtggtggttcttcacgttgatcatcatatccagctataccgcaaatctagcagcgtttttaacagttgagcggatggtgagccctatcgagagcgccgaggatctggctaagcaaaccgaaattgcatacgggactctggactccgggagtacgaaggagttttttcgacggtcaaagattgcagtctatgagaagatgtggtcctatatgaagtccgcggaaccgagcgttttcacgaagacaactgcagatggcgtggcgcgtgtgcgcaaatcaaaaggtaagtttgcatttcttctcgagagtacgatgaatgaatacatcgaacagcgtaaaccctgcgataccatgaaggtcggaggaaatctggacagtaaggggtacggtgtagccacccctaaaggctcagctctgcgtaatgccgtgaatctcgcagtactgaagctgaatgagcagggtcttctggacaagctgaagaataaatggtggtacgacaagggagagtgtggctccggtggcggcgacagtaaggataagaccagtgccctctcactgtcgaacgtggctggcgtattttacatcctggttggcggcctgggcctcgccatgatggtggctttgatcgagttttgctacaagtccagggctgagtctaaaagaatgaagcttactaagaacactcaaaactttaaacctgctccagctactaacacacagaactacgcaacgtaccgagaaggctacaatgtgtacggcacggagtccgttaaaatttag

SEQ ID NO: 189295 - DNA, 432 bp, synthetic construct
  misc_feature 1..432: note = Description of Artificial Sequence: Synthetic coding sequence
  source 1..432: mol_type = other DNA
atggcccggcagaagaagatgggccagagcgtgctgcgggccgtgttctttcttgttctcggcttgctgggccacagtcatgggggctttcccaatacaatttctattggggggctattcatgcggaacactgtgcaagaacatagtgcttttcggttcgcagtccaattgtacaataccaatcaaaacacaaccgagaaacccttccacctgaactaccacgtagaccacttggacagctcaaattcattctccgtgacgaacgcctgccctgccgagagagattatctaccctggcctggttccattagagaaaacaactggactgcacttccgtgctgtaaggaccacggcctccttcaccttaaatgcagccccggagggcggcagaactgggcgtattgtatctggggggttacaggagagctctag

SEQ ID NO: 189296 - DNA, 2685 bp, synthetic construct
  misc_feature 1..2685: note = Description of Artificial Sequence: Synthetic coding sequence
  source 1..2685: mol_type = other DNA
atggcccggcagaagaagatgggccagagcgtgctgcgggccgtgttctttctggtactagggttgctgggacattcccacggtggcttcccgaacacgatctcgatcggtggcctcttcatgagaaacactgtgcaggaacacagcgcctttcggttcgccgtgcagctctataacaccaatcagaacaccactgagaaaccttttcatctgaactatcacgtagatcatttggattcttctaacagcttctcagtgactaacgctttctgtagccaattttccaggggggtgtacgctatcttcggcttctacgaccagatgtccatgaataccctaacaagcttctgtggcgcgctgcacacgtcgttcgtgaccccgagctttccaactgatgccgatgttcaatttgtgatacagatgcggccagccctgaaaggcgctattctgagtctcctgggccactacaagtgggagaaatttgtttatctctatgacacagaacgtggcttcagtattctgcaggccatcatggaagccgcagtacagaacaattggcaggtgacagcccgcagtgtcgggaatattaaagatgtgcaggaattccgccgtattattgaagagatggaccggagacaggagaagcgctacctcattgactgcgaagtggaacgaatcaacaccatactggagcaagtggtaattttaggcaagcacagccggggttaccactatatgttagctaatcttggtttcactgacatcctcttggaacgcgtgatgcacggcggcgccaatattactgggtttcagattgtgaataatgagaacccaatggtccaacaatttattcagcgctgggtccggctggacgagagggagttccctgaggccaaaaacgccccactaaaatatactagtgcacttacccacgacgccatcctggtgatagccgaggccttccgctatcttcgacggcagagagtcgacgtctctaggaggggatcggcaggagattgtctcgcaaatcctgctgtaccatggagccagggcattgatattgagcgcgctctaaagatggtccaggttcagggcatgaccggcaatattcagttcgatacgtacgggagaaggactaactatacaatcgacgtatatgagatgaaagtgtcagggtctcggaaagccggatattggaatgagtatgaacgctttgtgccattttctgaccaacagatctccaacgacagcgccagcagcgaaaataggacaatcgtggtgactacaatactcgagagcccttatgtgatgtacaaaaagaatcatgagcagctagagggcaatgagagatacgaaggctattgcgtcgacctggcatatgaaattgccaaacacgtgcggatcaaatacaagttgagcattgtgggagatggaaagtacggtgcccgcgaccctgagacgaagatctggaatggcatggtgggggagctcgtatacggcagagctgacatcgctgttgcccccctgaccattactctagtcagagaggaagtgattgacttttccaagccattcatgtctctcggaatctccatcatgataaagaaaccgcagaaatcaaagcccggcgtcttctccttcctcgatcctctcgcatatgaaatctggatgtgcattgtctttgcctatatcggggtgtccgtggtactgtttcttgtgtcaagattcagcccttacgagtggcacctggaggataataatgaagaaccaagagaccctcagagtcccccagaccccccaaatgagtttggtatctttaactcactgtggttctcgttaggcgccttcatgcagcagggctgtgacattagtccaaggtccctgagcggccggatagttggcggggtctggtggtttttcaccctgattatcatctcctcgtatacagctaacctagcggcttttctgactgtggaacggatggtaagcccaatcgaaagtgccgaggacctggctaagcagactgagattgcttacggcactttggatagcggctctactaaggaattttttcgccggagcaaaatcgccgtgtacgaaaaaatgtggtcatatatgaagagcgccgaaccttccgtatttacaaagactaccgctgatggtgtggctcgggttcggaaaagcaagggaaaatttgcgttcctgctggagtcaactatgaacgaatatatcgaacagaggaaaccatgcgataccatgaaagtaggagggaatttggattccaaggggtacggagtggccacccctaaaggatcagcactacgtaatgccgtgaatctggcagtgctgaagctcaatgaacagggactgctggacaagctgaaaaataaatggtggtacgacaaaggggaatgtgggtcgggggggggtgattctaaagataaaacctccgctctgagtctgtcgaatgtggcaggggtcttctatattctggtgggcggtctgggtttggccatgatggtcgccttgattgaattttgttacaaatctcgtgctgagtcgaagcggatgaagctgacaaaaaatactcagaacttcaaaccagcccctgcaactaacacgcagaactacgctacgtatagagaagggtacaacgtgtacggtaccgagtccgtgaagatatag

SEQ ID NO: 189297 - DNA, 2685 bp, synthetic construct
  misc_feature 1..2685: note = Description of Artificial Sequence: Synthetic coding sequence
  source 1..2685: mol_type = other DNA
atggcccggcagaagaagatgggccagagcgtgctgcgggccgtgttcttcctcgtccttggcttattaggacattcccatggaggcttccccaacacaatctcgattgggggcctgttcatgaggaataccgttcaggaacattcggctttccgctttgccgtgcagctctataatactaatcagaatacaactgagaagccattccacctgaattatcatgttgatcatctggactcatctaattcattttcagtgacgaatgctttctgttctcagttctcacgtggagtatatgcaatatttggcttttacgatcagatgagtatgaatacccttacatctttttgtggcgctctgcacacatcgttcgtaacaccaagttttcctaccgatgctgacgtccaatttgtgatccagatgagaccggccctgaaaggggcaatcctgagccttctgggacactacaaatgggagaaatttgtctatctgtatgacaccgagaggggatttagtattctgcaagcaattatggaggcagctgtgcaaaataactggcaagtcacggccaggtcagtgggcaacatcaaagacgttcaagagtttcgccggatcatcgaagagatggacaggaggcaggaaaaacgctatctgatagattgtgaggtagaacgcatcaacacgatcctggaacaagtggtcattctgggcaaacactcacgcgggtaccactatatgctcgctaatctcggttttaccgatatactccttgaacgtgtgatgcatgggggcgccaatattactggcttccagattgttaacaatgaaaaccctatggtgcaacagttcattcagaggtgggtgaggcttgacgagcgagaatttcctgaggcaaaaaatgcccccctgaagtatacgagcgcactgacgcacgatgccattctcgttattgccgaggcctttagatacttaagacgacagcgggtggacgtgtcgcgacggggatcagctggagactgtctcgcaaaccccgcggtgccttggtcccaaggaattgacattgagcgcgctttgaagatggtgcaagtgcagggtatgaccgggaacatacaatttgatacttacgggcgccggacaaactacactatagacgtgtatgagatgaaagtcagcggctctaggaaggcaggctattggaacgaatacgagagattcgttccattcagcgaccagcagatcagtaacgattccgcctcttctgagaaccgcacgatcgtcgtgacgactatattagagagtccatacgtcatgtacaagaaaaatcatgagcaactggaaggcaatgagagatatgagggatactgcgtggatctggcctacgagattgccaagcacgttcgtatcaaatacaaattatctattgtgggggatggaaaatatggcgctagagaccccgaaaccaagatctggaatggaatggttggagaactggtgtacggaagggcagatattgccgtggcaccacttacgataacgctggtgcgtgaagaagtgattgacttctccaagccctttatgtccctggggatcagtatcatgattaagaaaccccagaaatccaaaccaggggttttctcctttctagatccactcgcatatgagatttggatgtgtattgtctttgcatatattggcgtgtctgtcgttctttttctcgtctctaggttcagcccctatgagtggcatctggaagataacaatgaagaaccacgggatccccaatctcctccagaccctcctaacgagttcgggatctttaactctttatggttctcattgggggcctttatgcagcagggctgtgacatatccccccgttctctctctggcagaatcgttggtggtgtgtggtggttcttcaccctgattattattagcagttacaccgccaacctggctgccttcctaacagtcgaaaggatggtcagtccaatagaatccgcggaggacttagctaaacagaccgaaattgcatacggcacactcgattccgggagtacaaaagagttcttccgccggtctaaaatcgctgtatacgaaaagatgtggagctatatgaagtccgccgagccatcagttttcacaaaaaccacagccgatggagtagcacgggtacggaagagcaaagggaagttcgccttcctgctggagtctacaatgaatgagtatatcgaacagagaaaaccatgcgacaccatgaaggtgggcggcaacttggactcaaaaggctacggggtggctacaccaaagggcagcgctctgaggactccagtgaatctggcggttctcaaactgtccgagcagggcatcttagacaaactcaagaacaaatggtggtacgacaagggcgagtgcggggctaaagattcaggcagtaaagataagacctccgcactctctctatctaatgtagcaggggttttctatattctggtcggcggattgggactggccatgatggttgcactgatcgagttctgctacaaatcgcgagccgagagtaagcgaatgaaactgaccaaaaacacacaaaatttcaaaccagccccagcgactaacacccagaactacgctacctaccgggaggggtataatgtttacggtactgaatccgtaaaaatctag

SEQ ID NO: 189298 - DNA, 495 bp, synthetic construct
  misc_feature 1..495: note = Description of Artificial Sequence: Synthetic coding sequence
  source 1..495: mol_type = other DNA
atggcccggcagaagaagatgggccagagcgtgctgcgggccgtgtttttcctcgtgctgggtcttctgggacattcacacggcgggtttcccaacaccatttccatagggggcttgttcatgagaaacactgtgcaggagcactctgcttttcgttttgccgtgcagctgtataatacaaaccagaatactactgaaaaaccttttcacctgaattaccacgttgatcaccttgacagctctaattcttttagcgtgacaaacgcctgtcctgctgagagagactacttaccctggcccggctcgattagggagaacaactggacagccctaccgtgctgcaaggatcacggtttgctccacctaaaatgtagtcctggtggccccgctaagactgggcctatagtgagtggagctctgcaggtcaattgcaagatgcggactcgctcccaggtttcaaccacctcatcactgctggagttcagtaccgaatag

SEQ ID NO: 189299 - DNA, 495 bp, synthetic construct
  misc_feature 1..495: note = Description of Artificial Sequence: Synthetic coding sequence
  source 1..495: mol_type = other DNA
atggcccggcagaagaagatgggccagagcgtgctgcgggccgtgttcttcctagtgttgggcctgttaggccatagccatggcggttttccgaacactatcagcattggagggttgtttatgaggaacacagtgcaggagcactcagccttcagattcgctgtccagctctacaatactaaccagaatacaactgagaagccattccatctcaattatcacgttgatcatctggattcttcgaacagcttcagcgttacaaatgcatgccccgccgagcgggattacctcccatggcccggcagcatccgcgaaaacaactggaccgccctgccttgttgcaaggatcatggtctgttgcatctcaaatgtagccctgggggacccgccaaaaccggccccatagtgagtggcgccctccaggtgaactgcaagatgaggacacggtcccaggtttcaacaaccagttctctcctggagttttccactgagtag

SEQ ID NO: 189300 - DNA, 1989 bp, synthetic construct
  misc_feature 1..1989: note = Description of Artificial Sequence: Synthetic coding sequence
  source 1..1989: mol_type = other DNA
atgctgcagggcggcgaggagagccggctgttcggcagcctgctgtggaccctcccgtggcgcggcctcttcatgcgcaacactgttcaggagcactctgcctttagattcgctgttcagttgtacaatacgaaccaaaacactaccgaaaagccctttcacctgaattaccacgtcgatcatcttgattccagtaattcattttccgtaaccaatgcattctgctcccagttttccagaggggtgtacgctattttcggcttctatgatcagatgtctatgaatacattgacgtccttctgtggagcacttcacactagtttcgtgacacctagcttccctactgatgcagatgtccagttcgttatccagatgcgacctgccttaaagggagctattctgtctctgctgggccattacaaatgggaaaaattcgtctatctctacgacactgagcggggtttcagcatactgcaagccattatggaggctgccgtacaaaataattggcaggtgacagcccgctctgtcgggaacatcaaagacgttcaggaattccgaagaataatcgaagagatggacaggcgccaggagaagcgttatctgatcgattgcgaagtagagcggatcaatacaattcttgagcaggtggtgatactcgggaagcactccagggggtaccactatatgctggctaacctcgggttcacagacatcctcctggagagagttatgcacgggggggccaacataaccggttttcagatcgtgaataacgagaaccccatggtgcagcaatttatccaaagatgggtcaggttggatgagcgcgagtttccagaggccaagaacgcccctttgaaatatactagcgccctcacgcatgatgccatcctcgtcatagcggaggctttcaggtacctccgtaggcagagggtggacgtttccagaagaggaagtgccggggactgtctcgcaaacccagctgtcccatggtcccaaggaatagatattgagcgggccctgaagatggtgcaggtccagggcatgacgggtaatattcagttcgacacttacgggaggcgcacaaactacaccatcgatgtctacgagatgaaggtgagcggttctaggaaggctgggtactggaacgagtatgagagatttgtgcccttctctgaccagcaaataagtaatgacagcgcctctagtgagaacaggacgattgtagttaccaccattctagaatctccatacgtgatgtataagaagaaccacgagcagctcgaaggcaacgaaaggtacgagggttattgcgtggacctggcgtacgaaatcgcgaagcacgtcagaattaagtataaactgtccatcgtaggcgacggtaagtatggtgccagggatccagaaacaaagatttggaacggaatggttggggagctggtgtacggaagagctgacatcgctgtcgctcccctaactattaccttagtccgggaagaggtgatagatttcagtaagccctttatgtcacttgggatctcaatcatgattaaaaaaccccagaagtccaagcctggagttttctccttcctggatccgcttgcttatgagatatggatgtgcatcgtatttgcctatatcggcgtatctgtcgtcctatttttggtgagccggttttccccttacgagtggcatctcgaagacaacaacgaggaacctcgggaccctcagagtccccccgatccacctaatgaatttggtatatttaactccctttggttctccttgggcgcttttatgcagcaggggtgcgatattagtcctagattcgtgtttgtcgcctacagcatgccacattgtattctttggagttacagcattcatgtgcacatggtgttcatacacctgaattcaagatttttctcattcaacatcccctcaaatgatcgcttaagtagcagtcactgcgtgtgcctgtgcccctag

SEQ ID NO: 189301 - DNA, 2475 bp, synthetic construct
  misc_feature 1..2475: note = Description of Artificial Sequence: Synthetic coding sequence
  source 1..2475: mol_type = other DNA
atggcccggcagaagaagatgggccagagcgtgctgcgggccgtgttcttcctcgtgctaggcttactcggacacagccatggagggtttcccaacactattagcattggcggcctattcatgcgtaacacagtgcaggagcacagtgctttccgattcgctgttcagctgtataacacaaaccagaataccaccgaaaaacccttccatctgaactaccatgttgatcacctggatagctccaattcgttttccgtgaccaatgcattttgttctcagttctccagaggcgtgtatgcgatttttggtttctatgaccaaatgagtatgaacacgctgacatcgttctgcggcgccctgcacacttctttcgtgacaccttcctttcccaccgacgccgacgtgcaattcgtcatccagatgcggcctgccttaaaaggagccatacttagccttctggggcactataagtgggagaagttcgtttatctgtacgacacagagcgcgggtttagtatcctgcaggccattatggaagccgctgtgcagaacaattggcaggtgactgcacggtcagtcggaaatattaaagacgtccaggaattcaggcgcataatcgaggaaatggacaggcgccaggaaaagaggtacttgatagattgcgaggtggagcgtattaacactatcctcgaacaggtagtgatcctcggtaagcattcaagagggtaccactacatgctcgccaacctggggtttaccgacattttgctggaaagagttatgcacggtggggccaacattacggggtttcagattgttaacaacgaaaatcctatggtccaacagttcattcagcgatgggtcagactggatgagcgggagttcccagaagcaaagaacgctccactgaagtacaccagcgcactcactcacgacgcgatactggttattgccgaggcctttcgttacctgcgccgacagagggtcgacgtatcaagacgagggtcggctggagattgcctcgcgaatcctgctgtgccatggtctcagggaatcgacatcgagcgagcactgaagatggtgcaggtccagggcatgaccggcaacattcaatttgatacctacggcagaaggaccaactacaccatcgacgtgtatgaaatgaaggtctcaggctctcgtaaggctgggtattggaacgaatatgagcgcttcgtgcccttttccgatcagcagatcagtaacgattctgccagcagtgagaacaggacaatcgtagttacaactattctggagtctccctacgttatgtacaaaaagaaccatgagcagctcgaaggcaacgagagatacgaggggtattgcgttgacttggcgtatgagatcgctaaacacgttcggataaaatacaaattgagcatcgtgggagatggtaagtacggcgcccgggaccccgagacaaagatctggaacggaatggtcggcgagctcgtatacggccgcgccgacatcgccgtggcacctcttacaatcacccttgttagggaggaagtcattgacttcagcaagccgtttatgtccctgggcataagcattatgataaagaagccccagaaatctaagcctggagttttttctttcttggaccctctggcctacgagatctggatgtgcatagtattcgcatacatcggcgtgtccgtggtgctgttcttagtctccagattctctccctacgaatggcacttagaagacaataatgaagagccgcgagaccctcagagtccccccgacccccctaatgaattcggcatctttaacagcctttggttctctctcggtgctttcatgcagcagggttgcgacatctctccacgttctcttagtgggagaatcgtgggcggagtgtggtggttctttacactaataataatctcaagttacacagctaatcttgcagcgttcctgacagtggaaaggatggtgtcaccgatcgaaagtgcagaggacttagccaaacagaccgaaatagcatatggcacacttgactccggaagcaccaaagagtttttccggaggagtaaaatcgccgtctacgaaaagatgtggtcctacatgaagtcagccgagccctcagtatttacaaagacaaccgctgatggcgtggcacgggtcagaaagagtaaggggaagtttgcgttcctcctcgagagcactatgaatgagtatatcgaacagaggaagccctgcgatacaatgaaggtgggcgggaatttagattctaagggctatggtgtcgcaacgcccaagggaagcgccctccgtaacgctgttaatctcgccgtgttaaagctgaacgaacaagggctgctagacaagttgaagaataaatggtggtatgataaaggtgaatgtggttccggcggcggcgactctaagaacgcttgtaagccatgttctattgagacccaatag

SEQ ID NO: 189302 - DNA, 2709 bp, synthetic construct
  misc_feature 1..2709: note = Description of Artificial Sequence: Synthetic coding sequence
  source 1..2709: mol_type = other DNA
atgcggatcatcagccggcagatcgtgctgctgttcagcggcttctggggattggcaatgggagcttttcctagctccgtgcagattgggggccttttcatcagaaataccgaccaggagtataccgcattcaggctggcaatcttcttgcacaatacatcgccaaacgccagtgaggcaccctttaaccttgtgccacatgtggataatatagaaactgctaacagcttcgccgtgacaaatgctttctgcagtcagtatagccggggtgtgttcgccatctttggcttgtatgacaagcgcagcgtgcacacactcacaagcttctgttcggcgctccacattagtctgatcaccccttcatttccaacggaaggtgaatcacagttcgtgctgcagttgcgcccgtccctgaggggagcgctgttgtccttactcgaccactacgaatggaactgcttcgtcttcttatacgataccgatagaggctacagtattctgcaggctatcatggaaaaagctgggcagaacgggtggcacgtgtctgccatatgcgtcgagaatttcaacgacgtgtcttataggcaacttctggaagaattagatcgcagacaggaaaagaagttcgttatcgactgtgaaatagaaaggctgcagaatattctggagcagatcgttagcgtgggaaaacacgttaagggatatcattatatcatcgccaacctgggttttaaggatatttccttggagaggttcatccacggtggggctaacgtgacggggtttcagttagttgatttcaatacacctatggtgataaagctgatggatagatggaagaagctcgaccagagggagtatccgggatcagagaccccccccaagtacacctcagctttaacgtacgacggtgtgctggtgatggccgaaacgtttcggagtctgaggaggcagaaaatcgatatctcacgtcgagggaatgccggggactgcctggcaaatccagcagccccgtgggggcagggaattgacatggagagaacattgaaacaagtgaggatccagggcttaacaggaaatgtgcagttcgatcattatggacgacgcgttaattacactatggacgtctttgaactgaagtctactgggccccgcaaagtgggatactggaacgacatggacaagcttgttttaatacaagatgtccccacattgggcaacgacaccgccgccattgaaaaccgcaccgtcgtggtgaccaccattatggagtctccttatgttatgtacaagaagaaccacgagatgtttgaaggtaacgataagtatgaggggtactgcgtggatttggcttccgaaatcgctaaacacattggaataaaatacaaaatcgcaatcgttccagacgggaagtacggcgctcgcgacgcagacactaagatatggaatgggatggtgggcgaattggtctacggcaaggccgagatagctatcgcccctctcactatcactctcgttagagaggaggtgattgatttttccaagccattcatgagcttggggatcagcattatgatcaagaaaccacaaaaatctaaaccaggggtgttctccttcctcgaccccctcgcctacgagatctggatgtgcatcgtgttcgcctacattggtgtgtccgtggtgcttttccttgtgagtaggttctccccttacgagtggcataccgaagaacccgaagacggaaaggaaggcccatccgaccagccccccaatgaatttgggatttttaactcactctggttttccctcggggctttcatgcaacaggggtgtgacatatccccacgaagcttgtcaggacgcatcgtgggtggagtatggtggtttttcactctcattataatctcctcctacacagctaatttagctgcttttctgaccgtggagagaatggtctcccccattgaaagtgctgaggacctggcaaagcagaccgaaattgcttacggcaccctcgatagtggaagcacgaaggagtttttcaggcgcagcaaaatcgctgtttacgagaagatgtggacttacatgaggtctgccgaaccatccgtgttcacccggaccacggctgagggagttgcaagagtccgcaagtccaaggggaagttcgcattccttttggaatcaaccatgaacgaatatattgaacagcggaaaccttgtgatacgatgaaagtaggcggcaacttagacagcaaaggctatggagtcgctacgcccaagggatcaagtctgaggactcccgttaatctggccgtgctgaagttgagcgaggccggggtgctggataagcttaaaaacaaatggtggtacgacaaaggagaatgtgggcccaaagattcaggaagcaaagataagacatccgcccttagtctgtccaacgtcgctggggtcttttacatactcgttggcgggctagggctcgctatgctggtggcattgatcgaattctgctataagtctagggctgaggccaagcggatgaaactcacttttagcgaagctattaggaacaaggcccggctgtccatcacaggtagtgtcggcgagaatggaagagtgctcaccccggactgtcctaaggctgtgcatacaggtaccgcaattcggcaatcaagcggcctagccgtaatcgcctcagacctgccttag

SEQ ID NO: 189303 - DNA, 1302 bp, synthetic construct
  misc_feature 1..1302: note = Description of Artificial Sequence: Synthetic coding sequence
  source 1..1302: mol_type = other DNA
atgcggatcatcagccggcagatcgtgctgctgttcagcggcttctggggactagccatgggggcttttccttcatcagtccagattggtggcctgttcatccggaatacagatcaggaatacaccgcatttaggctagctatcttccttcataacaccagccccaatgccagcgaagccccattcaacttagtgccacacgtcgacaatatcgaaaccgccaactcctttgctgtgactaatgccttctgttcacagtactctcgaggcgtctttgccatatttggactgtacgataagagaagcgtgcatactttaactagcttctgcagtgccttgcacatctctcttattacaccctcatttccaacagagggtgagtctcagtttgtgctgcagttacggccctctctacgcggcgcccttctctccctcctcgatcattacgaatggaactgttttgtctttctttatgataccgaccgcggatactcgatcctgcaggccattatggagaaggctgggcagaatggatggcatgtttcagccatttgcgtagagaactttaacgatgtgtcgtatagacagctgctggaggagttggaccgcagacaggaaaagaagtttgtcattgactgtgagattgagcgcctgcagaatatcctagagcagattgtctccgtaggtaagcatgtgaaaggatatcactatatcattgcgaacctcggattcaaggacatctcactggagagattcattcatggaggtgctaatgtaactggtttccaacttgttgattttaacactccaatggtgatcaaattaatggaccggtggaagaaactggaccagagggaatacccaggaagcgaaacgcctcctaaatacacttcagctcttacatacgatggcgtcttggtgatggctgaaaccttccgcagcttgcgccgacaaaagattgacatctctaggaggggaaacgccggagattgcctggccaacccggcggcgccctgggggcagggcatcgacatggaacgcacactgaagcaggtacgaattcagggactgactgggaacgtgcagtttgatcattacggtcgccgcgtgaattatactatggacgtgttcgaactaaaaagtacgggcccacggaaggtgggctactggaacgatatggacaaactggttttgatccaggacgtgcctacacttggtaatgacactgccgcaattgaaaatagaacagttgtggttacgacaattatgcctctgatgaaaaacccgatcctgaggaattag

SEQ ID NO: 189304 - DNA, 2655 bp, synthetic construct
  misc_feature 1..2655: note = Description of Artificial Sequence: Synthetic coding sequence
  source 1..2655: mol_type = other DNA
atgcggatcatcagccggcagatcgtgctgctgttcagcggcttctggggcctcgccatgggggcatttccctcctctgtgcagatcggcggcctgtttattcgcaatactgaccaggaatacaccgcatttcggctggcaatctttctccataatacaagtcctaacgcgtccgaggcccccttcaacttggtgccccacgtcgataacattgaaaccgctaactctttcgccgtcactaatgctttttgttctcagtactctcgcggcgtatttgcaatatttggcctctacgacaaaaggtcagtccacacacttacctctttctgcagcgctcttcacatcagcctgattacaccgtcctttcctaccgagggtgaatcccagtttgtgcttcagctgaggccttccctcaggggagctttgctttcactgttggaccactatgaatggaattgctttgtattcctctacgataccgacagaggttactccatcctacaggccatcatggagaaggcaggacagaacggatggcatgtcagtgccatctgcgttgaaaactttaatgatgttagctacagacagctgcttgaagaactggatcgacgacaggaaaagaagtttgttatcgattgtgagattgaacgccttcagaacatccttgaacagatcgtctctgtggggaagcatgtgaaaggctaccactatatcattgctaatctcggatttaaggacatcagcctggagcgatttattcatgggggcgccaatgttaccggcttccaactcgtggattttaacacaccgatggtcatcaagctgatggatcgatggaaaaagcttgaccagcgtgagtatccggggagcgagacccctcccaagtatacctctgcgcttacatatgacggtgtcctcgttatggccgaaacatttcggtctcttcggcgccagaagattgatatcagtcgaaggggaaacgctggagattgcctggctaatccagctgctccttggggtcagggcattgacatggagaggactttgaagcaggtgcggatacagggcctcacaggcaacgtccagttcgatcattacggtcgccgggtcaactatacaatggatgtctttgaattgaagagcacaggacctagaaaggtgggttactggaacgatatggacaagctggtgctgattcaggacgtccctacccttggcaacgataccgccgctatcgaaaacagaaccgtcgtggtaaccactatcatggaaagcccatatgtcatgtataaaaagaatcatgagatgttcgagggcaacgataagtatgagggctactgtgtcgacctggctagcgagatcgctaagcacattggtatcaagtacaagatcgccatagtccccgacggcaaatacggcgcgcgcgatgccgacaccaagatctggaatggtatggtgggcgagctggtatacggcaaggctgaaatcgctatagcacccttaaccataacactggtgagggaagaggtaatcgatttttcaaagcctttcatgtctctggggatcagtataatgattaagaagccgcagaagtctaaaccaggcgtattcagctttttggaccctctcgcatatgaaatctggatgtgtattgtctttgcatacatcggggtaagcgttgtcctttttttggtgtccaggttctctccttacgagtggcacacagaagagccagaggacggcaaggagggaccctctgatcagccacctaacgagttcggtatcttcaatagcctgtggttcagcttgggcgccttcatgcagcagggatgtgatatcagtcccaggagcctgtcagggcgaatcgtggggggagtgtggtggttttttaccctgattattattagttcgtacacagctaatttagctgcatttctaacagtagagcgaatggtctcccccatcgaaagtgccgaggacctggcgaagcagactgagattgcctacggaacactggactccggcagtacgaaagagttctttcgcaggagcaaaattgccgtgtatgaaaagatgtggacctacatgcgcagtgccgaaccctctgtttttaccagaacgaccgccgaaggcgtagccagggtacgcaaatccaaaggcaaatttgcctttctgctggaaagcactatgaatgagtacattgagcaacggaaaccttgcgacacgatgaaagtagggggcaatctggatagcaagggctatggagtcgctaccccgaaaggctcaagcctgagaaatgctgtcaatctcgcggtgttgaagctgaacgagcaagggcttttggataagctgaaaaacaaatggtggtacgacaagggtgaatgtgggtccgggggcggggactccaaggataagacctctgcactgtcactctctaatgttgcaggcgtgttttacattcttgtgggcgggcttggcctggccatgctggttgccttaattgagttctgctataaaagccgagcagaggccaagagaatgaaggtggccaagagcgctcaaacattcaatcctaccagcagtcaaaacacacagaacctggcaacatatcgcgaaggctacaatgtctacggcactgaatctatcaaaatttag

SEQ ID NO: 189305 - DNA, 1302 bp, synthetic construct
  misc_feature 1..1302: note = Description of Artificial Sequence: Synthetic coding sequence
  source 1..1302: mol_type = other DNA
atgcggatcatcagccggcagatcgtgctgctgttcagcggcttctgggggctcgctatgggtgcctttcctagttcagtccaaattggcggactgttcattcgaaacaccgatcaggagtataccgccttccgcttggccatattcttgcacaatactagtccaaatgcctccgaagcgcccttcaatctagtccctcatgtggataacatagagacagccaatagctttgctgtgactaacgccttttgcagtcagtacagtcgaggtgtgtttgccatcttcggcctctacgacaagcggagcgtccatacactcacctccttttgctcagcattgcacatctccctgattaccccctctttcccaaccgagggtgagtcccaatttgtgctgcaattgaggccctcccttcgcggggctctgctgtctctgctggatcattacgagtggaactgcttcgtgttcctctacgacacagaccgcggctactccattctgcaggccattatggagaaggccggtcagaatggttggcacgtgtctgctatctgtgtcgaaaactttaatgatgtctcctataggcagctgcttgaggagctcgatcggagacaggaaaagaaatttgtgatcgactgtgagattgagcgcctgcagaacatactagagcagatagtcagtgtcgggaagcatgtcaagggatatcattatatcatcgccaatctgggcttcaaggatatcagtctggaaaggttcattcacggaggcgcaaatgtcactggtttccaactggtggactttaataccccaatggttattaagctcatggacaggtggaagaagctcgaccagcgcgaataccctggttccgaaacccctccgaaatacactagtgccctgacatacgacggggtgttagttatggcagagacgtttaggagcctccgtcgacaaaaaatcgacatctcccgtcgaggcaacgcgggcgattgtctcgccaatcctgccgccccttgggggcaggggatcgacatggagcgaaccctcaagcaagtacgaatccagggtttgaccggaaatgtgcaatttgatcactatgggcgcagggtgaattacaccatggatgtgtttgagctgaagtccaccggacctaggaaagtgggctattggaatgatatggataaactggtccttattcaggatgttccaaccctgggaaatgacaccgccgcgatcgagaatcgcacagtagtggtgaccactatcatgcccctgatgaagaatcccatcctgcgtaactag

SEQ ID NO: 189306 - DNA, 2655 bp, synthetic construct
  misc_feature 1..2655: note = Description of Artificial Sequence: Synthetic coding sequence
  source 1..2655: mol_type = other DNA
atgcggatcatcagccggcagatcgtgctgctgttcagcggcttctggggtctggcaatgggcgccttcccttcatctgtgcagatcggaggactgttcatacgcaacacagaccaggagtacacagccttcaggctcgctatcttcctacataacacctctccaaacgcgagcgaagctccttttaatttagtgccgcacgtcgacaacattgagacagcgaactccttcgctgtaaccaatgccttttgcagccaatactcccgaggcgtcttcgcaatcttcggcctgtacgacaaacggtccgtccacaccctcactagtttctgtagtgctttgcacatttcattaatcacaccctcttttccgacagagggcgagtcccagttcgtactccagttgcgcccgtcactacggggtgcgctgctgtctctgctggaccactatgagtggaattgctttgtctttctgtacgatacagaccgggggtactctatccttcaagctatcatggagaaagcgggccagaatggatggcatgtctcggccatttgtgtggagaactttaatgatgtgagctacagacaactattagaagaattggatcgccgtcaggagaaaaagtttgtgatcgactgcgagatcgagcgcctgcaaaatatactggagcagatcgtttccgttggcaaacacgtgaaaggctatcactacataatcgccaatctagggttcaaagatataagtctggaacggtttattcacgggggggctaatgtaactggatttcaactcgtggactttaacactcccatggtcattaagctgatggaccggtggaagaaactagatcagcgggagtatcctggctctgaaacaccccctaagtatacgtcagcgctgacctacgacggggttttggtcatggccgaaaccttcagatcattgagacgacagaaaattgacatttctcggcgcggaaatgcgggcgactgtctggcgaacccagctgccccatggggacaggggattgacatggagaggactctgaagcaggtgagaatccagggactgaccggtaacgtgcaattcgatcattacggaaggcgagtgaactatactatggacgtcttcgagctcaaatctacgggccctcgcaaagtcggctattggaatgacatggacaagcttgtgcttatccaagacgtcccaactcttgggaatgatacggccgcaatcgaaaacaggactgtggtcgtgacaaccattatggaatcaccctatgtgatgtataagaagaatcacgaaatgttcgaagggaacgacaagtatgaggggtactgcgtcgatctggcgtctgagatcgccaagcacatcggaatcaaatataagattgcgattgtcccagatggcaaatacggagcacgcgatgctgacaccaagatctggaatggcatggtgggtgagctcgtgtacggcaaggcggaaatagccatcgcgcctctcactataaccctggtgcgcgaagaggtgatcgatttttcaaagccattcatgagcctcgggatcagcataatgatcaagaagcctcagaaatctaagcctggggttttttccttcctggatccactcgcttacgagatatggatgtgcatcgtattcgcgtacattggggtttctgtggtactgttcctggtaagtcgcttttcaccatacgagtggcacaccgaggaaccggaggacggaaaagagggccctagcgatcagccgcccaatgaatttggcattttcaactcactgtggttctcactcggcgctttcatgcagcaagggtgcgacattagcccgagaagccttagtggtagaattgttggcggggtgtggtggttctttactttgatcatcatttccagctacacagctaacttagcagcctttttgaccgtggagaggatggtatctccaattgagagcgccgaggacctcgccaagcagacagagatcgcttatgggacactggactctggcagcacgaaggagttttttaggaggtcgaaaatcgctgtgtatgaaaaaatgtggacctatatgagaagtgcagagccatctgtctttacaagaactaccgccgagggggtggctcgggtccgcaagagcaaaggcaaatttgcgtttctcctggagagtactatgaacgaatacatcgagcagcggaagccttgcgatactatgaaagtcggcggaaatctggattctaagggttacggcgttgctacgcccaagggttcaagcctgagaaacgccgttaatctggccgtgctaaagttaaatgagcaaggccttctggataaactgaagaataaatggtggtatgataaaggcgaatgtggatcaggcggtggtgactccaaggataagacttctgcattatccctctctaacgtggccggcgtcttctatattctagttggaggcctcggcctcgctatgctcgtggctttgatagaattttgctataagagccgcgctgaagccaaaagaatgaaggttgcgaagtcagcccagacttttaatccgacatctagccaaaacactcagaatctggcgacatacagagaaggatacaacgtttacgggactgagtctatcaagatctag

SEQ ID NO: 189307 - DNA, 249 bp, synthetic construct
  misc_feature 1..249: note = Description of Artificial Sequence: Synthetic coding sequence
  source 1..249: mol_type = other DNA
atgcggatcatcagccggcagatcgtgctgctgttcagcggcttctggggactggcaatgggtgctttcccctctagtgttcagataggtggattattcatcaggaacactgaccaggagtacactgcctttcgactggccatatttctccataacacgagcccaaatgcaagcgaggcacccttcaatctcgtgccacacgtagacaacatagaaacagctaacagctttgctgtcactaatgcatag

SEQ ID NO: 189308 - DNA, 249 bp, synthetic construct
  misc_feature 1..249: note = Description of Artificial Sequence: Synthetic coding sequence
  source 1..249: mol_type = other DNA
atgcggatcatcagccggcagatcgtgctgctgttcagcggcttctggggcctcgctatgggagcgtttcccagttctgtgcagattggcggcctattcatccgcaataccgatcaggaatatacggcctttcgactagcaattttcttacacaacacttccccgaatgctagcgaggccccctttaatctggtgccacacgtcgacaatatcgagactgctaacagctttgcagtcactaacgcctag

SEQ ID NO: 189309 - DNA, 2709 bp, synthetic construct
  misc_feature 1..2709: note = Description of Artificial Sequence: Synthetic coding sequence
  source 1..2709: mol_type = other DNA
atgcggatcatcagccggcagatcgtgctgctgttcagcggcttctggggacttgccatgggcgctttccccagctcagtacagattggcggcctgttcattcgcaatactgaccaagagtacacagcctttaggctggccatattcttacataacacctctccaaacgcgagcgaggctccattcaacttggtgccacatgtggacaacatcgaaaccgcgaacagctttgccgtcactaatgccttttgctcccagtactccagaggggtcttcgccatattcgggctgtacgacaaacgctctgtgcacaccttaacgtctttttgctctgcattacatatcagcctcattactccatcgtttcctacggaaggagaatctcagtttgtcctgcagctccggccttcactacgtggcgcacttctcagcctcctggaccactacgaatggaactgttttgtttttctctacgacacagaccggggatactcaatcttgcaggcgataatggaaaaggctggtcaaaacggctggcacgtttccgctatttgcgttgaaaatttcaatgatgtgagttatcggcagctgctggaagagttagatagaaggcaagagaagaaattcgtaattgattgcgagattgaacgcctccaaaatatactcgagcagatcgtgtccgtaggcaagcacgttaaaggataccattacatcatagccaacctagggtttaaagatatctcccttgagcgctttattcacgggggggccaatgtgacgggattccaactggtcgacttcaacactccgatggtcatcaagctgatggatcgatggaagaagttggatcagagagagtatcctggtagcgagacaccccccaagtatacctccgcgctaacatacgacggtgtcctcgtcatggcagaaacctttcggtccctccgtaggcagaagatcgatatctcgcgccgcggaaacgcaggggattgtctcgcgaaccctgccgccccatgggggcagggcattgatatggaacgtaccctaaaacaagttaggatccagggcctcacaggaaatgtgcaattcgaccattatggacgcagggtgaattacaccatggatgtgtttgaactgaagtcgacgggcccgcggaaagtaggatactggaatgatatggataaactcgtgctcattcaggacgtgcccacccttgggaacgacacagcagctatagagaatcggactgtggtcgttaccacaatcatggagtccccctacgtaatgtacaagaagaatcacgagatgttcgagggcaacgacaagtatgagggatactgtgtggacttggcttcagaaatagctaaacacatcggcattaagtataagatcgccatcgtgccagatgggaagtacggtgctagagatgcagatactaagatctggaacggcatggtcggcgaattggtgtatggtaaagctgagatcgccattgcgcctctgaccattacccttgtgcgcgaagaagtgattgactttagtaagccttttatgtcgctgggcatctcaattatgatcaagaagcctcagaaatccaagccgggagttttcagcttcttggaccctcttgcttacgaaatctggatgtgcattgtcttcgcctatatcggggttagcgtggtgctttttcttgtgagtcggttttcgccatatgaatggcacacggaggaacccgaagacggaaaagaaggcccgtcagatcagcctcccaacgaatttggcatcttcaattctctgtggttcagcctgggagcctttatgcagcagggctgcgatatttccccccgtagcctgtctggaagaattgtgggcggtgtctggtggtttttcaccctcatcatcatcagcagttataccgccaatctggccgcatttttgaccgtagaaagaatggtgagtccaatcgaatcagccgaagatttagccaagcagacagagatcgcatatggaactctggactcagggtctacaaaagagtttttcagacgcagtaagattgccgtgtacgaaaaaatgtggacttacatgcggtctgccgaaccgagcgtgttcaccaggaccacagccgaaggggtggcgagagttcgaaagtccaaaggcaaattcgcattcctcctggaatccaccatgaatgaatatattgagcagcgcaagccttgtgatacaatgaaggtgggcggcaacttggactccaagggttacggcgtcgccacaccgaagggcagtagtctgaggacgcctgttaacctcgcagttctcaagctctcggaggccggcgtgctggataagttgaaaaacaagtggtggtacgataaaggggagtgcggtcctaaagactctgggtcaaaggataaaactagcgctcttagtctttcaaatgttgccggggtattctacatactggtgggtggcctcgggctagcaatgctggtggcccttatagaattttgctataagagcagggcggaggcgaaacgaatgaagcttacattttcggaggccatcaggaataaggcacggttgtcgattaccggatcagtgggtgagaacggtagagtcctgacgcccgactgcccgaaggcagtccatactggcaccgccatcagacaaagttcaggcctcgctgtcatcgcatctgatctcccatag

SEQ ID NO: 189310 - DNA, 360 bp, synthetic construct
  misc_feature 1..360: note = Description of Artificial Sequence: Synthetic coding sequence
  source 1..360: mol_type = other DNA
atgcggagcgccgagcccagcgtgttcacccggaccaccgccgagggtgtggctcgcgtgcgcaaatctaaaggcaaattcgcttttttgctggaatcaacaatgaatgagtacattgagcagcgcaagccctgtgatacgatgaaagtgggaggaaacctggactctaaagggtatggggtcgccactcccaagggctcgagcctccggaacgccgtcaacctggcagtgctgaagctaaacgagcagggactactcgacaaattaaagaacaagtggtggtacgacaaaggagagtgcggatctgggggaggcgacagtaagaatagttgtaagccctgcagatttgaaactcagtag

SEQ ID NO: 189311 - DNA, 2721 bp, synthetic construct
  misc_feature 1..2721: note = Description of Artificial Sequence: Synthetic coding sequence
  source 1..2721: mol_type = other DNA
atgcagcacatcttcgccttcttctgcaccggcttcctgggcgccgtcgtcggagccaacttccccaataacatccaaattggtggcctgtttcctaaccagcaatcacaggagcatgccgcttttcggtttgcactctcccagcttactgagccgccaaaacttctgccccagatcgatatcgtgaatatctccgatagcttcgaaatgacttatcgattctgcagtcagttctctaaaggcgtttatgccatctttggcttttatgagagaaggacagtgaatatgctcacgagcttctgtggggcacttcacgtctgcttcatcacacccagcttcccagtcgacacaagcaatcagttcgtgttacagttgaggcctgaacttcaggacgccctcatttcaattatagatcattacaaatggcaaaaatttgtctatatctatgatgccgatagaggactgagtgtgctgcagaaggttttagacaccgctgctgaaaagaactggcaggttacagcggtgaacattctgaccactactgaggaggggtacaggatgctcttccaggacctggaaaaaaagaaagaacgccttgtggtcgtcgattgtgaaagcgagaggttaaatgccatacttggacaaatcattaaattagaaaaaaatggaattggatatcattatatattggcaaatctgggctttatggatattgatctgaacaagttcaaggagtctggcgcgaatgtcacaggcttccagctagtgaattatacagacacgatacctgccaagatcatgcaacagtggaagaactcagacgcccgcgaccatacccgcgtggactggaagcgccccaaatacaccagtgctcttacctatgatggcgtgaaggtgatggctgaggctttccaatcactccggcgccagcggatcgacatctcccgccggggtaatgctggggattgtctggctaaccccgcagtgccctggggccagggaattgacatccagagagcgttacagcaggtgcggtttgaagggcttacaggaaatgttcagtttaacgaaaagggcagaaggacaaactataccttgcatgtcatcgagatgaagcatgatggaatcagaaagatcggctattggaacgaggacgacaaattcgttcccgccgcgacggatgcccaggcaggaggcgacaattcaagtgtgcagaatcgcacctacattgtgacaaccatcctggaagatccttacgtgatgctcaagaagaacgcgaatcaattcgagggaaatgaccggtatgagggctactgcgtagagctcgcggcagaaattgcaaagcacgttggctattcttacagactggaaatagtttcagatgggaaatacggagctcgcgacccagacactaaggcttggaatggaatggtcggagaactggtctatgggcgcgctgatgtcgctgtcgcgccgttgactattaccctggtgcgagaggaggtcattgatttctctaaacccttcatgagtctgggcatcagtataatgattaagaagccccaaaagtccaagcccggcgttttttccttcctggatccactggcttatgagatctggatgtgtattgttttcgcgtacattggcgtcagcgttgtccttttcctcgtgtcccgttttagcccttacgaatggcacagtgaggagtttgaagagggaagggatcagacaacaagcgatcagagtaatgaattcggcattttcaattccctctggtttagtctcggcgcttttatgcaacagggctgcgacataagtcctcggtccctgagcggtagaatagtaggaggagtgtggtggttcttcactttaataatcatttcctcctatactgcgaaccttgctgcattccttaccgtcgagcgaatggtctcaccaattgagtctgcagaggacctcgcgaagcaaaccgaaattgcctatggcacgctggaggccggcagcacaaaggaatttttccgcagatcaaagattgcggtgtttgagaagatgtggacctatatgaagagcgccgagccaagcgttttcgtacgtaccacagaagaaggtatgataagggttagaaaatcaaaaggcaaatacgcatacctgctagaaagcactatgaatgagtacattgagcagagaaagccctgtgacaccatgaaggttggcgggaacctggattccaaagggtacggaattgccacccccaaagggagcgccctgagaaaccccgtgaacctggccgtactgaagttgaatgagcaaggccttcttgacaagctgaagaacaagtggtggtatgacaaaggggagtgcggctctggtggcggggactccaaagacaagacctcagccttgtctctgtctaacgtggcaggagttttctatatcctgattggaggcctgggcctggctatgctcgtcgcattgatagagttttgctacaagtcaaggagtgagtctaagcggatgaagggcttctgtctcattcctcagcagagtatcaatgaagcaattcgcacctccactcttccaagaaactccggcgccggggctagcagtggtggttcaggcgaaaatgggcgcgtggtgtcccacgattttccgaagtcaatgcagtcgatcccttgtatgtctcatagcagcggtatgcctttaggggctacaggcctgtag

SEQ ID NO: 189312 - DNA, 2721 bp, synthetic construct
  misc_feature 1..2721: note = Description of Artificial Sequence: Synthetic coding sequence
  source 1..2721: mol_type = other DNA
atgcagcacatcttcgccttcttctgcaccggcttcctgggcgccgtcgtaggcgcaaatttccctaacaatattcaaatcggtggcctgtttccaaaccagcagtcacaggagcacgcggcgtttcgtttcgctttgagccagctcactgagcccccgaaattattgccccagatcgatatagttaacatctctgacagctttgagatgacataccgtttttgtagtcaattctctaagggggtttatgcaatcttcgggttttatgagcgacgcacagtgaacatgctcaccagtttctgcggtgctctgcatgtttgcttcatcactccttcatttcctgtcgacacatcgaaccagttcgtgctgcagctcaggcctgaactgcaggatgctctcatcagcattatcgaccattacaagtggcagaaatttgtctatatctatgatgcagataggggcctgagcgttctacagaaggtgctggacaccgccgccgagaagaattggcaggtaacagctgtcaatatacttacgactaccgaggaggggtatcggatgctgttccaagacctcgaaaagaaaaaagaacgcctcgtggtcgtcgactgtgagtctgaacgcctaaacgctattctggggcaaattattaaattggaaaaaaatggcatagggtatcactatatccttgcaaatctaggctttatggacatagacttgaacaagtttaaggagtcaggggcaaatgtgaccggctttcaactcgttaactacaccgacaccattcctgcaaagatcatgcagcagtggaagaattcagacgcacgagaccatactcgcgtcgattggaagagaccaaaatacacgtcagctttgacatacgatggggttaaagttatggcagaggcattccaatcactgagacgacagcggattgacatctcacgcaggggcaacgctggagattgcctggctaatccagcagtgccttggggacagggcatcgacattcagcgcgcgctccaacaagttaggtttgaagggctgactggtaacgtccagttcaacgagaaagggagacgcaccaactataccctgcatgtgatcgagatgaagcacgacgggatcaggaagatcggctactggaatgaagacgacaaattcgtgccagccgccactgacgcccaggccgggggagacaactccagtgtccagaatagaacttacatagtcaccacaatcctcgaggacccatatgtgatgctgaagaagaacgccaaccagtttgagggaaacgaccgctatgagggatattgcgtagaactggccgccgagattgcaaaacacgtaggatacagctaccgtctggaaatagtgtccgatgggaagtatggtgctcgggatcccgacactaaagcgtggaacggcatggttggagagctcgtgtatggccgagcagatgttgccgtggcccccctcacaatcacactcgtgcgcgaggaggtaatcgatttctccaagccattcatgagtctgggcatctctatcatgatcaaaaagccccagaaatcaaagcccggggtgttctcatttctggacccgctggcttatgaaatttggatgtgtattgtctttgcatacattggcgtcagtgtagtgctgtttttagtttcacgctttagtccttacgaatggcattcggaagagtttgaagaagggagggatcaaaccactagcgatcagtctaatgagttcggaatcttcaacagtctctggtttagtttaggggcatttatgcagcaagggtgcgatatatcgccacgaagtctgtctggaagaatcgtgggaggtgtctggtggttctttacactgatcattatttcgagctacaccgcaaacttggctgcatttctaaccgtggaacggatggtctcgcccatcgagtccgctgaagacctcgccaagcagaccgagatcgcctacggtaccctggaggcaggttctacgaaggaattcttcaggaggtctaagatagcagtctttgagaaaatgtggacgtacatgaaaagtgccgagcccagcgtgttcgtgcggactactgaagaagggatgattcgcgtgcgaaaatccaaaggcaaatacgcttatctgctggagagtactatgaatgagtacattgagcagaggaaaccctgcgatacaatgaaggtcggaggcaacctggatagcaaaggctacgggatcgctaccccgaagggttccgccctccggggacctgtgaacctggctgtgcttaagctgagcgaacagggggtccttgataaactgaaaagcaagtggtggtacgacaaaggcgaatgcggctctaaggactccggctcaaaggacaagacatccgctctcagtttgagtaacgtggccggggtgttttatatcctgatcggcgggctgggcctcgcaatgcttgttgccctgatcgagttttgctacaagagcagaagcgaatccaagaggatgaagggtttttgcctgattccacagcagtcaattaacgaagccatccgcacgagcacactccctcgaaattccggcgccggggcctcctcaggcgggtcgggcgagaatggccgagtcgtctcacacgattttcccaaatccatgcaatccattccctgcatgtcgcactcgtcaggtatgccactgggcgccacaggcttgtag

SEQ ID NO: 189313 - DNA, 2751 bp, synthetic construct
  misc_feature 1..2751: note = Description of Artificial Sequence: Synthetic coding sequence
  source 1..2751: mol_type = other DNA
atgtgctgcagcacccacctgttccagcccctgcagctggccggcggcctggagtggccctggtcgaatctgctgtgctttcttacacccgttaagctgcatcctgaggtctgggggttatttcctaatcaacagagtcaggagcatgcggcgtttcgctttgcactgtcgcaacttactgagccccccaagctcctaccccagatcgacatcgtgaacatcagcgacagcttcgaaatgacttaccggttctgttcccagtttagcaagggcgtgtatgcaatctttggcttttatgaacggcgcactgtcaacatgctgactagtttctgtggggccctgcacgtctgttttatcacaccaagcttccctgttgatacttccaatcagttcgttctccaactgaggcctgaactgcaggatgctctgatctccattattgaccactacaaatggcaaaagttcgtatacatctatgacgccgacagaggtctgtccgttctccaaaaagttctggatactgcagcggaaaaaaattggcaagtcacagccgtcaacattctgacaacgacggaggagggatacaggatgctcttccaggacttggagaaaaaaaaggagaggctggttgtcgtggattgcgagagcgagagactgaacgctatcctgggccaaattattaaattagaaaaaaacggtatcggttaccactatattctggcaaacctgggattcatggacatcgatttgaacaagttcaaagaaagcggggccaatgtgaccggattccaactggtaaactataccgacacaattcccgccaagatcatgcagcagtggaagaacagtgacgccagggaccacacacgtgtggactggaagagacccaaatatacatctgcccttacgtatgacggagttaaagtgatggcagaggccttccagtctctacggcgccagagaattgacatatcccgacgcggcaacgccggtgattgcttagcgaaccccgccgtgccatgggggcagggcatcgatatccagagagctttacagcaggtgcgctttgaaggactgacaggcaatgtccaatttaatgaaaaaggacgccggacaaactacacactccatgtgattgagatgaaacacgacggtatccgcaagataggctactggaacgaagatgacaaattcgtgcccgcagccaccgatgctcaggccgggggtgataatagcagcgtgcagaatcgcacttacatagttactactatcttggaggatccttacgtgatgctgaaaaagaatgcaaaccaatttgagggcaatgataggtatgagggctattgtgtggagctggcagccgagatagcgaagcacgtgggctattcataccgacttgagattgtgagtgacggaaagtacggcgcacgggaccccgataccaaggcctggaacggaatggtcggggagctggtgtacggccgggcggacgtggccgttgcacctctcacgattactctggtgcgcgaggaagtgatcgacttctccaaaccatttatgtccctaggaatctcgatcatgatcaaaaagccacagaagagtaagccaggagtctttagcttcttggacccgctcgcctatgagatctggatgtgcattgtcttcgcctacataggtgtgagtgtggttctgtttttggtcagccgcttttctccgtacgagtggcactccgaggagtttgaagagggaagggatcagacaactagcgatcaatctaacgagtttgggattttcaattccctgtggttttctctgggcgcctttatgcagcaggggtgcgatattagcccacgatccttatcggggcgaatcgtcggtggcgtctggtggttctttaccctgatcatcatttcttcatacacagcaaacctggcggcattccttacggtcgagagaatggtcagccccatcgaaagtgctgaagacttggcgaaacaaactgaaatcgcatacggcacgctcgaggcaggttcaaccaaggaattcttccgcaggtccaaaatcgctgtgttcgagaagatgtggacctatatgaagtccgctgagcccagcgtcttcgtgagaaccaccgaggaggggatgatacgcgtgagaaagtcaaaaggaaagtacgcttatcttctcgaatccacaatgaatgaatatattgaacagagaaagccatgcgacacaatgaaggtgggtggaaatctggactccaaggggtacggcattgctacccccaaaggatcagctctgcgcgggcctgtcaatctggctgtgttgaagctgtctgagcagggagtgctggacaaactgaagtcaaaatggtggtatgataaaggggaatgtggctcaaaggactctggctcaaaagataaaacctcagccctctcattaagcaatgtggcaggtgtattctacattctgattggagggctggggcttgccatgctggtcgctctaatagaattttgctacaagagccgatcagaatcaaaacgcatgaaggggttttgcctcatccctcagcagtctataaatgaggcaatccgaaccagcaccctgcccagaaacagcggcgctggcgcgagctccggcggctccggtgagaacggcagggtggtttcccatgatttccccaaatccatgcagagcattccctgcatgtctcatagctccggaatgcctctcggggctacaggcctttag

SEQ ID NO: 189314 - DNA, 2481 bp, synthetic construct
  misc_feature 1..2481: note = Description of Artificial Sequence: Synthetic coding sequence
  source 1..2481: mol_type = other DNA
atgcagcacatcttcgccttcttctgcaccggcttcctgggcgccgttgtgggagccaatttcccaaataatatccagataggtgggctctttccaaaccagcagagccaggagcatgccgcatttcgattcgcgctatcccagctcacagaacctcctaagcttttgcctcagatcgatattgtcaacatttctgactctttcgaaatgacctatagatgcttatcagtgctgcaaaaggtgctagacaccgctgccgagaaaaattggcaggtgactgccgtgaatatcctgactaccaccgaggagggctataggatgttgtttcaggacttggaaaagaagaaggagagattggtcgtggtcgactgtgagagcgaacggttaaatgcgattcttggccaaatcatcaagctggaaaaaaatgggatcgggtatcactacatactggccaatctgggattcatggacattgatcttaataaattcaaggagtctggggcaaatgtgaccgggttccagctggtgaactacactgacactattcccgctaaaatcatgcagcaatggaagaactctgacgcccgagaccacactagagtggattggaagagaccaaaatacacatcagcccttacttacgatggggtaaaggtgatggcagaggcattccagagtctcaggcgccagcggattgatattagccgccgcggcaacgcgggggattgcttggctaaccctgcagtcccttggggccagggtatcgatatccaacgtgcgctgcaacaggtccgctttgagggactcaccgggaatgtccagtttaatgaaaagggtcggcgaactaactacacactgcatgtaattgagatgaagcacgatgggattcgcaaaataggatactggaacgaggacgataaattcgtgcccgccgcgaccgatgctcaggcgggtggcgataattcctcggtgcagaatcgtacctatatcgtgacgactatcctggaggacccctatgttatgctgaaaaagaatgccaatcaatttgagggaaatgaccggtacgagggttattgcgtggaattagcggccgagatcgccaaacacgtggggtattcttacaggctggaaatcgtcagcgatggaaaatatggtgcacgggaccccgacacaaaggcttggaatggaatggtaggggagctggtgtatggtcgagccgacgtggccgtagcgccactgactatcaccctggtgagagaagaggtgatagactttagtaaacccttcatgagcctgggcatcagcataatgattaaaaaaccacagaagagcaagcccggcgtctttagtttccttgatcctctcgcttacgagatctggatgtgcatagtgtttgcttacatcggagtttctgttgtgctgttcttagtgtcgcggttttctccttacgagtggcactctgaagaattcgaggagggccgcgaccagacaactagcgaccagtctaacgaattcggtatcttcaattcactgtggttttctctgggggcatttatgcagcaaggctgcgatatcagccccagatccctttctggcaggatcgttggaggtgtctggtggttcttcactttgataatcatatcgagttatactgccaacttggcagcgttcctcaccgtggaacgcatggtttccccgatcgaaagcgcagaggatctggcaaagcagactgaaattgcgtatggaacgctggaagctgggagcacaaaagagttttttcggagatccaagatcgccgtgtttgaaaaaatgtggacttatatgaaatctgctgagcccagcgttttcgtacggacaacagaagaaggcatgatacgggttagaaagtctaaagggaagtacgcctatctactggagagtaccatgaatgagtacatcgagcaacggaagccctgtgatacaatgaaggtgggtggcaatcttgattctaagggctacgggatcgccacgcccaagggcagcgctctgcgcaaccctgtcaatttggccgtgctgaaacttaacgaacagggccttctcgataagctgaagaataagtggtggtacgataaaggggagtgcggatcaggaggcggcgatagcaaagataaaacctcagcactgtctctcagcaacgttgcaggcgtcttttatatattgattggcggcctcgggcttgcaatgttggtcgcattgatcgaattctgttataaatctcgctccgagagcaaacgaatgaagggattctgcctgatacctcagcagtcgatcaatgaggcgattagaacctccacactgcctcgtaattctggcgccggggcatctagtggtgggtccggagaaaatggcagggtagtatcccacgatttcccgaagtccatgcagtccattccatgtatgagtcactctagtggcatgccactcggcgcaactgggctttag

SEQ ID NO: 189315 - DNA, 2751 bp, synthetic construct
  misc_feature 1..2751: note = Description of Artificial Sequence: Synthetic coding sequence
  source 1..2751: mol_type = other DNA
atgtgctgcagcacccacctgttccagcccctgcagctggccggcggccttgagtggccatggtcaaatttactttgtttccttaccccagtaaagttgcacccagaggtgtgggggctgttccctaaccaacagagccaggagcatgcagcattccgattcgctctctcccagctgactgaacctcccaagctgctgccccaaatagacattgtcaatatcagcgacagcttcgagatgacctatcgattttgcagccagttttccaagggagtctacgccatctttgggttctacgagaggagaaccgtgaacatgctgaccagcttttgcggggcacttcacgtctgtttcatcacgccttcgtttcctgtcgatacatcaaatcagttcgtcctgcagcttcgacctgagctgcaagatgctttaatttctattatcgaccactataagtggcagaagtttgtctatatctatgatgccgaccgtggcttaagtgtgctgcagaaagtactagacacggccgcggaaaagaactggcaggtaaccgccgtaaacattctcacaacaacagaggaggggtaccgaatgctcttccaggatcttgagaagaagaaggagaggttagtggtagttgactgcgagtccgaaaggctgaatgcaattctgggccaaatcatcaagttggaaaaaaacggaattggatatcactacatcttggccaacctgggcttcatggatatagacctgaataaattcaaggagtccggcgccaacgtgacagggtttcagctcgttaattataccgacacaatccctgccaagataatgcagcagtggaagaatagcgacgcccgggatcatactcgcgttgattggaagcggcccaaatacacctccgctctgacctatgatggcgtcaaggttatggccgaggctttccagagcctcagaaggcagcggattgacatctcccggaggggaaacgcaggggactgcctggccaacccagccgtgccatggggccaagggatcgatatccagcgcgccctgcagcaggtaaggttcgaaggtctgactgggaatgtccagttcaatgaaaagggcaggcgcactaactacactctgcatgtcatagagatgaagcatgacggaatacggaagatcggctattggaatgaagacgataaatttgtgccagctgccacagatgctcaggccggcggagacaactcatccgtgcagaatcgaacttacatagtgaccactattctggaagatccctacgttatgttgaagaagaacgctaatcaatttgagggaaatgatcgatacgaaggttactgcgtggagcttgctgcggaaatcgcgaagcatgtgggatatagctacaggctggagatcgtttccgatgggaagtatggggcacgcgacccagatacaaaagcatggaacggcatggttggagagctggtctatggtcgggccgatgtcgccgttgctccgctgacgatcaccctcgttcgggaggaagtaatagatttctctaaaccttttatgagcttgggcatctcaataatgataaagaagcctcagaaaagtaagccaggagttttttctttcctggaccccctagcttatgagatttggatgtgcatcgttttcgcctatataggggtgagtgttgtcctcttcttagtttcacggttttcgccatacgagtggcacagcgaggagtttgaggaaggcagagaccagacaactagtgaccagtccaatgagttcggaatctttaactcactgtggttttcactgggcgcctttatgcagcaaggctgcgacatctccccccggtcccttagcgggcgaatcgtgggtggggtatggtggttcttcacgttgatcatcatcagctcatatacggctaatctcgcggctttccttacggtggaaagaatggtgtcaccaattgagagcgcagaagacctggcaaagcaaaccgaaatcgcttacggcactctggaggctgggagtaccaaagagtttttccggagaagtaaaatcgccgtgtttgagaagatgtggacctatatgaagtccgcagagccttcagtgttcgtgagaactaccgaagaggggatgataagagttcgtaaaagtaagggtaaatacgcctaccttctggaatccacaatgaacgagtacatcgagcagaggaagccctgcgacacaatgaaggtgggtggaaatctggatagcaagggctacggaatcgcaacacctaagggcagcgccctgagaaaccccgtgaatctcgccgttctgaagctcaacgagcaaggactgctggataaactcaaaaataagtggtggtatgacaaaggtgagtgtggtagcggaggtggggactcgaaagataaaactagtgccctctctctgagcaacgtagctggagttttctatatccttataggcggactaggcttggccatgcttgtggcactcattgagttctgctacaaatctagatctgagagcaaacgcatgaagggattttgtcttatcccccaacagtccattaacgaggccataaggaccagtaccctgccgagaaactcaggtgccggcgcatcttccggtggttccggagaaaatggtagggtggtgtcccatgatttccccaagtccatgcagtcaattccttgtatgagccatagttcagggatgcccctgggcgcaacaggtctgtag

SEQ ID NO: 189316 - DNA, 2151 bp, synthetic construct
  misc_feature 1..2151: note = Description of Artificial Sequence: Synthetic coding sequence
  source 1..2151: mol_type = other DNA
atgcagcacatcttcgccttcttctgcaccggcttcctgggcgccgttgtcggcgcgaacttcccaaacaatatccagatcgtgtgctcacagttctcaaagggagtgtacgctatcttcggcttttacgagcgaaggactgtcaacatgttaacatctttttgcggcgcgctgcacgtttgctttattaccccttcctttcccgtggatacttcaaatcagttcgttcttcagctgaggcctgagttgcaggatgcacttattagcatcatcgatcattacaaatggcaaaagtttgtgtacatctacgacgccgatcgcggactaagcgtcttacagaaagttctcgacactgcagccgagaagaattggcaggttaccgcagtgaacatcttgaccacgaccgaggaaggttaccgcatgctgttccaggatctggaaaagaagaaagaacgcctggtagtggtggactgcgaatcagaacgcctgaatgcgattctcggtcagatcattaagcttgagaagaatggcattggctaccactacatcctggctaatctgggctttatggatattgatctgaacaaatttaaggagagcggggccaacgtgaccggttttcagctggttaactacacagacactatcccagcaaaaatcatgcagcagtggaagaatagcgatgcgagggatcataccagggtagattggaagcggcctaagtatacttccgctctgacctatgacggtgtcaaggtcatggccgaagcgtttcagtcgctgcggagacagaggattgatatttcaagacggggcaatgccggtgattgcctggccaatcctgctgtgccgtggggacagggcatcgatattcagcgtgcactccagcaggtgcgctttgaaggcctaactggtaatgtgcaatttaacgaaaaaggcagacgaacaaactacactcttcacgtcatagagatgaagcacgatggcatccgaaagattggctactggaatgaagatgacaagttcgtccccgccgctacagatgcacaggcgggtggcgataatagcagtgttcagaatcggacatatatcgttacaacaatactggaagacccatatgtcatgcttaagaagaacgcaaatcagtttgaaggcaacgaccgttatgaaggatactgtgttgaactagccgcagaaatcgctaaacatgtgggctacagctacagacttgagatcgtttccgacggaaagtatggtgcacgggatcctgatacgaaagcgtggaatgggatggttggtgaattggtatatggacgagctgatgtagcagtcgcccctctcactattaccctagtcagggaggaggtgattgattttagcaaaccctttatgagcctgggcatttccatcatgataaaaaagccacagaagtcaaagcccggcgtcttttcctttctcgatccattggcgtacgaaatttggatgtgcatcgtgtttgcctatattggcgttagtgtagtgctgttcctcgttagccgcttttccccttatgagtggcactctgaggaattcgaagagggtcgggaccagactacgagtgaccagtccaatgagttcggcatctttaattccttgtggttctccctgggcgcctttatgcagcaaggatgtgatatcagcccacgatcgctgagtggccggatcgttggaggagtgtggtggtttttcaccctgattattatctcgtcttacaccgccaatctggctgctttccttacagtcgagagaatggtttctcccatcgagagcgcagaagatctggccaaacagacagagatagcctatggtacgcttgaggcgggttcaacgaaggagttcttccgtagatcaaagattgctgtgtttgagaaaatgtggacatacatgaaaagtgccgaaccttccgtgtttgtcaggaccactgaagaaggtatgattcgggtccgcaagtccaaaggcaagtatgcctacctgctcgaatcaactatgaatgagtacatagaacagaggaaaccctgcgacactatgaaggtaggaggcaatcttgattcaaaagggtacgggatcgcgacaccaaaaggctccgccctccgaactcgacaggctttgtag

SEQ ID NO: 189317 - DNA, 2721 bp, synthetic construct
  misc_feature 1..2721: note = Description of Artificial Sequence: Synthetic coding sequence
  source 1..2721: mol_type = other DNA
atgcagcacatcttcgccttcttctgcaccggcttcctgggcgccgtcgtgggagctaacttcccaaacaacatccagatcggcggcctgtttccgaaccagcagtctcaggagcatgctgcatttaggttcgccctgtctcagctaactgagcctcctaaactgcttcctcagattgatatcgtcaacataagcgacagcttcgagatgacatatagattttgcagccagttcagtaagggggtctacgctattttcggattctatgagagacgcaccgtgaacatgttgacctcattctgcggtgctctgcacgtgtgctttatcacgccttcctttcccgtggacacctcaaaccagtttgtgctgcagctgaggccggagctgcaagatgcgctgattagcatcatcgatcactacaaatggcagaagtttgtttatatctatgacgccgatcggggcctttccgttctccagaaagtcctcgacaccgcagcggagaaaaactggcaagtgaccgccgtgaacattctgacaactactgaggaaggctatcgtatgctcttccaagacctggaaaagaaaaaagaacgattagtcgtcgtagactgtgaatccgagaggctgaacgccatactcggccagatcatcaagctagagaaaaatggcataggttaccactatattttagcaaatctgggattcatggatatcgacctcaacaagttcaaagagagtggcgccaacgtcacggggttccagctggttaactacaccgacaccattcctgctaagataatgcaacagtggaagaattctgacgcccgagaccacacgagagttgactggaaaaggcccaagtatacctcggccctgacgtatgatggagtgaaggtgatggccgaagcctttcagagcctgagacggcaacgcatcgacatctccagaagagggaacgctggtgattgtttggccaatcccgccgtcccctggggccaggggatcgacatccagagagccctgcagcaggtgaggttcgagggccttaccggcaatgtacagttcaatgaaaagggtcgccgcaccaattataccttgcatgttattgagatgaagcacgatggaattcgcaagataggctattggaacgaggatgacaagttcgtgccagctgctactgacgcgcaggccggcggggacaattccagcgtgcagaaccgaacttatatcgttacaacaatcctcgaggacccatacgtcatgctgaaaaaaaacgccaaccagttcgagggtaacgataggtatgagggttactgcgtggagctcgccgcggagatagccaaacatgtcggctacagttacagactggaaatagtgtccgatgggaagtacggagcacgggatcctgacactaaagcctggaacggcatggtgggtgaattggtttacggccgggccgatgtggctgtagctcccctcacaataacattagtaagagaggaagtcattgacttttcaaagccttttatgtccctgggcatctcaatcatgattaagaaaccacagaagtccaaacctggtgtcttctctttcttggacccgctggcatacgaaatttggatgtgtattgtgttcgcatacataggcgttagtgtggtgctctttttggtctcaagattcagtccttatgaatggcatagtgaggagtttgaggagggcagggaccagactacctcagaccagagtaacgaatttggcatttttaactccttatggttctcacttggggcattcatgcagcagggctgcgatattagcccgaggtcattgtctggccgcatagtgggaggcgtctggtggttcttcaccttaataatcatttcctcatatactgcaaatctggcggcgttcttgactgtggagcgtatggtctctccaatagaaagtgcagaggatctcgcaaagcagacagagattgcatacgggactctcgaagccggatcgaccaaggaattcttccgccgttcaaagattgccgtgtttgagaagatgtggacctacatgaagagcgcagagcccagcgtcttcgtccgcaccacagaagaggggatgattagggtgcgaaaatcgaagggtaagtacgcttacttgctggagtctacaatgaatgagtacattgagcagcgtaagccgtgcgacactatgaaagtgggcggcaatctcgattcaaaggggtatgggatcgctacacctaagggatccgccctgcggggtcccgtaaatttggccgttttgaagctgtcagaacaaggggttctggataaactaaagtctaaatggtggtacgataagggcgagtgcggctcgaaggacagtggttcaaaggacaagacctccgcactatctctgtcgaatgtggccggggtattctatattctcatcggaggacttggcttggctatgctcgtggcccttattgagttctgctataaatcacgctctgagagtaagcgaatgaagggcttttgtctgattccacagcagtctattaatgaagccattcgcacatctacactgcctaggaattcaggcgcaggcgcctcaagcggtggctccggtgaaaacggaagggttgtttcgcacgacttccccaaatcaatgcagagcattccatgtatgtctcattccagtggtatgccactcggagccaccggtttgtag

SEQ ID NO: 189318 - DNA, 2514 bp, synthetic construct
  misc_feature 1..2514: note = Description of Artificial Sequence: Synthetic coding sequence
  source 1..2514: mol_type = other DNA
atgacctaccggttctgcagccagttcagcaagggcgtgtacgccattttcggtttctatgagaggcgaaccgtcaacatgctcacatctttttgtggagccctccacgtgtgttttattactccttcattccccgtggacacatctaaccaattcgttttgcagcttcgcccagagttgcaggacgcactgatcagcatcattgaccactataagtggcagaagtttgtctacatatatgacgccgatcggggcctgtccgtgctgcaaaaagtactggatactgcggctgagaaaaattggcaggttactgcagtcaatattctcaccactaccgaggaaggatacaggatgttgttccaagacctggagaaaaagaaagaaagacttgtggtcgtcgactgtgaatccgagagactgaatgctatcctggggcaaattatcaaattggagaaaaacggtatcgggtatcattacattctcgcaaatttgggatttatggacattgatctgaataaatttaaggaatctggtgccaacgttaccggctttcagttagtcaactacactgatacaatccccgcaaagataatgcaacagtggaagaactcagacgctagggatcatacaagagtagattggaagaggccaaagtacactagtgccctgacatatgatggagtaaaagtgatggctgaagcctttcagagcctgagacggcaaaggatcgacatcagccgtaggggaaatgcaggcgattgcctggcaaaccccgctgtgccttggggacagggcatagatatccagagagcgctccaacaagtaagatttgagggcctcaccggaaacgttcagtttaatgaaaaagggaggagaaccaactacacgctacatgtaattgaaatgaagcatgatggcatcaggaaaataggctactggaatgaggatgataaattcgttcctgcagcaacagatgcacaggcagggggggataattccagtgtgcagaacaggacctatatcgttacaactattctggaggacccatacgtgatgcttaagaagaacgctaaccagttcgaagggaacgatcgatatgagggctactgcgtagagctcgctgccgagattgccaagcacgtggggtatagctacagacttgaaatcgtgagcgatggcaagtacggagcccgcgaccccgatacaaaagcctggaatggaatggtgggagaacttgtgtatggaagagccgatgtcgctgtggcccccctgactattacgctggttcgggaggaggtcatcgacttctctaagccgttcatgtctctcggaatttctattatgatcaagaaaccccagaaatccaagccaggcgttttttccttcctggaccctctagcatatgaaatttggatgtgtatagtgttcgcttacattggagtgtccgtggtgctgtttctggtgagccgcttttctccctacgagtggcatagtgaagagtttgaggagggtagggatcagactacgtctgaccagagcaatgaatttggcatcttcaacagtctttggtttagtcttggcgcctttatgcaacagggatgcgatattagcccccgcagtctgtcaggcagaattgttgggggtgtgtggtggttcttcaccttgatcatcattagcagctatactgctaatttggccgcatttcttactgttgagcggatggtgagccccattgaaagcgccgaggatcttgccaagcaaactgagatcgcctatggcactctcgaggccggctctacaaaggaatttttcagacgttcaaaaattgccgtgtttgagaagatgtggacctacatgaagagcgccgaaccgagcgtctttgtgagaaccacagaagaaggcatgatacgtgtgcgcaagtcgaagggcaagtacgcatacctgttggagtcaacgatgaacgagtacatcgagcagcgtaaaccttgtgacaccatgaaggttggcggcaaccttgatagtaagggatatggaatcgcaaccccaaaaggatcggccctccgcaaccccgtgaacctggctgttctgaagctgaatgaacaaggtctgcttgacaaactgaaaaacaagtggtggtatgataagggggagtgtggaagtggcggtggcgactcgaaagacaagacaagtgctctcagtctcagcaacgtggccggagttttctacatccttatcggtggcctcggcctggccatgctcgtcgctctcatagagttctgttacaaatctcgaagtgaatcaaagcgcatgaagggtttctgcctgattccccagcagtcgatcaacgaggccatccgaacatctaccctcccccgcaactccggagcaggagctagctctggcgggagcggagagaacggtagggtggtgtcacatgactttcctaaaagtatgcagagtatcccatgcatgtcccacagctccggcatgccactgggtgcaacaggactttag

SEQ ID NO: 189319 - DNA, 2652 bp, synthetic construct
  misc_feature 1..2652: note = Description of Artificial Sequence: Synthetic coding sequence
  source 1..2652: mol_type = other DNA
atgcagaagatcatgcacatcagcgtgctgctgagccccgtgctgtggggtctgatctttggcgtaagcagcaacagcattcagattggcgggctttttccccggggtgccgaccaggaatactccgcattccgggtggggatggtgcaatttagtacaagcgaattcagattgacaccccacatcgataatctggaagtggctaattctttcgctgttaccaacgcgttttgttcacaattttcacgaggcgtttacgctatctttggtttctacgacaaaaaaagtgtgaacactattacatccttttgcggcactctccatgtatcattcatcacaccttcatttccgacggacggaacacaccccttcgtcatccagatgaggcccgacttgaagggcgccctgctgtcccttatcgaatactaccagtgggacaagtttgcctatctctacgactctgaccgcggtttgtcaactctgcaagcagtactggattctgccgcagaaaaaaagtggcaggtgacagctattaatgtaggtaacattaacaatgacaaaaaggacgagatgtatagatctctgttccaggatttagagcttaagaaagagcgccgggtgatactggactgtgaaagagacaaagtgaacgatattgtggaccaggtgatcactataggcaagcacgtcaaagggtatcactatattatcgctaacttaggcttcacggatggggatttgctgaagattcagttcggaggtgcaaatgtgtcaggttttcagattgtcgattacgacgactctctggtcagtaagttcattgaaaggtggtcgacacttgaagagaaggaatacccgggggcacatactactactattaagtacacatcggcccttacttatgacgccgttcaagtgatgacggaggctttcagaaacctgcgaaaacagcgtattgaaatctcacgcagaggaaatgcgggggattgcctggcgaaccccgctgtgccgtggggccagggggttgaaatcgagcgggccctgaaacaggtacaggttgagggcctctcaggcaatataaaattcgatcaaaacggtaaacgcattaattatacaattaacataatggaactaaagacaaacggacccaggaaaattggatattggtcagaagttgacaaaatggtggtaacccttacagagttacccagtggtaatgatacgagtggcctggagaacaaaaccgtggtcgttaccacaattctggaaagcccatatgtaatgatgaaaaaaaatcacgaaatgttggaggggaatgaaaggtacgaaggctattgtgtggatctggcggcagagatcgccaaacactgcggatttaaatacaagctgaccattgttggcgatggcaagtatggcgcccgcgatgccgacaccaaaatatggaatggcatggtgggcgaattagtgtacggcaaagctgacatcgcaatcgccccactcaccattaccttggtccgagaagaggtcatcgactttagtaagccttttatgtcgctagggatatcaattatgattaagaagccccagaaatcaaagcccggcgtattttcattcctggatcccctggcatatgagatctggatgtgcatcgtttttgcttatattggcgtttctgtggtgctctttttggtgagccggttctcaccctacgagtggcacactgaggagttcgaggacgggcgcgaaacgcagtcctcggaatcaacaaatgaatttggaatctttaactcgctgtggttttctctcggcgcttttatgcagcaaggttgcgacatctcccccagatcactgagcgggcgcattgtgggcggggtgtggtggttctttacactgatcattatcagctcctataccgcaaatcttgccgcttttcttaccgtggaaagaatggtcagtccaatcgagagtgcagaggacttaagcaaacagactgaaattgcatatggtaccctagattcaggaagcactaaagaattttttcgaagaagcaagatcgctgtgtttgataagatgtggacatacatgcgcagtgcagaaccctctgtttttgtgcgaactactgccgagggcgtcgctcgggtcagaaagtccaaaggcaagtatgcatatctcttagaaagcactatgaatgagtatatcgaacagagaaaaccttgtgataccatgaaggtggggggcaatcttgacagcaagggatacggcatcgccacccccaaagggtcgtccctacgcaacgccgttaatctcgctgtgctgaaactgaatgaacaggggctgctcgacaagctcaagaacaagtggtggtatgacaagggggagtgcggctcgggggggggggactctaaggagaagacgtccgccttatctctgtccaatgtggcgggggtcttctatattctcgtgggcgggttgggcttggcaatgttagtggccctcattgagttctgctataagtccagggcagaggccaagcggatgaaggtcgcaaaaaacgcccaaaatattaatccaagctcgtcacagaacagccaaaactttgctacctacaaagaaggatataatgtgtatggaatcgagtctgtgaagatatag

SEQ ID NO: 189320 - DNA, 2652 bp, synthetic construct
  misc_feature 1..2652: note = Description of Artificial Sequence: Synthetic coding sequence
  source 1..2652: mol_type = other DNA
atgcagaagatcatgcacatcagcgtgctgctgagccccgtgctgtggggcctgatcttcggggtgtcaagcaacagcattcagatcgggggccttttcccgcggggggccgaccaggagtattccgcttttagagttgggatggtgcagttctccacctctgagttcagactgacacctcacatcgataaccttgaggtcgccaacagtttcgccgtcaccaacgccttctgcagtcagttctcccgaggggtctacgctattttcggcttctatgacaagaagagtgtgaatactattacgtcattctgtggaacactgcatgtgagcttcatcactccctccttcccgacagatgggactcaccccttcgtgatccaaatgcgaccggacttgaaaggagctcttctgagcctcattgagtattaccagtgggataagttcgcgtatttatatgactcagatagaggactctcaaccctgcaagccgtgctggattcagcggccgagaagaaatggcaggtaacagccatcaacgtcgggaatattaacaatgacaagaaggatgaaatgtatcgaagcctgttccaggatttggagttaaaaaaggaacggagagtcatattagattgtgaacgcgataaagtgaacgatattgtcgaccaggttattacgattggaaaacacgtcaagggttatcattacatcatcgcaaacctaggatttactgacggtgacctccttaagatccagttcgggggcgccaatgtcagcggattccagattgtggactatgacgacagcctggtgtccaagtttatcgaacgctggagcaccttggaagagaaagagtacccgggcgcccacacaaccacaatcaaatacacatcagcattgacctacgacgcagttcaggtcatgaccgaggccttccgcaatcttagaaaacagaggattgagatcagccgcagagggaacgcgggggattgcttggccaaccccgctgtgccttggggtcagggcgtcgagatcgaacgggccttgaaacaggtgcaggtagaagggttgtcgggcaacattaagtttgatcagaacggaaagaggattaactatacaattaatattatggaactaaaaaccaacgggccaagaaagattggctactggtcagaggtggataaaatggtcgtgaccctgacggagttgcctagtgggaacgatacctcagggctggagaataagaccgttgtggttacaacgattctggagtctccctatgtcatgatgaagaagaaccatgagatgctagagggtaatgagagatacgaaggttattgtgtggatttagcggcggagattgccaaacattgtggcttcaagtataaattaacgatcgtaggagatgggaagtacggggctcgtgacgctgacacaaagatctggaacggcatggtgggcgagctcgtgtacggtaaggctgatatagcaatcgctcctctgacaatcacactcgtgcgggaggaagttatagatttcagcaagccatttatgagcttgggaatctctattatgattaaaaaaccccagaagtccaagcctggggtgtttagtttcttggatcccctcgcttatgaaatctggatgtgtattgtcttcgcttacatcggggtatctgtggtgctctttctggtcagcaggttctcaccttatgagtggcacaccgaggaattcgaggatggccgggagacacagagctcagagagcactaatgagtttggaatctttaattctctgtggttttctcttggagcatttatgcagcaaggttgcgatatatccccccgctctctgtccggtcgaatagtcggcggggtgtggtggtttttcactttgatcattatcagcagttatactgccaacctcgctgctttcttgactgttgaacgcatggtgagccctatcgaatcagccgaggacttgtcaaaacagacagaaatcgcctacggcacccttgacagcggctccacaaaagagttcttccgaaggagcaaaatcgctgttttcgacaagatgtggacatacatgcggagtgccgagccatcagtgttcgttagaacaacagccgagggcgtggcccgcgtgcggaagagcaagggtaagtacgcctatttacttgagtccacaatgaacgagtatattgagcagcgcaagccctgcgacactatgaaggtcggggggaatctcgactccaaggggtatggaattgccacccccaaagggtcctccctcagaacaccagtgaatttggcggtgttgaaactttcagaacagggggtgcttgataagctgaaaaataagtggtggtacgataaaggtgagtgcggcgccaaggactctgggtctaaggaaaagaccagcgcactgtccctatctaacgtagccggagtgttctacatcctcgttggaggtctcggactggcgatgctcgttgcgctgatcgagttttgctataagtcgcgtgccgaagcgaagcgtatgaaagtcgctaaaaatgcacagaacatcaatccaagctctagtcagaactcacaaaactttgcaacctacaaggagggatacaatgtctacgggatcgaatccgtgaaaatttag

SEQ ID NO: 189321 - DNA, 2193 bp, synthetic construct
  misc_feature 1..2193: note = Description of Artificial Sequence: Synthetic coding sequence
  source 1..2193: mol_type = other DNA
atggtgcagttcagcaccagcgagttccggctgaccccccacatcgacaatctggaggtggccaattcattcgccgtgaccaatgctttttgttcgcagttttcgagaggcgtgtatgccatctttgggttctatgacaagaagtccgttaacacgattaccagcttctgcgggactcttcacgtctctttcataacacccagctttccaaccgatggaactcacccattcgtgattcagatgcgccctgacctgaaaggcgcactactttctctaatcgagtactatcagtgggacaagttcgcgtatctgtacgacagtgatcgcggcctctcaacactccaagccgttctggattcagcagctgagaaaaaatggcaagttacagccataaacgttggtaacatcaacaatgacaaaaaggacgagatgtaccgatccttatttcaggacctcgaactgaaaaaggagcgccgtgtgattctcgattgcgagcgggataaggtgaatgatatagtcgaccaggtaattaccattggcaagcacgtgaaggggtatcattacataattgctaatttgggcttcaccgacggtgatctgttgaaaatacagtttggcggcgccaacgtgtcaggctttcagatcgtggattatgatgattctcttgtgagcaaatttatcgagcggtggtctaccctcgaggagaaagaataccccggggcccatacgacaactatcaaatacacttccgccctcacttacgacgccgtacaggtcatgacggaggccttcaggaatctgcggaagcaaagaatcgaaatcagccggcggggcaatgctggcgattgcctcgcgaacccagcagtgccctggggccagggtgtcgagatcgagcgggcccttaaacaagtacaagtggagggtttatccggaaatattaaatttgaccagaacggcaaacggattaattatacaatcaacatcatggagctgaagaccaacggacctagaaagattgggtattggagcgaagtagataaaatggtggtgactctcaccgagctgcccagcggaaacgacaccagtgggctcgaaaataagacagtagtcgtgacaacaatcctggagtcgccgtatgtaatgatgaaaaaaaatcatgagatgctcgaggggaacgagagatacgagggatactgtgtagacctcgctgccgaaattgctaaacactgcggtttcaagtacaagctcactattgtcggcgacgggaagtatggggctcgggacgcagatactaaaatctggaatgggatggtcggggaactggtctatggcaaagctgacatcgcgatcgctcccctgacaatcactctggtgagagaggaagtcatagatttcagcaagccctttatgagtctgggaattagcatcatgatcaaaaagccacagaaatcgaaacctggggtttttagtttcttggatcccctggcctatgaaatctggatgtgcatagtttttgcttacattggggttagtgttgttctgtttctcgtctcacgcttcagcccatatgaatggcataccgaagagtttgaagatgggcgggagactcaaagctcagaaagcactaacgaattcgggatatttaattccttatggttttcactgggcgcctttatgcagcagggctgcgacatttccccaaggtctctgagtggtcggattgtaggaggcgtgtggtggttttttactctcattattattagctcatatacggctaacctcgccgccttcttgacagtggagaggatggttagtccaatagaatctgcagaagacctgagcaagcaaacagaaatcgcttatggaacacttgactcaggctccacaaaggaattcttccgcaggagcaaaatcgcagtattcgataaaatgtggacgtatatgcgctcagctgagccatccgttttcgtgcgcaccaccgccgaaggcgtggctcgcgtgcgtaaaagcaaagggaagtacgcgtacttgttagaaagcactatgaacgaatacatcgagcagcggaaaccgtgcgatacaatgaaagtcggcgggaacctggactcaaagggctacgggatagcaacacccaagggctcctctctgagcggagtcacatttaagacacttttatttgtttgctgtggctag

SEQ ID NO: 189322 - DNA, 297 bp, synthetic construct
  misc_feature 1..297: note = Description of Artificial Sequence: Synthetic coding sequence
  source 1..297: mol_type = other DNA
atgaacgagtacatcgagcagcggaagccctgcgacaccatgaaggtgggaggcaatctagactctaagggctacggtatcgcgactccaaagggctcaagtctttccggcgttacttttaaaactttgatatgcctattatggataaatgccgtaaacttagcagtgctaaagttaaacgagcaaggtttgcttgacaagctaaagaacaagtggtggtatgacaagggcgaatgcggatctggtggcggcgattccaaaaatcctagtaagtcctgttctatagagactcagtag

SEQ ID NO: 189323 - DNA, 2511 bp, synthetic construct
  misc_feature 1..2511: note = Description of Artificial Sequence: Synthetic coding sequence
  source 1..2511: mol_type = other DNA
atggtgcagttcagcaccagcgagttccggctgaccccccacatcgataatctcgaggtcgccaacagcttcgctgtgactaacgcgttctgttctcagtttagtagaggggtgtatgctatttttggcttttatgacaaaaaatctgtcaacaccatcaccagcttctgtggcacgctgcatgttagctttatcacgcccagcttccctactgacggcacccatccatttgtgatccagatgcgcccagatctaaagggagcactactgtcattgatagagtactatcagtgggataaatttgcctatctctatgattccgatcgggggctgagtactttacaggccgtcctggactccgctgccgagaagaagtggcaggtcactgcaattaatgtggggaatattaacaatgataagaaggatgaaatgtacagaagcctgtttcaggacctcgagctgaaaaaggagcgcagggtaatcctggactgcgaaagggataaggtcaatgacatcgtggatcaagtaataaccataggaaaacatgtaaagggatatcattatattatagcaaacctgggattcactgacggcgatttgctcaaaatccaatttggcggagctaacgtctctggtttccagatcgtcgactacgatgattcactggtttccaagttcatagagcgttggagcacgttggaggagaaggagtaccccggcgcccataccactaccatcaagtacacctctgcccttacgtatgatgcggtgcaggtgatgactgaggccttccgcaaccttagaaagcaacgcattgaaatctcacggcggggcaacgccggagactgtctggcgaatcccgcagtgccttgggggcagggtgtggaaatcgagcgagcgctcaaacaggttcaggtggaggggttgtcagggaacattaaattcgaccaaaatggaaaaaggattaactacaccataaacataatggagctgaagacaaatggaccaagaaagatagggtattggtcagaagtggacaagatggtagttacgttgacggagctaccatcaggcaatgatacctcaggcctggaaaacaagactgtggtggtcactacaatcctcgaatccccctacgttatgatgaaaaagaatcacgaaatgctggaggggaacgagaggtatgaaggatactgcgttgatttggctgccgagatagccaaacactgtggctttaagtataaactcaccatcgttggcgacggcaagtatggagctagggacgctgatactaaaatctggaacggtatggtgggagaactcgtgtacggaaaagctgatatagccatagcacccctgactataactctggttcgcgaagaagtgatcgacttttccaagccattcatgagtttggggatctccatcatgattaagaagcctcagaagtccaagcccggggttttctcattcctcgaccctctggcctatgagatctggatgtgtatcgtgtttgcctacatcggagtttcggttgtgctgttcctggtatccagattttcaccctacgaatggcacacggaagagttcgaagatgggcgggaaacacaatcttccgagtctacaaatgaatttggtatctttaacagtctgtggttctctctaggagccttcatgcagcagggctgtgacatcagccctcggtctcttagtggtagaatcgttggaggagtgtggtggttcttcacactgataattatctcatcctacactgcaaacctcgccgcctttttaactgtggaacgtatggtatctcccatcgagagcgccgaggacctgagcaagcaaactgaaatagcctacggcacactggactccggcagtacaaaggaattctttagaaggtcgaagatcgctgtgtttgataagatgtggacctatatgcggagtgctgaacccagtgtgttcgtgcggactaccgctgagggcgtggctcgggtgaggaagtctaaggggaaatatgcttacctactagagtcgacaatgaacgagtatatagagcaacgtaaaccgtgcgataccatgaaggtggggggcaacctcgacagtaagggttatggaatcgctaccccaaaaggttcctcactgcgtacccccgtgaacctggctgttctgaagctcagtgagcagggcgtcctcgacaagcttaaaaataagtggtggtacgacaagggagaatgcggggctaaagactccggtagcaaagagaagacatcagcgctgtcgctgagcaacgtcgccggtgtgttctatatcctcgtcggcgggcttggactggccatgctggtggctctgattgagttttgctacaaatcccgggcggaagcaaagaggatgaaagttgccaagaacgcccagaacattaacccatccagcagtcagaacagccagaactttgccacatacaaagaggggtacaatgtctatggcatcgaatcagtcaaaatctag

SEQ ID NO: 189324 - DNA, 438 bp, synthetic construct
  misc_feature 1..438: note = Description of Artificial Sequence: Synthetic coding sequence
  source 1..438: mol_type = other DNA
atggtgcagttcagcaccagcgagttccggctgaccccccacatcgacaatctagaagtggctaattcttttgcggttacaaatgccttttgcagtcaatttagcagaggggtgtacgccatcttcgggttttatgataagaagtctgtgaacacgattacttccttttgcggtacactccacgtttccttcatcaccccatcgtttcctactgacgggacccatcctttcgtgattcagatgagaccagatctcaagggcgccctgctgtctttgattgaatactaccaatgggacaagtttgcctatctttacgatagcgaccgcggcctctcaactctgcaggccgtactggattcagcagcggagaaaaaatggcaggtgacggccattaatgtgggaaacattaacaacgataagaaagacgagatgtactag

SEQ ID NO: 189325 - DNA, 174 bp, synthetic construct
  misc_feature 1..174: note = Description of Artificial Sequence: Synthetic coding sequence
  source 1..174: mol_type = other DNA
atggtgcagttcagcaccagcgagttccggctgaccccccacatcgacaacctggaggtggcgaatagctttgcagtcaccaatgctttctgttctcagttcagtcggggggtttacgccatctttggattctatgacaagaaaagcgtcaacacaataactagcttttgctag

SEQ ID NO: 189326 - DNA, 2511 bp, synthetic construct
  misc_feature 1..2511: note = Description of Artificial Sequence: Synthetic coding sequence
  source 1..2511: mol_type = other DNA
atggtgcagttcagcaccagcgagttccggctgaccccccacatcgacaatttggaggttgccaatagtttcgctgtcactaacgccttctgcagtcaattttcacgcggggtttacgccatatttgggttttacgacaagaagtctgttaacacaatcacctcgttctgtggcacccttcacgtttcttttatcaccccctcttttcccactgatgggacccatccctttgtgatccagatgcgaccggatctcaaaggggctctgctgtcattgatagagtactaccagtgggataagttcgcctatttgtatgactccgataggggtctgtccacattgcaggcagtgctggatagtgctgcagagaagaaatggcaggtaaccgcaattaacgtaggaaacattaacaacgacaagaaggatgaaatgtaccggtccctttttcaggatctggagctgaaaaaagagcgcagggttatcctggactgtgagcgcgacaaggttaacgacattgtcgaccaagtcattactattggcaagcatgtcaagggatatcattatattattgcaaaccttgggtttacagatggggacctgctcaagatacagttcggcggcgctaacgtcagtggcttccagattgtagactacgacgacagtctggtgagtaaattcatcgagcgttggtccaccctcgaggagaaggagtacccgggggctcacactactacaatcaagtacacctcagcgttaacttacgacgccgtacaggtaatgaccgaggctttccgcaatctgagaaagcagaggattgagatctccaggcgggggaacgctggcgactgcctggccaaccccgcagtgccatggggccagggagtagaaatagaacgggcactgaagcaggtgcaggtcgagggactttccggaaacatcaaatttgatcagaacggcaaacggattaactacacaattaatataatggagctaaagaccaatgggcctcgaaaaatcggatactggtctgaggtggataaaatggtcgtcactttaacagagctgcccagcggcaacgacacctccgggctcgagaacaagaccgtggtagtgacaaccattctggagtctccctatgtcatgatgaagaagaaccacgagatgctggagggaaacgaaagatatgagggatactgcgttgatctggccgcagagatcgctaaacattgcggctttaaatataaattaaccattgtgggagatgggaagtacggtgcgagagatgcagataccaagatatggaatggcatggttggagagcttgtatacgggaaggctgacatcgccattgctccgcttacaattacacttgtgagggaggaggttatcgacttcagcaagccttttatgagcctgggcatttctattatgatcaaaaagccacaaaagtccaaaccaggcgtgttcagtttcctcgaccccctggcttatgagatctggatgtgtatagtgttcgcttacatcggcgtgagtgtcgtcttgtttctcgtttcaaggttctcaccttacgagtggcatacggaagaattcgaggacggcagggagactcagagctccgaaagcacaaacgagttcggcatatttaactccttgtggttctctctgggcgcctttatgcaacaaggatgtgatatttccccacgctccctctccggtcgcattgttgggggcgtctggtggtttttcactttaattattatctcctcttataccgctaatctggcagcatttttaaccgtagaaagaatggtctctcccatcgaatccgctgaagatctgagcaagcagactgagatcgcctacggtacactggacagcggatctacaaaggagttttttcggagatccaagattgctgtgttcgacaaaatgtggacatacatgcggagcgcagagccctccgtttttgtgcgtacaactgctgaaggagtcgcccgggtgaggaagagtaaggggaagtacgcttatctgctggagtccacaatgaatgaatacattgagcagcggaaaccttgcgacacaatgaaggtgggcggtaatctcgactctaaaggctacggcatcgccactccaaagggcagtagcctccgtacccctgtcaacctggcagtactcaagctttccgagcagggcgttctggacaagcttaagaacaagtggtggtacgacaaaggtgagtgcggcgctaaggatagcggtagcaaagaaaaaacctcagccctgtccttgtccaatgtcgccggggtattctacatcctggttggcggtttaggactggccatgttagtagccctcattgagttctgttacaagtcgcgggccgaagctaagcgcatgaaggtcgctaaaaacgcccagaacattaacccctcctcttcccagaattctcagaacttcgctacttacaaagaggggtacaacgtttacggcatcgaatctgtgaagatttag

SEQ ID NO: 189327 - DNA, 378 bp, synthetic construct
  misc_feature 1..378: note = Description of Artificial Sequence: Synthetic coding sequence
  source 1..378: mol_type = other DNA
atgcagaagatcatgcacatcagcgtgctgctgagccccgtgctgtgggggctgattttcggcgtgagctccaatagcatccagatcggtggcctgtttccccggggcgccgaccaggagtactcagcctttagggtcgggatggtgcagttcagcaccagcgagttcagactgaccccacacattgataatctcgaagtcgcgaattcttttgcagtcacaaacgccttttgttctcaatttagcagaggggtgtacgccatcttcgggttctatgacaagaaaagtgttaacactatcacgtctttttgtggcaccctccacgtctcttttatcacccctagcttccccacagacgggacccaccccttcgtctag

SEQ ID NO: 189328 - DNA, 147 bp, synthetic construct
  misc_feature 1..147: note = Description of Artificial Sequence: Synthetic coding sequence
  source 1..147: mol_type = other DNA
atgcagaagatcatgcacatcagcgtgctgctgagccccgtgctgtgggggctgatattcggagtatctagcaactctatacagattggtggactgttcccacggggcgctgatcaggagtactctgctttccgagtgggtatgtag

SEQ ID NO: 189329 - DNA, 3030 bp, synthetic construct
  misc_feature 1..3030: note = Description of Artificial Sequence: Synthetic coding sequence
  source 1..3030: mol_type = other DNA
atggaggccctgaccctgtggctgctgccctggatctgccagtgcgtatcggtgagggcggatagcatcattcacatcggagcgatcttcgaagaaaacgcggccaaggatgatagggtgtttcaactcgcggtttccgatttaagcctgaatgacgacatacttcaaagcgaaaaaatcacctacagcatcaaggtaatcgaagccaacaatccctttcaggcggtgcaggaagcttgcgacctgatgacacagggaatactggccctagttacatctactggatgcgcctcagcaaacgctctgcagtctctcacagatgctatgcacatccctcatttgttcgtgcaaaggaaccctggtggatcacctcgaaccgcctgccatctgaatccatcccccgacggggaagcatacaccctcgcaagccgaccgccagtaagattgaacgacgttatgctgcgactggtgactgaacttaggtggcaaaagtttgtaatgttctacgattcagagtacgatattagggggctgcagtcctttctggatcaggcctctcgactgggacttgatgtgagcctgcagaaggtcgacaaaaatattagtcatgtgttcacatctctttttactaccatgaagactgaggagttaaacaggtatagggatacgttgcgccgcgcaatcctacttctctccccccagggagcgcacagctttattaatgaggctgtggagactaatctggcctccaaggattcccattgggtatttgtgaacgaagaaatctcagatccagaaattttggatctggtgcactccgctctgggcaggatgaccgtcgtgaggcagatctttccgagtgcaaaagataaccagaaatgcacacgaaataaccatcggatatccagtctgctttgtgacccacaagaaggctacctacaaatgctgcagatttccaatctgtatctgtacgatagcgtcctcatgctggcgaacgcatttcatcgaaaactggaggatcggaagtggcattccatggcatctctcaactgtattagaaagtctaccaagccgtggaacgggggacgcagcatgcttgacaccattaagaagggacatatcactggattgacgggggtgatggagtttcgagaagattccagtaacccttatgtgcagtttgaaatcctgggtaccacctattctgaaacatttggaaaggacatgcggaaattggctacttgggattccgagaaggggttgaatgggtctctgcaggaacggccaatgggctcccgtctccagggacttacgctgaaagtggtaaccgtccttgaggaaccctttgtgatggtggcagaaaatatactcggacagccaaagagatataaaggcttttcaattgatgtcctcgatgctttagccaaagcgctcggtttcaagtatgagatctaccaggccccagacggccggtatggacaccagctccacaatacctcctggaacgggatgataggcgagttaatcagcaaacgagctgacctggcaattagcgcaatcactataacgcccgaacgggaaagcgtggtcgatttctctaagcgctacatggactactcagtggggattctgataaaaaagcctgaggaaaaaatctcgatttttagtctgtttgcccctttcgattttgcggtctgggcttgtatcgccgccgccatccccgttgtcggcgttcttatattcgttctgaatcgcatccaggctgtgcgtgcacagtccgccgctcagcctcggccttccgcctcggcaacactccatagcgcaatctggatagtgtacggggcgttcgtccagcaggggggcgagagttcagtgaattccatggccatgcggattgtcatgggcagttggtggctgttcaccctgatcgtttgctcctcctatacagcgaacctggcggccttcctcaccgtgtctaggatggacaaccctatcagaaccttccaggatctgtccaagcaggtagaaatgtcctacgggacggtccgcgattccgcagtctacgagtatttccgggccaagggaacaaaccccctggaacaggactccaccttcgctgagttatggaggactataagtaagaacgggggagccgacaactgtgtgagttccccgagtgaaggaattcgaaaagccaagaagggcaattatgccttcctgtgggatgtagcagttgttgagtacgcggcactcaccgacgacgactgctcagttaccgtgatcggcaactctatatcttccaaaggatacggcattgccctgcagcatgggtccccatatcgggacctcttctcgcagagaatcttagagctacaggatactggggatctagacgtgctgaaacagaaatggtggcctcatatgggacgttgtgacttgacttcccacgccagtgcacaggccgatggcaagagcctgaagttgcacagctttgccggcgtattctgcatccttgcaatcggcttgttgctggcatgtctggtagccgccctagaattgtggtggaacagtaatcggtgccaccaggagaccccgaaggaggacaaggaagtcaacttggaacaggtccatagacggatgaactctctcatggatgaggatatcgcacacaaacagatctcccccgctagcatagaactgagtgccttggaaatgggcggcctagcgccaactcagactttggaacccaccagagaatatcagaacacccagctgagcgtgtctaccttcctccccgagcagtcttctcacggcacatccagaactctctccagcgggccctcgtccaatctgcctctacccttgtcgtctagcgccacaatgccctctatgcagtgtaagcatcggtcgcccaacggaggattgttccggcagtctcccgtaaagactccaatacccatgagcttccagccagtacccggcggagtgctacccgaggctctcgacaccagccatggaacatccatttag

SEQ ID NO: 189330 - DNA, 1743 bp, synthetic construct
  misc_feature 1..1743: note = Description of Artificial Sequence: Synthetic coding sequence
  source 1..1743: mol_type = other DNA
atgggcagccggctgcagggcctgaccctgaaggtggtgaccgtgttggaagaaccttttgtcatggtggctgagaacatcctgggccagcccaagaggtacaagggattcagtatagatgtcctcgatgccctggcgaaggcgcttggctttaagtatgaaatttaccaggcgccagacgggaggtacggccatcagctgcacaacacatcatggaatggcatgatcggcgaactgatatcaaaacgggccgatctggcaatcagcgccatcaccatcactccagaaagggaaagcgtagttgatttctctaaaaggtacatggattattccgttggcatcctaattaaaaagcctgaagagaagatttctattttctcccttttcgcaccctttgatttcgccgtgtgggcctgcattgccgctgctatccctgtggttggcgtgctaatcttcgtgctgaacaggattcaggctgtcagagcccagagcgccgcccagcctagaccttccgcaagcgctacactgcactctgctatatggatcgtgtatggggcttttgtacagcagggaggcgagtcctctgtgaactctatggcgatgcggattgtgatgggctcctggtggctctttaccttgatcgtctgctcttcttacacagctaatttggctgcgttccttaccgtctcacgaatggataacccgattaggacgtttcaggatctatccaaacaggtggagatgtcttacggaactgtgagggactctgccgtatacgagtacttccgagccaaagggacaaatcctttagagcaggactcaacttttgcggaattgtggcggactattagtaaaaacgggggcgcggataattgcgtgagctccccctcggaaggcatcagaaaagcaaagaaaggaaactatgcatttctgtgggacgtcgccgtcgtggaatacgcagccctgactgatgacgactgcagcgtaacagttataggcaactcaatctccagtaaaggctacgggatcgcacttcagcatgggagcccatatcgggacttattcagtcagcggattctcgaactgcaggacacgggtgaccttgacgtgctgaagcagaagtggtggccacacatgggccgctgtgacctcacaagccatgcatcggcacaggccgacggtaaatccctgaagctgcacagttttgcaggcgttttttgtattctggctatcggacttctcctggcctgcttggtcgctgccctcgaactttggtggaactctaataggtgccatcaggaaacccctaaggaagacaaagaagtgaacctggaacaggtgcaccggcgcatgaatagtctcatggacgaagatatagcacataaacaaatttctcctgctagtattgaactcagcgcactggaaatgggtgggctggcacccacccagactttagagcctaccagagagtaccagaacacccagctctcagtgtccacttttctgcctgagcagtcgtctcacggcacaagtcgaaccctcagtagcggcccctcctccaacctcccattacctcttagcagttccgctactatgcccagcatgcagtgcaaacaccgaagccccaatggtggattgtttaggcagtctccagtcaagacacccattcctatgagcttccagcccgtcccaggtggtgttctccccgaggccctggacactagtcatggaaccagcatctag

SEQ ID NO: 189331 - DNA, 3024 bp, synthetic construct
  misc_feature 1..3024: note = Description of Artificial Sequence: Synthetic coding sequence
  source 1..3024: mol_type = other DNA
atggaggtgttccccttcctgctggtgctgagcgtgtggtggagccggacatgggactcagctaacgccgactctattatccacattggagcaatcttcgacgagagtgccaagaaagatgacgaagtgtttaggacagctgtgggcgatctcaaccagaatgaggaaatactgcagactgaaaaaattacttttagtgtaacctttgttgatggcaacaaccctttccaagcagtgcaagaagcctgcgaactcatgaaccaaggaattcttgcactcgtttccagcattggatgtacgagcgccgggtccctgcagtcgctggccgatgcaatgcatattccgcatctgtttattcaaagaagcacggctgggacccctcggtccggatgcggcctcacccgatccaacagaaatgatgactacactctgtctgtccgaccacctgtttaccttcatgatgtcatcctgcgagttgtgacagaatatgcctggcagaaattcattatcttttatgactcagaatatgatatccgaggcatacaggagtttctcgataaggtgtcccaacaaggcatggacgttgccctacagaaagtcgaaaacaatatcaataaaatgataactactttgtttgacaccatgcgcattgaggagttgaaccgttatcgcgacaccctgcgcagggcaatactcgtgatgaaccccgcgacagcaaagagttttataaccgaggtggttgagacaaatcttgtcgccttcgactgtcactggatcatcattaatgaggaaattaacgacgtggatgtgcaggagttggtcaggaggtcaataggaagactcacaataatacgccagacttttcccgtgccccaaaatatatctcagcgctgttttcgcggaaaccacaggatctcttcgaccttatgcgatcctaaggacccatttgctcagaatatggaaatctcaaatctctacatctacgataccgtgctattgcttgccaacgcctttcataaaaaactggaggacagaaagtggcactcaatggctagcctgtcgtgtatcaggaaaaattctaaaccctggcagggaggacgttccatgttggagaccatcaagaagggaggggtgtccggcctgacaggggaactggagttcggggagaatggcggtaatcctaatgtgcacttcgagatcctaggaaccaactacggtgaggagcttggacggggcgtgcgaaagcttgggtgctggaatccggtgactggcttaaacggttccctgacagataaaaaactcgaaaataatatgcgtggtgtggtgttgcgcgtagtgacagtgctcgaagaacccttcgtgatggtctcagaaaacgtgttggggaagcccaagaagtaccaggggtttagcatagacgtgctggacgccctttctaactatcttggattcaattatgaaatctacgtcgcccctgaccataaatacggatcacctcaagaagacggcacctggaacggcctcgtgggggaactggtgttcaagcgcgcagatatcgggattagtgccctcacaatcacccccgatagggagaatgttgtggacttcaccactagatatatggattactccgtgggcgtccttcttcgcagggcagagaagactgtggatatgttcgcctgtctcgctccctttgatctgtccctgtgggcctgtattgctggaactgtgctgcttgtagggctgctggtttacctgctcaattggttgaaccccccacgcttgcaaatgggatctatgacatccactaccctgtacaactcaatgtggttcgtttacggttctttcgtgcaacaaggaggagaagttccctatacaacactcgccactcgcatgatgatgggcgcttggtggttgtttgccctcatcgtgatctcatcttatacagctaatctggcggcttttcttacaattacacgaatcgaaagtagcatccagagccttcaagacctgtccaaacaaacggagattccctacgggacagtcttagattctgccgtctacgagcatgtgcgaatgaagggactgaacccttttgagcgtgatagcatgtacagccagatgtggagaatgattaatcggtccaatgggtctgaaaacaacgtgcttgagagccaggccggcatccagaaggtgaaatacggcaactatgcattcgtatgggatgctgcggtgttggaatatgtggccataaatgatcctgactgctccttttacacaataggcaacacggttgcagacagagggtatggaatagcattacagcatggttcgccgtatcgggacgtgttctcccagagaatcctggaattgcagcagaacggggatatggatattctaaaacacaaatggtggcctaagaacgggcagtgcgacttatactcctcagtggataccaagcaaaagggaggcgcgttggatataaagtctttcgcgggcgtgttctgcatcctggctgctggtattgttttgtcttgctttatcgctatgctggaaacctggtggaataaacggaaagggtctcgcgttccaagcaaagaggacgataaggagatcgatctggagcacctgcaccgtcgcgtcaatagtctctgcactgatgatgattcaccacataagcagttttcaactagttctatcgacctcaccccactggatatcgacaccctgcctaccaggcaggccctggagcaaattagcgatttcaggaatacgcatatcacaactacgactttcattcctgagcagatacaaacattgtcacgcacactttcagcaaaggccgccagcggatttacatttgggaatgtgccagaacacagaactggaccctttcggcaccgagcaccaaacggcgggttcttccgctcccccataaaaactatgtcatcgattccctaccagcccacacccactttgggcctgaatctgggaaacgaccccgatcgaggcacgagcatttag

SEQ ID NO: 189332 - DNA, 2739 bp, synthetic construct
  misc_feature 1..2739: note = Description of Artificial Sequence: Synthetic coding sequence
  source 1..2739: mol_type = other DNA
atggaggtgttccccttcctgctggtgctgagcgtgtggtggagccgcacttgggatagtgcaaacgccgactctatcatccatatcggtgcgatcttcgacgaatctgctaaaaaggatgatgaggtattccgcaccgccgttggcgacctaaatcaaaacgaggagatactgcagacagagaagattacctttagcgttaccttcgtggacgggaataatccctttcaggctgtgcaagaggatatcagagggatccaggagttcttggacaaggtctcacagcagggcatggacgtggccctgcaaaaagtggaaaacaacattaataaaatgattaccaccctgtttgacaccatgaggatcgaggaactcaatagatatagagacacactgcgcagggccatactagttatgaacccagcaaccgctaaatcgtttatcaccgaggtggttgagaccaatttggtagcttttgattgccactggatcatcatcaacgaggagatcaacgacgttgacgtgcaggagttggtgcggcgcagcattggacgcctgacgattattagacagacctttcctgtgccccagaatatcagccagcgatgctttagagggaatcaccgcatttcctcaaccctgtgcgaccctaaggaccctttcgcccaaaatatggagatatcaaatctgtatatctatgacaccgtgctacttctggcgaacgcattccacaagaaactggaagaccggaaatggcattcgatggcctccctatcgtgtattagaaaaaatagcaagccttggcaggggggtcggtctatgttagaaacaattaaaaagggcggcgttagcggtctgactggcgagcttgaattcggggagaacggaggcaatcccaacgtccatttcgaaatcctggggacaaactacggcgaggaactgggccgcggcgtccgaaagctgggatgttggaacccggtgaccggactcaatggatcgctgaccgacaagaaactggaaaacaatatgcgaggggttgtcctgcgggtagtgacagtgctggaggagccctttgtgatggtcagcgaaaacgtgctgggcaaaccgaagaaatatcagggcttctccattgatgtcctagatgccctaagcaactatttgggttttaactacgaaatctacgtggctcctgaccataaatacggctccccacaggaagacggcacatggaatggacttgtgggtgaattggtctttaagagggccgatattggtattagtgctctcacgattacccccgatagggagaatgtcgtggattttaccactcgttacatggactattctgtgggtgtccttcttcggcgggcagagaaaactgtggatatgttcgcctgcctggcaccttttgatctgtcactttgggcctgtatcgcagggaccgtgctgctggtcggcctgttggtgtacctgctgaattggctaaatccgccccgtctgcagatggggagcatgactagcacaactttgtacaactcaatgtggttcgtatatggtagtttcgtgcagcagggaggggaggtgccctacaccacattggctacaagaatgatgatgggcgcttggtggctgttcgcccttattgtgattagctcttacactgccaacctggcggcgtttctcaccattacccgcattgagagtagcatacagtccctgcaggacctgagcaaacagactgaaataccctacgggactgtactcgactctgccgtatacgagcacgttagaatgaagggtctaaatccttttgagcgcgacagtatgtatagccagatgtggagaatgattaacagatctaatggtagtgagaacaacgtgcttgagtcccaggctgggatccagaaggtaaaatatggcaattacgcattcgtgtgggatgcagctgtgctggagtacgttgctatcaacgacccagactgcagcttttatacaatcggcaatacggttgctgaccgcggttatggcattgccctccagcacggatcaccttatagagatgtgttctctcagagaatactggagctgcagcaaaatggcgatatggatatcctgaagcacaagtggtggcctaaaaacgggcagtgtgacctgtacagcagcgtcgacactaagcagaaagggggtgcactggacattaaatcttttgcgggtgttttctgtatcctcgcagcaggtatagtcctgtcctgcttcatagctatgctggagacttggtggaacaagcggaaggggtcccgcgtcccgtcgaaggaagacgacaaggagatcgaccttgagcatctacaccggcgtgtcaattcactctgcactgatgatgattcgccccataagcaattcagtactagcagcatcgatctcaccccccttgacattgatactctcccaactcgccaggcccttgagcagataagcgatttccggaatacacacattactacaaccacatttataccagagcagatacaaacgctgagccgcaccttgagcgctaaggccgccagtggtttcacctttgggaatgtacccgaacacaggaccggtccgttccggcacagagcacccaatgggggattttttcgttcccccatcaagacgatgtcctctattccttatcagccaactccgaccctgggactgaaccttgggaatgatcctgacagggggacttctatttag

SEQ ID NO: 189333 - DNA, 2763 bp, synthetic construct
  misc_feature 1..2763: note = Description of Artificial Sequence: Synthetic coding sequence
  source 1..2763: mol_type = other DNA
atggagcacggcaccctgctggcccagcccggcctgtggacccgggacacgtcatgggccctgctgtactttttgtgttacatacttccccagactgctccacaggtcttgaggatcggagggatctttgagacagtggagaatgaaccggtaaacgtggaggagctagctttcaaattcgccgttacttctatcaaccggaatcggaccttaatgcccaacacaactctaacctatgatatccagagaataaacttgtttgactcattcgaggcctccagaagagcctgcgatcagcttgcgctaggggtggccgccctgttcgggcccagccatagtagctcagtgtcagctgttcagtccatatgcaatgcccttgaagtgccccacattcagaccagatggaaacatccaagcgtggataacaaggacttattttatatcaatctgtacccggactatgccgccatttctagagcgattctggacctagttctgtattataactggaaaaccgttactgttgtctatgaggattcaacaggcctcatacgcctacaggagttgatcaaggcacccagtagatacaacattaagattaaaatccgacaactaccatccgggaataaagacgctaaacccctcctgaaagaaatgaaaaaggggaaagaattctatgtgattttcgactgcagccacgagaccgctgctgagatcttgaaacagatactgtttatgggaatgatgactgaatattaccactatttctttaccacactcgacttgttcgccctcgatctggaactgtatcggtattctggagtgaatatgacgggtttccggcttctcaatattgacaacccacatgtcagctctattattgagaagtggtcaatggaacgcttgcaggctcctccgagacctgagaccgggctgttagatggaatgatgacaacagaagcagctctgatgtacgatgcggtatatatggtggctattgctagccatcgtgcctctcaactaacagtgtcttccctccagtgccatagacacaaaccttggcgccttggcccccgcttcatgaatctgattaaagaggctacagcgcggtgggatggattgactggtcacatcactttcaacaaaaccaatggtctccggaaggatttcgacctggatattatcagtcttaaggaggaaggcacggagaaagccgccggcgaggtgagcaaacatctttacaaggtctggaagaagattggcatctggaactcaaattccgggcttaacatgacggacagcaacaaggataagtcatcaaatattaccgactccctggctaacagaactctcatagtgactaccatcctcgaagaaccctatgtgatgtaccgcaaatccgacaagccactgtatggcaacgataggtttgagggctattgcctcgacttgctcaaggagttgagtaacatcctgggattcatttacgacgtcaaactggttcctgacggtaaatatggggctcagaatgataaaggcgagtggaatggtatggtgaaggagctgatcgatcatagagctgatctggctgtggcaccactgacaataacatacgtcagggagaaggtgatcgacttttcaaagccatttatgacactgggaatctcaattctctatcggaagccaaatggaacaaatcccggcgtcttttcatttctcaacccattgagccccgacatctggatgtacgtcctcttagcctgcctcggcgtctcctgtgtgcttttcgtcattgcccgttttaccccatatgagtggtataatcctcacccgtgtaaccctgacagcgacgttgtggagaacaactttacgctactgaattccttctggttcggggtcggggccctgatgcagcagggctccgaacttatgccaaaagctctttctacacgtatcgtcggggggatttggtggttttttaccttgatcatcattagctcttatacggctaacctggccgcgttcttaaccgtggagcggatggaatctccgattgacagcgcagacgatctcgcaaagcagaccaagatcgagtatggtgccgtaagggatggcagtactatgaccttcttcaagaagtctaagatctccacgtatgagaagatgtgggcctttatgagctctcggcagcagactgcactggtcagaaactctgacgaggggatccaaagagtgcttacgactgactatgccctgctgatggagtccaccagcattgagtatgtaacccagcgcaattgcaatctgactcagattggaggactcatcgactctaaggggtacggtgtaggcaccccgatcggatctccttaccgtgacaagattactattgcaattctgcagttacaggaggaaggtaaactgcacatgatgaaagaaaagtggtggagaggcaatgggtgccctgaggaggacaataaagaagcctctgccctcggcgtggaaaatattggcggcatatttatcgtgctcgctgccggtctggtgctgtccgtgtttgtggcaatcggcgagttcatctataaatctcgaaagaacaacgacattgagcaagctttctgcttcttctatggcttgcagtgtaaacaaacgcaccctaccaactcaacgagcggcacaacgctgtccactgatttggagtgtggaaagctgatccgggaggaacgggggattagaaaacaatcatctgtacatacggtctag

SEQ ID NO: 189334 - DNA, 2850 bp, synthetic construct
  misc_feature 1..2850: note = Description of Artificial Sequence: Synthetic coding sequence
  source 1..2850: mol_type = other DNA
atggagcacggcaccctgctggcccagcccggcctgtggacccgggacacctcgtgggccctcctatattttctctgttacattttgccgcaaacagcccctcaggtgttacgtatagggggcatcttcgagacagtggaaaatgaaccagtgaacgtggaggaactcgcatttaagtttgccgtcacctccattaacagaaaccgcacactaatgccgaacactaccctgacatatgatattcagagaataaatttgttcgatagtttcgaggcgtcacggagggcatgcgaccagctggccttgggcgtggccgcacttttcggcccaagccacagttcaagcgtgtcggcagtacagtccatatgtaatgccttagaggtcccccacatccagacccgctggaagcacccttccgtggacaacaaagatctgttttatattaatttgtacccggattatgccgccattagcagggccattcttgatctggttctgtactacaactggaaaactgtcacagtggtatatgaggattccacaggacttattagactccaggaactcatcaaggccccctcaagatataatatcaaaatcaagattagacagcttccatcagggaacaaggacgccaaaccactgctgaaggagatgaaaaagggcaaagagttctatgtgatcttcgattgctcccacgagaccgctgctgagatattgaagcagattttgttcatgggaatgatgaccgagtactaccattatttctttacaacattagatctctttgctctggacctggaactctaccggtattccggcgtgaacatgaccggattcaggctcctgaatattgataaccctcacgtctcctcgatcattgaaaaatggagcatggagcggttgcaggcgccgcctaggccagagaccggtctcctggacgggatgatgactacagaggctgccctgatgtatgacgcagtgtacatggtcgccattgcgtcccatagagcctcacaactgaccgtttcgagtcttcaatgccaccggcacaagccatggcgtctggggccacgatttatgaacctgatcaaggaagcccgatgggatggcttaaccggacatattacattcaataaaaccaacggactacgaaaagattttgaccttgacataatctcactgaaggaggaaggcacggagaaggcagctggtgaggtgtcaaaacacttatataaggtctggaagaagattggtatctggaactctaattctgggttgaacatgacagacagcaataaagataagtcttctaacatcacagatagcctagcgaaccggacactcatcgttacaacgattttagaagagccctatgtcatgtacaggaagagtgacaagcctttgtatgggaatgaccgattcgaagggtattgcttagacctgctgaaggaactctctaacattctggggtttatctatgacgtgaagcttgtgcctgatgggaaatacggcgcccagaatgacaaaggagagtggaatggaatggtaaaagagctgatcgaccatcgcgcggatctcgccgtggcacccctgactattacctacgtacgggagaaggtcatcgacttcagtaagccttttatgactctggggataagcatcctgtatcgcaagcccaacgggacaaaccctggagtattttccttcctgaatccactgtccccggacatatggatgtatgtgctgctggcttgtttgggcgttagctgcgtgctgttcgtgattgctcggtttacaccctatgagtggtacaacccacatccgtgtaatccagacagtgatgtggtagagaataactttaccttattaaacagcttttggtttggggttggggccttgatgcagcaggggagcgaattaatgccaaaggccctgagtactaggattgtgggaggcatttggtggttcttcaccctcatcattatttcttcctatacagcgaacctcgccgccttcctgaccgtagagcgcatggaaagtcctattgatagtgctgacgacctcgctaaacagacaaagatcgagtacggggcggtgagggatggttcgaccatgactttcttcaagaagagtaaaatctcaacctacgaaaagatgtgggccttcatgagcagccggcaacagacagccctggtcagaaattcagacgaggggattcagagggtcctgaccaccgattatgccctcctcatggagagcactagtatcgagtatgtgactcagcgcaattgcaatctaacacagattggtggtctgatagatagcaaaggctatggcgtgggaacccccataggcagcccttacagggataagattaccatcgccattctccaacttcaagaggagggcaagctgcacatgatgaaggagaagtggtggcgcggtaacggctgccctgaagaagataacaaggaagcaagtgccctgggcgttgaaaacatcggtggaatcttcatcgtactggcagcaggcctggtgctctccgtattcgttgcaattggagagtttatctacaaatctcggaaaaacaacgacatcgagcaaaagggaaaatctagccgtatccgattctattttcgtaacaaagtccggttccatggccggaagaaacagtcccttggagttgagaagtgcctgtcctttaacgcaatcatggaagagctgggaatttctctcaagaaccagaaaaagataaagaagaaaagcaggacaaaggggaagtccagcttcacgagtatactgacatgtcaccaaaggcgcacacagcgcaaggaaacagtagcttag

SEQ ID NO: 189335 - DNA, 2616 bp, synthetic construct
  misc_feature 1..2616: note = Description of Artificial Sequence: Synthetic coding sequence
  source 1..2616: mol_type = other DNA
atggagcacggcaccctgctggcccagcccggcctgtggacccgggatacgtcctgggctctgctgtattttctgtgctacatcttgccacagacagcaccacaagtgttgcgcattggaggaatctttgagacagtagaaaacgaaccagtcaatgtcgaagagctggcctttaaattcgcagtcacgagcatcaaccggaaccgaactttgatgccgaataccacgctgacttatgatatccagcggatcaacctgttcgatagttttgaggcctctcgacgagcctgtgatcagctcgcactgggtgtcgcagcactttttggccccagccactcgtcttcagtgtccgctgttcaatcaatctgcaacgcactggaagtcccccacattcaaacgcgatggaagcaccccagcgttgataacaaggatctgttttatatcaatttgtatccagactatgctgccatatcccgcgccatcctggaccttgttctctactacaattggaaaaccgtgacagtcgtatacgaagacagcaccggactcatcaggctgcaggagctcattaaagctcccagcagatataatataaaaattaaaatccgacagctgccctccggaaacaaggatgctaaaccactattaaaggaaatgaagaagggaaaggaattttacgtaattttcgattgttcacacgagactgctgccgagattctgaagcagatcctctttatgggtatgatgactgaatactaccactacttctttaccaccctggacctcttcgcacttgatcttgaactgtaccgatacagcggagtgaatatgactggatttagattactgaatatcgataacccgcacgtaagttcgatcattgaaaagtggtccatggagagactccaagctcctccccggcctgagacagggctgttagatggcatgatgacgacggaggcagcgctgatgtacgatgccgtctacatggtggccattgccagccaccgtgccagccaactgacagtgagcagcctgcagtgccatagacataagccgtggcgcctgggtccacggttcatgaacttgatcaaagaggctcggtgggacgggctgacgggccacattaccttcaataagaccaatggcctccgcaaagatttcgatctagacatcatttccctgaaggaggaagggacagaaaaagctgcgggtgaggtcagcaagcatttgtacaaggtgtggaaaaagatcgggatttggaatagtaattcggggttgaatatgacagactccaataaggataagtcctcaaatattacagattcgctcgccaataggactcttatagtaaccactattcttgaagaaccatatgtgatgtaccgcaaaagcgacaagcccctgtacgggaatgatagattcgaaggctactgcctcgatctgctgaaagagctttcgaacattctgggttttatctatgatgtgaagttggtgccagatggaaaatacggcgcccagaatgacaagggtgagtggaacgggatggtgaaagagctgattgatcaccgtgctgacctggcagtggcccccctgaccatcacctacgtgcgagagaaagtgatagatttttcgaaaccatttatgacactaggaatctctatcttgtacagaaaaccaaacggtactaaccctggcgtgtttagtttcctgaacccgctgtcccctgacatctggatgtacgtcctgctggcttgcctcggggtcagttgcgtccttttcgtgatcgcgcgcttcacaccatatgaatggtataacccacatccctgtaacccggatagcgatgtggtcgagaataatttcacactccttaatagtttttggttcggtgtgggcgctctcatgcagcaggggtccgagctaatgccaaaagccctttccacgaggatagttggcgggatctggtggttctttaccctgatcatcatctcaagctatactgccaacctggctgcttttctcacagtcgaacggatggagtcccctattgactctgccgatgacctggcaaagcagaccaagatagagtatggagctgtaagggacggcagcaccatgactttttttaaaaaatccaagatcagcacctacgagaagatgtgggcatttatgagtagccgacaacagacagccctggtccgcaattctgacgaaggtattcagcgtgtgctcaccactgactatgctctgttgatggaaagtacgtctattgagtatgtcacacagcgcaattgcaatctcacccagattggaggacttatcgattcgaagggctacggtgtgggaactcctattggcagtccttatcgggacaaaattactatcgcgattctccagctgcaggaggaggggaagttacatatgatgaaagaaaagtggtggcggggcaacggatgtccggaggaggataataaagaagcctcagccctgggtgtggaaaacattggcggtatttttattgtgctggccgctggtctggtgttatccgtatttgtcgccattggggagtttatctacaaatcccgaaagaacaatgatatcgaacagcactactag

SEQ ID NO: 189336 - DNA, 2718 bp, synthetic construct
  misc_feature 1..2718: note = Description of Artificial Sequence: Synthetic coding sequence
  source 1..2718: mol_type = other DNA
atggagcacggcaccctgctggcccagcccggcctgtggacccgggatacatcctgggccctcctgtattttctgtgttatatcctgccgcaaacggctccacaggtgctgcgcatcgggggtattttcgaaacagtggagaatgagcctgtgaatgtagaagagttggctttcaagtttgctgtcacctccataaatcgcaaccgcactctgatgcccaacactacactcacctatgacattcagagaataaatctgtttgactcgttcgaagcctctaggcgcgcttgtgaccagctggctcttggagtggccgccctgtttgggccctctcactcttcatcagtctccgctgtgcagtccatatgtaacgccctggaagtgccacacatccagacacggtggaaacacccatctgtggacaacaaagacttattctacatcaacctttatcctgactatgcagccatcagccgtgccattctggacctcgtgctgtactacaactggaagacagttaccgtggtatatgaggatagcaccggcctcataagactgcaggaattgattaaggccccaagccggtataacataaagataaagattcggcagttaccatcaggcaacaaggatgctaagccattattaaaggagatgaagaaaggcaaggagttctacgtgatcttcgactgctctcacgagaccgcagcggagatcctgaagcagattctctttatgggcatgatgacagagtactatcactatttttttacaaccctggatctcttcgccctggatttggagctgtaccgatacagtggcgttaatatgacgggcttccggctacttaacattgataatccgcatgtgtctagcattattgaaaaatggagtatggagcgattgcaggccccccctcgccccgaaacaggcttattggacggcatgatgacaacggaggcggccttaatgtatgatgctgtctatatggtagccatcgcctcgcaccgcgctagccagcttaccgtgagcagcttgcagtgccatagacataagccatggcgtttaggtccaaggtttatgaatttaatcaaagaggcccgctgggacggcctgactgggcacattacattcaataagaccaacggccttagaaaagactttgacttggatattatttccttgaaagaagagggcactgagaaaatcggcatatggaacagcaactccgggttgaacatgactgattcaaacaaggataaaagcagcaatatcactgattccctagcaaatcgtactctgattgttaccaccattctagaggagccctacgtcatgtatcggaagtccgacaagcctttgtatggcaatgaccggtttgaggggtactgtctggacctcctcaaagagctctccaatatactgggctttatttatgacgtgaagctcgtccccgatggcaaatacggcgcgcaaaatgataaaggcgaatggaatggtatggtcaaagaacttattgaccatagggcagacctggctgtagcgccattgacaattacatatgtccgcgagaaagtaatcgatttctcgaaaccctttatgacgctgggcatatccattctgtataggaaacccaacggcacaaatccgggcgtgttcagtttcctcaaccctctgtcgccagatatatggatgtacgtattgctcgcctgcctcggagtctcctgtgtgctgttcgtgatagccaggtttacgccttacgagtggtataatcctcatccatgtaaccctgactctgacgtggtggaaaataactttactctattgaatagcttctggttcggggttggcgccctgatgcagcaggggagtgagctgatgccaaaagccctgtctaccagaatcgtcggaggcatttggtggttctttactctgatcattatttcaagttacaccgccaatctggccgcatttctgactgtggaacgtatggagagtccaatcgacagcgccgatgacctggcaaagcaaacaaagatcgagtatggtgcagtgcgcgatggctctaccatgactttctttaaaaaaagtaagatcagtacatatgaaaagatgtgggcattcatgtcttcacgtcaacagaccgcactggtacgaaatagtgatgaaggtattcagagggtgcttacaaccgactacgctttgctcatggaatcgacctccatcgaatatgtaactcaaaggaactgcaacttgacgcagatcgggggcctcatcgactcaaagggatatggcgtcggcactcctatcggatccccctatcgcgacaagattacaatagcaatcctacagttgcaggaagaagggaaattgcatatgatgaaggaaaagtggtggagagggaacggctgccctgaggaagacaacaaggaggcgtctgccctgggagtggagaacatcgggggcatcttcattgtgctggccgctggcctggtgctgtccgtgttcgtagcaattggggaatttatttacaaaagcaggaagaacaacgatatcgaacagtgtctgtcttttaacgccatcatggaggagctggggatttctttaaagaaccagaaaaagattaagaaaaagagccgtacgaaaggcaaatctagctttacatcaatcttaacctgtcaccagcgccgaacccagcgcaaggaaaccgtagcctag

SEQ ID NO: 189337 - DNA, 2757 bp, synthetic construct
  misc_feature 1..2757: note = Description of Artificial Sequence: Synthetic coding sequence
  source 1..2757: mol_type = other DNA
atggagcacggcaccctgctggcccagcccggcctgtggacccgggacacatcatgggccttgctgtactttctctgctacatcctcccacagactgcaccccaggtactgcgcattggggggatattcgaaaccgtagaaaatgaaccagtcaacgtggaggaactggcatttaagtttgcggtcacttctattaatagaaacagaacacttatgccaaacactactcttacatacgatatacaacgcatcaatttattcgactctttcgaagcttctcgacgcgcttgcgaccagctcgccttgggcgttgcagcattgttcggaccatcgcactctagctccgtgtcagcggtgcaaagcatctgtaatgctctggaagttcctcatatccaaacacgctggaaacacccctcagtcgacaataaagatcttttctacatcaacttgtatcctgactacgccgctatttccagggccattctggatcttgtgctgtattataattggaagaccgtgaccgtggtgtacgaggatagtacagggcttatcagactgcaggagctgatcaaggccccatcgcgatacaatatcaagatcaagatccgtcagctgccaagcgggaataaggacgccaaaccgttgttgaaggagatgaaaaaaggtaaagagttctatgtgatctttgattgctcacatgagacagccgccgagattctgaaacagattctgttcatgggcatgatgacagagtattatcactacttttttacaactctggacctgttcgccctggatttggaactgtaccgatactctggagtaaacatgacaggattccgtcttctaaacatcgataatccacacgtgagttccattatagagaaatggagcatggaacgactgcaggcccctcctcgccctgaaaccggcctgctcgatgggatgatgactaccgaagcggcattaatgtacgatgccgtgtacatggtcgccatagcttctcacagagcaagccagctcacggttagctctcttcaatgtcaccgtcacaaaccctggcggctgggcccccgcttcatgaacctgataaaagaagcccggtgggacggactgactggccatatcacctttaacaagacaaatggtttgcgaaaggattttgatctggacatcatctctctgaaggaagaggggaccgagaaagcagcaggcgaggtcagcaagcacctgtacaaggtatggaaaaaaatcgggatatggaacagtaattccggactgaacatgaccgattctaataaggataagtcaagcaatatcaccgattcactcgcaaacagaacattaattgttactacaatattagaagagccgtatgtgatgtaccgcaagtctgataagccactgtacggcaacgacaggtttgagggatactgtctggaccttcttaaagaacttagtaacatcctggggtttatttacgacgtgaagcttgtgcccgatggaaaatatggtgcccaaaatgataaaggcgaatggaacggcatggtgaaggaactcatagaccatcgcgccgatctggcagtcgccccactgactataacatacgtgcgtgaaaaggtcattgactttagcaagcctttcatgacactgggcatatcgatactttatagaaaacctaatggtaccaatcccggggtgttctccttcctcaaccctttgagcccagacatatggatgtatgtgctacttgcctgccttggcgtcagttgtgtgctctttgtgattgctcgatttaccccatatgaatggtataatcctcacccttgtaacccggattccgatgtagtagaaaacaatttcactttattgaacagtttctggtttggagtaggcgccctcatgcagcaaggaagcgaactgatgccaaaagccctgtcgacacgcatcgtagggggcatctggtggtttttcaccctcatcataatcagcagttacacagcgaacctggcggcgttccttacagttgagcggatggaaagtccaatagactctgctgatgaccttgccaagcagactaagatagagtatggcgcagtgagagatggtagcacgatgacattctttaaaaagagtaagatctccacatatgagaaaatgtgggcctttatgtctagccggcagcagaccgcactggtgagaaacagcgatgaggggattcagcgggtgctgactaccgactacgcccttctgatggaaagcacgagcatcgagtatgtcacccagcgaaattgcaacctgacgcagattggaggcctgattgattcaaaagggtacggagtcgggacacccattggatccccttacagagacaagattaccatcgccatcctacagcttcaagaagagggtaaactgcatatgatgaaagaaaaatggtggaggggcaatggctgccctgaggaggacaacaaagaggcctctgccctgggagtggagaatattggggggattttcatagtattggctgcgggacttgtgctgtcagtcttcgttgccatcggtgaattcatctataaaagcaggaagaacaacgacattgagcaagctttctgcttcttctacggcctccagtgcaagcagacacaccccactaacagtacttccggcactacacttagtactgatctggagtgtggcaaactgattcgcgaggaacgaggaattcgcaagcagtcaagtgttcataccgtttag

SEQ ID NO: 189338 - DNA, 2712 bp, synthetic construct
  misc_feature 1..2712: note = Description of Artificial Sequence: Synthetic coding sequence
  source 1..2712: mol_type = other DNA
atggagcacggcaccctgctggcccagcccggcctgtggacccgggacacgtcatgggccctgctctattttctctgctatatactgcctcaaactgctccccaggtactgaggataggcggaatcttcgagactgtggaaaatgaaccagtcaacgtagaggagctagccttcaagttcgccgttacaagcatcaacaggaaccgaacactcatgcctaacaccacacttacttacgacatccaaagaatcaacctttttgacagcttcgaggccagtcgccgggcctgcgaccagctggcactgggagttgccgccttattcggaccttcccactcttcttctgtctcggccgtgcagtctatctgtaatgctttagaggtgccacatattcagacccggtggaagcacccatcagtagataacaaagacctgttttacattaacctgtatccagattatgctgcgatatcaagagctatcctggacctggtgctgtattacaactggaaaaccgttacagtggtttatgaggattctacaggactgatccggttgcaggagcttattaaggccccatccaggtacaatatcaagatcaagattaggcagctccctagcggcaacaaggacgccaaacctcttttgaaagagatgaagaagggtaaagagttttatgtgatctttgactgctcacatgagaccgcagctgaaattctgaagcagatcctcttcatgggcatgatgaccgaatattaccactacttttttactaccctcgacctgttcgctctcgacctggagctgtacagatactcaggggtcaatatgaccgggtttagattgctgaacatagacaatcctcacgtaagctctataattgaaaagtggtctatggagcgccttcaggctcccccacgacctgaaacgggtctcttggatggaatgatgacaacagaagctgctctgatgtatgatgctgtgtacatggtggcaatagcatctcatagggcctcgcaactgaccgtgagcagcctccagtgccaccggcacaagccctggcggttgggccctcggttcatgaatcttatcaaggaggctagatgggatgggctgacgggtcacattactttcaacaagacgaacgggttgcgcaaagactttgacctggacatcatctccctgaaggaggaagggaccgaaaaaataggtatctggaattcgaactcaggcttgaacatgacggacagtaataaggacaaatcttcaaatatcacggactcactcgccaaccgtactttaatcgtgaccacaattctcgaggaaccgtacgttatgtataggaaaagtgacaaaccattatacggtaacgatcgtttcgagggatactgtttagacctgctcaaggaactctccaatattttgggatttatctacgatgtaaaactggtccccgacggtaaatacggcgctcagaatgacaagggagaatggaatggtatggtcaaagaactaatcgatcatagggctgatctggcagtggctcctcttaccattacttacgtccgcgagaaggttatagatttctcgaagccctttatgactctagggatctcaattctctataggaagccaaacgggacaaacccgggtgtcttctcgttccttaatcccctctctccagacatatggatgtatgtgctgctcgcgtgtctgggggtttcctgcgtgctcttcgttatcgctaggtttacgccatacgaatggtacaatccccacccatgtaatccagattctgacgttgtggagaataatttcactctgctgaattcattttggttcggagtgggggcactgatgcagcaaggctccgagttaatgccaaaagctctgtccacccggatagtgggaggaatttggtggttctttacgctaattataatcagcagctacaccgccaacctggccgcattccttacagtggagcggatggaaagccccatcgatagcgcagatgacctcgccaaacagactaagattgaatatggtgccgtccgggacggctccacaatgactttttttaaaaagtcaaaaattagtacttacgaaaagatgtgggcattcatgagttctcgtcagcagacagctcttgttcgaaattccgatgagggcattcagagagttctgacgactgactacgctctgctgatggagagtacttctattgagtacgtgacccagagaaactgcaatctgactcagataggcggcctcatcgactcaaaaggttatggggtgggaacaccaatcggtagcccttatcgagacaaaattaccatagccattctgcaactccaggaggaggggaagctgcatatgatgaaagaaaagtggtggcgcggaaacggttgccccgaggaggacaataaagaggccagtgccctgggtgtggaaaatatcggtggcatcttcattgtgctggccgccggcctcgttctcagcgtgtttgtggcaattggagaattcatttataagagccgaaagaataatgatatcgaacaggccttctgctttttctacggcctccagtgcaagcagacacacccgacgaacagcaccagcggcactacacttagtactgacttagagtgcggtaagctcatccgcgaggaaagggggatccgaaagcagtcaagtgtccatacagtttag

SEQ ID NO: 189339 - DNA, 2763 bp, synthetic construct
  misc_feature 1..2763: note = Description of Artificial Sequence: Synthetic coding sequence
  source 1..2763: mol_type = other DNA
atggagcacggcaccctgctggcccagcccggcctgtggacccgggatacaagctgggctctcttgtatttcttgtgttatattctgccacaaactgctccccaggtgttaaggattggcggtatttttgaaacagttgagaacgagccagtgaatgtggaggaattggcattcaaattcgcagttactagtataaatcgcaatcggacactgatgcctaatactaccctgacctacgatattcagaggatcaacttattcgattcgtttgaagcatccaggagagcatgtgaccagctggcactgggtgtggccgcgctgtttggcccctcacattcttctagtgtgtcggcagtgcagtcaatctgcaacgctttagaagtgccacacatacagacccgttggaaacacccgtccgtggataacaaggacctcttctacattaacctttatccggattacgcggctatttcccgggctatattggacctcgtcctgtattacaattggaaaaccgtcactgtggtgtacgaagattccaccgggctaattagattacaggagctgattaaggcaccatcacggtacaatatcaagattaaaattcggcagctgcccagcggtaataaagatgctaagcccctgctcaaggagatgaaaaagggcaaggaattctacgtgatattcgattgctcacacgagaccgccgctgaaatcttgaaacaaatactttttatgggtatgatgaccgagtactatcactacttctttactacacttgacctgttcgccctggacttagagctgtatcggtactccggcgtgaacatgaccggttttagactcctcaatattgacaatccccatgtgtcatccatcatcgagaagtggagtatggaacgactccaggcacctccacgtcctgagactggcctcctggacggcatgatgaccaccgaggcggccctcatgtacgacgcagtgtacatggtcgcaatcgccagccaccgggcaagtcaactgacagtgagtagcctgcagtgtcatcgccataagccgtggcggttgggcccacggtttatgaacttgattaaagaagcgcggtgggacggcctgacgggccacatcacctttaataagactaacggacttagaaaggatttcgacctggatatcataagcctaaaagaagaagggactgaaaaggccgcaggtgaggtgtctaaacatctgtacaaagtctggaaaaaaataggaatctggaatagcaactcaggtttgaacatgaccgatagtaacaaggacaagagctcgaacatcactgactcattagcgaatcgcactctaatagtgacaactatcctggaggaaccttacgttatgtaccggaagtcagacaaacccctgtatgggaacgataggtttgaaggctattgtctagacctgctgaaagagttatccaatatcctgggtttcatctacgacgtgaaattagtgcccgatggcaagtacggggctcagaatgataaaggggagtggaatggcatggttaaggagctgattgatcaccgggcagatttggccgtggccccccttacaatcacatacgtccgcgaaaaagtcatagatttcagcaaaccattcatgacattgggcatatctattctgtaccgcaaaccaaatgggacaaatccaggcgtgttttcattcctgaaccctctgtccccagacatctggatgtacgtgctgctcgcctgtctgggagtgagctgcgtgttgttcgtgatcgctagatttaccccatacgagtggtacaatcctcacccatgtaatcctgattcagatgttgttgaaaataactttacactgctgaactccttctggtttggcgttggcgcactgatgcagcagggctccgagctcatgccaaaggcactcagcaccagaattgtggggggcatttggtggtttttcaccctaatcattatttcaagttatacagcaaacctcgcggcctttttgacggtggaaaggatggaatcccctattgattcggccgatgatcttgccaaacaaacgaaaatagagtacggcgcagtgcgggatggcagcaccatgacattttttaaaaagagcaagattagtacttacgagaaaatgtgggctttcatgagctcaagacagcagaccgcacttgtgaggaacagtgacgaggggatccaaagagttctcacaaccgactatgccctgctgatggagagcaccagcattgaatatgttacacagaggaattgcaacctcactcagatcgggggcctgatcgatagcaaggggtacggagtcgggactcctattgggagcccttaccgtgacaagattaccattgctatcctgcaattgcaggaggaggggaagcttcatatgatgaaggagaagtggtggcgaggaaacgggtgccctgaagaagataataaagaggcgagcgctctgggggtggaaaatatcggaggcatcttcatagttctcgcagcaggtctggtcctgagcgtgttcgtcgctataggcgagttcatctataaatcccgtaagaataacgatatcgaacagtgcctgtctttcaatgctataatggaggaactagggataagcctcaagaaccagaaaaaaatcaagaagaagagccgaaccaagggcaagagtagtttcacaagcatcctgacatgccaccagaggcgaacccagcgcaaagagaccgtagcctag

SEQ ID NO: 189340 - DNA, 2805 bp, synthetic construct
  misc_feature 1..2805: note = Description of Artificial Sequence: Synthetic coding sequence
  source 1..2805: mol_type = other DNA
atggagcacggcaccctgctggcccagcccggcctgtggacccgggacacgtcatgggcactgctgtacttcctctgttacatcctgccccaaaccgctccccaagtgctgagaatcggcggcatctttgagactgttgaaaatgagcctgtgaatgtcgaggaactggcattcaaatttgccgtaactagcataaaccggaaccggaccctgatgcctaataccaccttgacttacgatatccagcgcatcaacttattcgactcgtttgaggcatccaggagagcttgcgatcagttggccttgggtgttgctgctctctttggccctagccacagcagctctgtctctgcagtccagagcatctgtaacgcactagaggttcctcatatccagactcgatggaagcatcctagcgtggataataaggatctattctacattaatctttatcctgattacgcggcaatctctcgggccatcctcgatcttgttctttactataactggaaaactgtcaccgtggtgtacgaagactctacgggcctgattaggctccaagaactcattaaagcacccagtagatacaatatcaaaatcaaaatccggcagctgccctccgggaacaaagatgcgaaacctcttcttaaggaaatgaaaaaggggaaggagttctatgtgatctttgactgttcccacgaaaccgcagctgaaatactgaaacagatactctttatgggcatgatgacagagtactaccattacttcttcaccacactggatctctttgcactggaccttgagctctacaggtacagtggggtcaatatgactggattcagacttcttaatatcgacaatccacatgtgtcatcaatcatcgaaaaatggtcaatggagcgactgcaggcgccccctcgccctgagacaggccttctggatggaatgatgaccaccgaagccgctctgatgtacgacgcggtgtacatggtcgctatcgccagtcatcgcgccagccagctgaccgttagctctcttcagtgccatcggcacaaaccatggaggctagggccgaggtttatgaatctgatcaaggaggccagatgggatggtctgactggacacattacgtttaacaaaaccaacggtctcagaaaggatttcgacctggacataatctcactcaaggaggaaggtaccgagaagattggtatctggaattccaattccggcctgaatatgaccgacagtaacaaggataaatcctctaacataaccgacagcctagccaacaggacactcatcgtcacaacaatactggaggagccgtatgtgatgtatcgtaagagcgataagcccctttatggaaacgaccgctttgagggttactgcctggatttgctgaaggaattgtctaatattctggggttcatatatgacgtgaagctggtcccggatgggaagtacggggcccagaatgataagggtgagtggaacggtatggtgaaggaactgatcgaccaccgcgccgacctcgctgttgccccacttaccatcacatatgttagggaaaaggttatcgacttttccaaacctttcatgacacttgggatatctatcctgtacaggaagcccaacggaactaatccaggcgtgttctctttcttaaacccgctatcaccagacatctggatgtacgtcttactcgcttgcctcggagtgtcttgcgttctgtttgtgatagctcgatttaccccttacgaatggtataatcctcatccatgcaaccccgatagcgacgtggtcgagaataactttaccctattaaactcattctggttcggtgttggtgctctgatgcagcaaggatccgaactaatgccaaaggccctctctaccagaatcgtgggaggcatttggtggttcttcacactcatcataattagcagctacacagctaacctggccgcattcctcacagtagaacggatggagtcaccaatcgactctgccgatgaccttgcaaagcaaactaaaattgagtatggtgctgtgcgggacggttccaccatgaccttctttaaaaagtcgaagattagtacatacgaaaagatgtgggcctttatgagctctcgccagcagaccgctctagtgagaaatagcgacgaggggatccaacgcgtgcttactacggactatgcgctcctaatggaaagcactagcattgagtacgtaacacaacgaaactgcaaccttacccagatcggcgggttgatcgattccaaagggtacggagtcggcacccccatcgggtcaccataccgcgataagatcacaattgcaatactacaactgcaggaggaaggtaagctgcacatgatgaaagagaagtggtggagagggaacggctgtcccgaggaggataacaaggaggccagcgctcttggagtggaaaacatcggagggattttcatcgttctggccgcaggactggttctgtcagtgtttgtggccataggagaatttatttacaagagccgcaagaacaacgatatcgagcagaaaggaaaaagttccagaatacgcttttattttcgtaacaaagtccgcttccacggacgtaagaaacagagcctgggggttgagaagtgtctgtccttcaatgctattatggaggagctggggattagcctgaagaaccaaaagaagatcaagaagaagtcccgtacaaagggcaagtcgagcttcacatccattctgacctgccatcaaagacgaacacagcgtaaagaaaccgttgcctag

SEQ ID NO: 189341 - DNA, 2769 bp, synthetic construct
  misc_feature 1..2769: note = Description of Artificial Sequence: Synthetic coding sequence
  source 1..2769: mol_type = other DNA
atggagcacggcaccctgctggcccagcccggcctgtggacccgggatacatcttgggcccttctgtactttctctgttacatattgcctcagacagcaccccaggttttaaggatcggcggtattttcgaaaccgtggaaaatgagccggtgaacgtggaagagctcgcattcaaattcgcggtcaccagcattaatcggaacaggacactgatgccaaatacaactttgacctacgacattcagaggattaaccttttcgactcatttgaggccagcaggcgggcctgtgaccagttagctctcggagtggctgccctgtttggtccctcacactctagttccgtgagtgctgtccagtctatctgtaacgcactggaggtgccacacatccagacgcgttggaaacatcccagtgtcgacaacaaagatcttttctacattaacctgtatcccgactacgcagccatcagccgcgctattttggaccttgtactgtactataactggaaaacagttacagttgtgtacgaggactccaccgggctcataagattgcaggaactgataaaggcacccagtaggtataacattaagatcaagatcaggcagctgcctagcggtaataaggacgcaaagcctctgctgaaagagatgaaaaagggcaaggaattttatgtgattttcgattgctctcacgagaccgctgctgaaatcctgaagcagatcctgttcatgggcatgatgacagagtactatcactatttcttcacaaccctcgacctatttgcccttgacctggagttatatagatactctggagtgaatatgaccggttttcggctgctgaatatcgataacccacacgtatcctcaatcattgaaaagtggagcatggagagactgcaggccccccctaggcctgagaccggcctgctcgacggcatgatgactacagaggccgcattgatgtacgacgccgtgtacatggtggccatcgcttcccaccgggccagccagctgacagtttcaagtttgcagtgccacagacacaaaccttggcgattaggacctaggttcatgaacctgatcaaggaagcaaccgcacgctgggacggactcactgggcacatcacattcaataagacaaacggcctccgaaaagatttcgatctggacattatctcactcaaggaggaagggaccgagaaggccgccggcgaagtttctaagcacctctataaagtgtggaagaaaatagggatctggaatagcaattctggcctcaacatgaccgacagcaataaggataaatcttccaacattaccgattccctggctaatcgaactctgatagtcacgaccatcctggaggagccctatgtaatgtacagaaaatcagataagcccctttatggtaatgatagatttgagggttactgcctggatctacttaaagaacttagcaatatcttgggcttcatttacgatgtcaaactcgtgcccgacggaaagtatggggctcagaatgacaaaggcgaatggaatggaatggttaaggagctgattgatcatcgagccgatctggcagtcgcgcctttgactattacatacgttcgagagaaggtgatcgatttctcaaagccatttatgaccctggggatcagcattttgtatcggaaacccaacggcacaaatcccggagtcttttcttttctgaatcccctttcacccgatatctggatgtatgtgttattagcctgcctaggagtgagttgcgtgctgtttgtgatagcccgatttactccttacgagtggtacaaccctcatccttgtaatcccgacagtgatgttgtagagaataatttcactctccttaactcattctggttcggcgtgggcgctttaatgcagcagggctccgaactgatgcccaaggccctgagtactcgaatagtggggggcatctggtggttttttaccttgattattatttcctcttatacagccaatctggctgcctttctcacggtggagcgcatggagtcccccatcgactctgctgatgacctggcaaaacagacaaaaatcgagtacggggctgtcagagatggctcgactatgaccttctttaagaagtcaaagatctccacgtatgaaaagatgtgggccttcatgagttcacggcagcagaccgctttggtaaggaattccgatgagggtatccagcgtgtactgaccaccgactacgcgctcttgatggagtctaccagcatcgaatacgtaactcagaggaattgtaacctcacacagatcggtggtctgatcgactcgaaagggtacggtgtggggactccaatcggctctccgtatcgggataaaatcaccattgctatcctgcagttacaggaagaagggaaactgcacatgatgaaagaaaagtggtggcgaggtaacggttgcccagaggaggacaacaaggaagcctctgcactgggcgtcgaaaatatcggcggtatatttattgtcctggctgccggcctggtgctgtctgttttcgtggccattggagagttcatttacaagtcaaggaagaacaacgatatagagcagtgcctgagtttcaacgccattatggaagagctggggatctccctcaagaatcaaaaaaaaattaagaagaaaagtcgcaccaaaggaaagtcatcttttacttccatattgacatgccatcaacgaagaacccagagaaaagagaccgtggcctag

SEQ ID NO: 189342 - DNA, 2247 bp, synthetic construct
  misc_feature 1..2247: note = Description of Artificial Sequence: Synthetic coding sequence
  source 1..2247: mol_type = other DNA
atggagcacggcaccctgctggcccagcccggcctgtggacccgggacacctcctgggctctgctgtatttcctgtgttacatcctgccccagactgccccgcaggtgctaaggatcgcttgtgaccaactggcgctgggggtggctgcactctttggtccttcgcacagttcatctgtctcagccgtgcaatctatctgcaacgctttagaggttccgcatatccagacaagatggaagcatccgtcagtggataacaaggatctcttctacattaatctgtatccagattacgcagccatctccagagcaatcttagatctggtcttgtactacaattggaagacagtcaccgttgtttatgaggacagtaccggactgatcaggcttcaggagctgataaaagctccaagccgctacaacatcaagataaaaataaggcaattgccctctggcaacaaggacgcaaagcccctcctgaaagaaatgaaaaagggcaaagaattctatgtaatcttcgactgttctcacgagactgccgccgaaatcctcaagcagatactttttatggggatgatgaccgagtattaccattacttcttcactacactggatctgtttgccctggatctcgagctgtataggtactccggagtgaacatgacaggattccgacttcttaacatcgataacccccacgtgagtagtattattgagaagtggagcatggagaggctccaggctcccccacggccagaaactggactccttgatggaatgatgacaactgaggctgccctgatgtatgacgctgtttacatggttgcgatcgcatctcatcgagccagtcagttgacggtttcatccctccaatgccaccgacataaaccttggagactcggacctaggtttatgaatttaattaaagaagctaggtgggacggtcttactggccatataactttcaataagactaacggcctccgcaaagacttcgatttggacatcatcagcctgaaggaagaaggaactgaaaaaatcggtatctggaatagcaattcaggcctgaacatgaccgattccaataaggacaagtcaagcaacatcaccgattctctcgctaatcgcaccctgatcgtaacaacgattctgagagcagatctagctgtagcaccgttaaccattacctatgtgcgcgagaaagttattgatttctccaaaccatttatgaccctgggtattagtattctgtatcggaaacccaacggaactaatcccggtgttttctcgttcttgaatcctctcagccctgacatttggatgtacgtgctcctggcttgcctgggcgtttcatgtgttctttttgtaatcgcacgttttaccccttatgagtggtacaacccacacccttgtaatcctgattccgatgtggttgagaataatttcacactgctgaattccttctggttcggtgtaggtgctttaatgcagcagggttctgaactaatgcctaaggccctgagcactcgcattgtgggcggtatctggtggttcttcacactgattatcatctcaagttacactgctaacctcgccgcatttttgacggtggagcgcatggagtcacccattgactcggctgacgaccttgctaagcagaccaagattgagtacggcgctgtcagggatgggtccaccatgacatttttcaaaaagagtaaaatcagtacctacgaaaaaatgtgggccttcatgtcctcaaggcagcagactgccctcgtaaggaattcagatgaaggaattcagcgggtgttaaccacagattacgcccttttgatggagtcaacttcaattgagtacgtcactcaacgcaactgtaatctcactcagattggtggactgatcgacagtaaaggatacggcgtcgggacacctattggatctccctacagggacaagattactatcgcaatcctgcagctgcaagaggaaggaaaactgcacatgatgaaggagaagtggtggagagggaacggttgcccagaggaggataataaggaagcttcggctctaggggttgaaaacatcggcgggatctttatcgtcttggctgccgggctagtcctaagtgtgttcgtcgcaataggcgaatttatctacaaaagccgaaagaacaacgacatagaacagtgtctttccttcaatgccataatggaggaactcggcattagcttaaaaaaccagtag

SEQ ID NO: 189343 - DNA, 2610 bp, synthetic construct
  misc_feature 1..2610: note = Description of Artificial Sequence: Synthetic coding sequence
  source 1..2610: mol_type = other DNA
atgaagatcatcttccccatcctgagcaaccccgtgttccggcggaccgtgaaacttctgctgtgcttgttatggatcggctacagtcagggaacaactcacgttttgaggtttggggggatcttcgaatatgttgagtcaggcccaatgggggccgaagagcttgccttccgctttgcagtcaatacgatcaacaggaatcgtactctactgcctaatacaacgctgacttacgacacccagaagatcaacttgtatgacagctttgaagcatctaaaaaggcttgtgatcaactttctcttggcgtcgccgccatcttcggcccaagccactcctcatctgccaatgctgtccagtcaatctgcaatgcccttggggtgccccacatccagactcgctggaagcaccaggtatctgacaacaaagactcgttttatgtgagtctgtatccagatttttcctccttgtcgagggccatactggatctcgtacagttcttcaagtggaaaacagtgacagtggtgtacgacgacagtaccgggctcattcggctgcaggaactcattaaggctccaagcaggtataatttgcgcctgaagattcgtcagctgcccgccgataccaaggatgctaagcctttacttaaggaaatgaagagaggcaaagagtttcatgtgatcttcgactgctcccatgagatggccgccggaatattgaaacaagccttagccatggggatgatgacggagtactatcattacatcttcactaccctggacttgttcgcacttgacgtcgagccttatcgctacagtggcgtgaacatgaccggcttcaggattcttaacaccgagaacacacaggtaagtagcatcatcgaaaaatggtcgatggagcggctgcaagccccaccaaagcccgatagcggactgcttgatggctttatgaccaccgacgccgcgctgatgtatgacgcggtgcacgtggttagcgtggccgtgcaacaatttccgcagatgactgtgtcctccctccagtgcaaccgacataagccgtggcggtttggaaccaggttcatgagcctgattaaggaagcacactgggaagggctcacaggtcgtattacctttaataagactaacggattgcgcaccgacttcgatctcgatgtgattagcctcaaggaagaggggctcgaaaagatcggaacgtgggatcccgcttctggcctgaacatgaccgaaagccagaagggcaagccagctaatatcacagacagcctcagcaatcgcagcctgatagtgacaacaattcttgaagaaccgtacgtgttgtttaaaaaatcagacaagcctctgtatggcaatgaccgatttgagggctactgtattgatttgcttagagagttgagtacaattctgggatttacttatgagatccgcctggttgaagacggaaagtacggagctcaggacgatgctaatggacagtggaatggtatggttagggagctgatagatcataaagctgacctcgctgtcgctccactcgcaatcacctatgtaagggaaaaagtaatcgatttttccaagccgttcatgactttgggcatcagcattctttacaggaagcctaacggcaccaaccctggagtctttagctttctcaatccgttgtctcccgacatctggatgtacatactgctggcctatctcggcgtgtcttgcgtgttgtttgttattgctcgtttcagtccctacgagtggtataacccccatccgtgcaatccagacagtgatgtggttgaaaacaactttacattgctaaattctttttggttcggcgtgggagcccttatgcagcaggggtccgaattgatgccaaaagccctgtcaacaagaatcgttggcggcatatggtggtttttcactctgatcattattagctcctatacggccaatctcgccgcattcctcacggttgagcgaatggaaagccccattgactctgctgacgacctcgcaaagcagactaaaattgagtacggagctgtcgaagatggcgccaccatgacattcttcaagaaatccaagatctctacatatgataagatgtgggctttcatgagctccagaagacagtctgtattggtcaagagcaacgaagagggcatccaaagagtccttacgtcagattatgcttttctgatggaaagtaccactatagaattcgtgactcagaggaattgcaacctgacccagatcggaggcttgattgatagtaagggatacggtgttggaacacctatgggttctccctatagagacaaaattactatcgctattctgcagctgcaggaggaagggaagctgcatatgatgaaggaaaaatggtggcgcgggaatggctgcccagaagaagaatcaaaagaggcttctgcgctgggtgttcagaatatcggagggattttcattgtcctggcagctggtctcgtacttagtgtgtttgtagccgtgggagaattcctgtataagagcaaaaagaatgcgcaactcgagaaggagtcctcgatctggctcgtgcctccttatcaccccgatacggtgtag

SEQ ID NO: 189344 - DNA, 2580 bp, synthetic construct
  misc_feature 1..2580: note = Description of Artificial Sequence: Synthetic coding sequence
  source 1..2580: mol_type = other DNA
atgggcgccgaggagctggccttccggttcgccgtgaacaccatcaatcgcaaccgcactctgctcccgaacactacactcacctatgatacgcagaaaatcaacttgtatgacagctttgaagcgtctaaaaaggcttgcgaccagctgagtttgggcgtagccgcgatctttggaccgtcccattcctcaagcgccaacgctgttcagagtatttgtaacgccctgggagtgcctcacattcagaccagatggaagcaccaggtgagcgacaataaagacagcttctatgtcagcctgtatccagacttctcaagtctgtctagggcaatcctggacttggtgcagttctttaaatggaagactgtgaccgtggtttatgacgatagtacgggtttaatcagactgcaggaactcattaaggctcctagtcgctacaatttgaggctcaaaatacggcagctccccgctgatactaaggacgctaaaccactgctgaaggagatgaaacggggaaaggagttccacgtgattttcgactgttcgcatgaaatggctgccggaatattaaagcaggctttggctatgggaatgatgacagagtattaccactacatttttacaaccctggatttgtttgccctcgatgtggagccttatagatattctggggtcaacatgacagggttcaggattctaaatacagagaatacacaggtgtcgtccattatagaaaaatggtccatggagcggttacaagccccgccaaagcccgactccgggctcctggacgggtttatgacaacagacgccgcgctgatgtacgacgctgtccacgtggtttctgtggcagtacagcagttcccccaaatgacagttagcagcctccagtgtaatcggcataaaccttggcgctttggcacacgttttatgtctctgattaaggaagctcattgggagggtctcactggtagaatcacctttaataagaccaatggtctgcgaacggacttcgatttagatgtgatctctctcaaggaggaaggcttggaaaagatcggaacgtgggacccagcctcaggcctgaacatgaccgaatcgcagaaaggcaaacctgccaatattactgattcattatctaacagaagcctcattgttacaactattttggaagaaccgtacgtgctctttaaaaagtctgacaaaccactgtacgggaatgaccgttttgaaggctattgtatcgatctgctaagggaattgagcaccattctgggctttacctatgaaatccgacttgtggaagacggcaagtatggagcacaggatgatgccaacgggcagtggaatggcatggtgagagagcttatcgaccataaagcggatctcgccgtggctccccttgcgatcacttacgtgagggagaaagttattgattttagtaagccttttatgactttaggcatctcaattctgtaccgaaaacctaacggaaccaatcccggcgtattctctttcctcaaccctctctcacccgatatttggatgtatatcctgttagcataccttggtgtatcttgcgtcttgtttgtgatagcgcggtttagtccatacgagtggtataatccgcatccatgcaatccagactccgatgtggtggaaaataacttcaccctgctgaatagtttctggtttggggtaggagcgctgatgcagcagggctcagagctcatgcccaaagcgctgagcactagaatcgtgggcggaatttggtggttttttaccctgattataatttcgtcctacaccgccaatttggccgctttcttaacagttgaacgcatggaatcccctattgactctgcagatgacctggccaagcaaactaagatcgagtacggagcagttgaggacggcgcaacaatgacgttcttcaaaaaaagcaaaattagcacttatgacaaaatgtgggcgtttatgagttccagacgtcaatcagtgctagtgaaaagcaacgaagaaggtattcagcgtgtactcaccagcgattatgccttcttgatggaatccactactattgaatttgtgacacaacgtaactgtaacctgacccagataggaggtctaattgattctaaaggctatggcgttggaaccccaatgggctcaccctatagagacaaaatcaccatcgcgattctgcagcttcaggaggagggcaagctccacatgatgaaggaaaagtggtggagaggaaacggctgtcccgaagaggaaagtaaggaggcgtctgccctgggcgtgcagaacataggagggatctttattgtcctggcagcagggctggtactgtcggtgttcgtcgccgttggggaattcctgtacaagagcaagaaaaacgcccagttggaaaagaggtccttttgttcagctatggtggaggaactcaggatgtccctgaaatgtcagcggcgcttaaagcacaagccacaggcccctgtaatcgtgaaaacagaagaggtgattaacatgcataccttcaatgatagaagactgcccgggaaagaaaccatggcctag

SEQ ID NO: 189345 - DNA, 2499 bp, synthetic construct
  misc_feature 1..2499: note = Description of Artificial Sequence: Synthetic coding sequence
  source 1..2499: mol_type = other DNA
atgaagatcatcttccccatcctgagcaaccccgtgttccggcggacagtgaaattacttctgtgtctactgtggatcgggtatagccagggaaccacgcatgtccttaggtttggtgggattttcgagtacgttgagtctgggccaatgggagccgaagagttagcattccgcttcgccgtgaacaccattaatagaaaccgtacactccttccaaacacaacactaacatatgatactcaaaagatcaacctgtacgactccttcgaggctagcaagaaagcttgcgatcagctatccctgggggtcgccgcaatatttggaccatcccactcctcatccgccaacgccgttcagtccatatgcaatgcactaggtgtcccccacatccagacacgctggaagcatcaggtgagtgataacaaggactccttttatgtgtcactatatcccgactttagttcgctgtctagggccatactcgaccttgtacagttttttaaatggaaaaccgtgactgttgtatatgatgactcaacaggtcttattagactacaggaactgataaaagcaccgagccgctacaacctgcggctcaagataaggcagctccccgcagacaccaaggatgctaagccattgttaaaggagatgaaacgggggaaagagttccacgtgattttcgactgctctcatgaaatggctgccggcatcctcaagcaggctctcgcaatgggaatgatgactgagtattaccactatatattcacaacactggaccttttcgccctggatgttgagccttaccgttattctggagttaacatgactggtttcagaatcctaaatactgaaaacactcaggtgagttctattatagagaaatggagtatggaaaggttgcaggctcctcccaagcctgatagtggcctccttgatggatttatgacaacagatgctgccctgatgtacgacgccgtgcatgtcgtgagcgtagccgttcagcagtttcctcagatgacagtaagctctctccagtgcaataggcacaaaccttggaggttcgggacacgctttatgtccttgatcaaggaggcccactgggaggggctgactggccgaataaccttcaacaagaccaacggcttaaggactgatttcgatctggacgtgataagcctaaaagaggagggtctagagaagataggtacatgggatcccgcaagtggcctcaacatgaccgagagtcagaagggtaaacccgccaacatcaccgatagcttgtctaacagatcactgattgtcaccaccattctcgaggagccttatgtgttgtttaaaaagagtgataagcccctgtacgggaatgaccgatttgagggctactgtattgatctgttgagagaactgagtacaattctcgggtttacatacgagattcgtttagtggaagacggtaagtatggcgcacaggatgatgccaatggacagtggaacggcatggtgcgcgagctgattgatcacaaggccgatctggccgttgccccactggctatcacatacgttcgagagaaagtgatagattttagcaaacccttcatgacactgggtattagcatcttgtaccggaagcctaacggtagcgagctgatgccgaaggccctcagtaccaggatcgtgggcggaatctggtggtttttcacactcattattatttctagctacacagcgaatctggctgccttcctcacggttgaaaggatggaatcgccaattgacagtgccgacgatctcgccaagcagaccaagattgaatatggggccgtggaagacggcgccacgatgacttttttcaagaagagcaagataagtacctatgacaagatgtgggcattcatgtcctcccgccgccagtctgttcttgtcaaatccaacgaggaaggtattcaaagagtcctgacctccgactacgcttttctaatggagagcaccaccatcgaatttgtgacccaacggaactgtaatctcacacagatcggcggactgatcgactccaagggttatggagtcggtactcctatgggatccccctatcgagacaaaattactattgccatcctgcaattgcaggaggaaggaaaattgcacatgatgaaggagaagtggtggcgagggaatggctgcccagaggaggagtccaaggaagccagcgctctgggcgtgcagaacataggcgggatttttatcgtgcttgcggcaggcttagtgctttctgtgttcgtggcagttggcgaatttctgtataagtcgaaaaaaaacgcacaattggaaaagaggtccttctgctctgcgatggtggaagaactccgtatgagcctgaaatgccaacgcagactcaaacataaacctcaggcgcccgtgatcgtcaagacagaggaagtgattaacatgcacactttcaatgatcgccgactacctgggaaggagaccatggcatag

SEQ ID NO: 189346 - DNA, 2679 bp, synthetic construct
  misc_feature 1..2679: note = Description of Artificial Sequence: Synthetic coding sequence
  source 1..2679: mol_type = other DNA
atgaagatcatcttccccatcctgagcaaccccgtgttccggcggactgtcaaactgctgctctgccttctgtggataggttattcacagggcaccacacacgtgttgcgattcggtggcatcttcgagtacgtggagagtggaccgatgggcgccgaagagctggcttttagatttgcagtgaacacgatcaatcgaaatagaaccctcctccctaatactacattgacttacgacacccagaagataaacttgtacgatagtttcgaagcctccaagaaggcatgcgatcagttgagtctcggagtggctgccatattcgggcccagtcattcctctagcgcaaatgctgttcaaagcatttgcaacgccctgggagttcctcatatccagacccgttggaagcatcaggtcagcgataataaggactcattttatgtttctctgtaccccgactttagctcactgagccgagctatccttgacctggttcagtttttcaagtggaaaacagtcacagtggtgtatgatgactctaccggtttaattcgtctacaggaactaataaaagccccatcccggtacaacttacgcctcaagatacgccagctgcctgccgatacaaaagacgccaagccccttttaaaagaaatgaagagaggcaaggagttccacgtgatttttgactgcagtcacgaaatggctgctggaatactgaaacaggcattggcaatgggcatgatgaccgagtactaccactatatctttaccacactcgatctcttcgcgctagatgtggagccctacagatatagcggcgtgaatatgaccgggttccgcattttgaacacagaaaatacgcaagtaagcagcatcatcgaaaagtggtcaatggagaggctacaagctccccctaagcccgactccgggttgcttgatgggtttatgaccaccgatgcggctctgatgtacgacgcagtccatgttgtgtctgtggcagttcagcaattccctcagatgaccgtgagtagtctgcaatgtaatcggcacaaaccatggcgcttcggcacacgcttcatgagtctcatcaaggaggctcactgggagggattgaccggcaggattacatttaacaagacgaacgggctccgcacagatttcgacctggacgtgatttcgttgaaagaggaggggctggaaaaaattggaacatgggatcccgcatctggtctcaatatgacagagtctcaaaaaggtaagcctgctaacataactgactccctcagcaacagatcactgattgtgaccacgatcctcgaagaaccctatgtccttttcaagaagtcggacaagcccttatatggaaatgaccggttcgagggctattgtatcgatctgcttcgagagctgtccacaatcttggggttcacttacgaaatacggttagtcgaggatggcaagtacggcgcacaggacgacgccaacgggcaatggaatggcatggtgcgggaactgatcgaccacaaagcagacttggctgttgctcccttagctataacctatgtacgggaaaaggtgatcgattttagtaagccgtttatgaccctcggcattagtatcttatatcgaaagcctaacgggactaacccgggggtcttttccttcttgaatccactcagccccgacatctggatgtatattctgctggcctacctgggcgtgagctgcgtactgttcgtgatcgcaagatttagtccatacgagtggtacaaccctcacccttgtaatcctgacagcgacgtggtggagaataacttcaccctccttaacagtttctggttcggtgttggcgccttaatgcagcaggggtcagaacttatgcccaaagcactgagcacgagaatagttggaggtatttggtggttttttaccttgatcatcattagcagttataccgctaaccttgccgcatttctgacagtagaacggatggagagcccaatcgactctgccgacgaccttgcaaagcagacaaagattgagtacggcgcggtggaggatggagccactatgaccttttttaagaaatctaagatctcgacttatgacaagatgtgggcctttatgagttctaggagacagtctgtgctggtaaagtccaacgaggagggtattcaaagggtgctgacctcagactacgccttcttgatggagtctacaaccatagagtttgtgactcaacgcaactgcaatcttactcagattggaggcctgattgactcaaaggggtacggtgtcggcaccccgatgggcagtccctaccgtgataagattactatcgccatactgcaattgcaagaggagggcaagctccatatgatgaaagaaaagtggtggagggggaacggctgtccagaggaggagagcaaggaggcgtctgcgctgggagtgcaaaatatcggcggaatcttcatcgtgctggctgccggcctggtgctttccgtgttcgtggctgtgggggagttcctttataagagcaaaaagaatgcccaactggagaaacgggctaagactaagctgcctcaagactacgtgttcctgcccattctggaatcagtcagcatatccaccgtcctgagttccagcccctcttcttcctcattgtcttcttgtagctag

SEQ ID NO: 189347 - DNA, 1755 bp, synthetic construct
  misc_feature 1..1755: note = Description of Artificial Sequence: Synthetic coding sequence
  source 1..1755: mol_type = other DNA
atgaagatcatcttccccatcctgagcaaccccgtgttccggcggaccgtgaaacttcttttgtgtctcctgtggatcggctactcccagggcactacacatgtgctgaggttcggaggaatttttgagtatgttgagtcaggcccaatgggcgcagaagagctggcctttcggtttgctgttaatactattaatcgcaatagaaccctgctgccgaacacaaccctgacctatgacactcagaaaattaacctgtatgacagctttgaggccagcaaaaaggcttgcgatcaactgagtctgggggtggctgctatcttcgggcctagccactccagtagtgctaacgcagttcagagcatctgtaacgccctaggcgtgcctcacattcagacgaggtggaagcaccaggtatctgataacaaggactcgttttacgtgtcactgtaccccgacttcagttccctaagtagagcaatcctagatctcgttcagtttttcaaatggaaaactgtaacggttgtttacgatgattcaaccggcctaatccgactacaagagctgattaaggcccctagcagatacaatctcagactgaagatcaggcagttgcctgccgataccaaagatgccaagccgctcctgaaggaaatgaagcggggaaaggagtttcatgtcatattcgattgtagccatgaaatggctgccgggatcctgaaacaggctcttgccatggggatgatgaccgagtattatcattatattttcaccacgctggacctgttcgccctggacgtcgagccttaccgctacagtggcgtcaacatgacaggctttagaatcctcaatactgagaatacacaggtgtcaagcatcattgagaagtggtccatggagcggctccaggcacctcccaagccagatagcggactcctggatggctttatgactacagatgctgccctgatgtacgacgccgtacacgttgtgagcgtagccgttcaacagtttccccagatgaccgtctccagtctgcaatgtaaccgccataaaccgtggaggtttggcaccaggtttatgtcactcattaaggaagcacattgggagggcctgactggccgcattacattcaataagactaatgggttgcggaccgatttcgatctggacgtgattagtctcaaggaagagggtttagagaaaatcggcacatgggatccagccagcgggttgaacatgaccgaatcccagaaaggcaagccagctaacattacagattccctaagcaatagaagcttgatcgtcacaactattcttgaggagccttacgtcctattcaagaagagcgacaagcctctttacgggaacgataggtttgaagggtactgtatcgacctgctgcgggagcttagcaccatactcgggttcacatacgagatccgactcgtggaggatggaaagtatggcgcccaggacgacgcaaatggtcagtggaacggtatggttagagagctcatcgatcataaggcggacctcgcggtcgccccccttgctatcacatacgttcgggagaaagtgatcgactttagcaagccatttatgactctgggtattagcatactctaccgtaagcccaacgggaccaaccctggggtgttctctttcttgaaccctctgtcccctgacatctggatgtacatactgctggcgtacctgggcgtaagctgcgtacttttcgttatcgcgagattttag

SEQ ID NO: 189348 - DNA, 2610 bp, synthetic construct
  misc_feature 1..2610: note = Description of Artificial Sequence: Synthetic coding sequence
  source 1..2610: mol_type = other DNA
atgaagatcatcttccccatcctgagcaaccccgtgttccggcggacggtgaaattgctcctgtgtctactgtggataggatactctcagggtaccacgcacgtgttgcgcttcggaggcattttcgagtacgtggagtccggacctatgggggcggaggaactggctttccgctttgccgttaatactattaaccgtaataggacactgctccccaataccacccttacatatgacacacagaagattaacctttatgacagcttcgaggctagtaaaaaggcatgtgaccaattgtctttgggcgtcgcagctatttttggaccctcgcattcgtcttcagcaaatgcggtccagtctatctgcaatgcccttggagtcccacacatacagaccaggtggaaacaccaagtatccgacaataaagactccttctacgtcagcctgtaccctgatttttcaagtctgtccagagctatcctagacctggtccagttcttcaagtggaaaaccgtgaccgtagtttacgatgattcaactggtctgataaggttgcaggaactgatcaaagcaccaagtaggtataatctacggctcaagatccgtcagcttccagccgacacaaaagatgcaaaacctctgctcaaggagatgaagcggggaaaagagttccacgtcatcttcgattgcagtcacgagatggcggctggaattcttaaacaggccctggcaatgggaatgatgaccgagtactaccattatatctttacaaccctggaccttttcgcactcgacgtggaaccatatagatattccggagttaacatgacgggctttcgaatcctcaatacagagaacacacaggtctcctctataattgaaaaatggtcaatggagaggctgcaggcaccacctaaacctgactccggcctcctggacgggtttatgaccactgatgcagcattaatgtacgatgctgtccatgttgtcagcgtcgccgttcagcagtttcctcaaatgaccgtctcttccctccagtgcaaccggcataagccttggcgctttggaacccgctttatgtccctgatcaaagaagctcactgggaggggctgacaggaagaatcacttttaacaaaaccaacggactgcggacagattttgatctcgacgtcatctcccttaaagaagaaggtctcgaaaagatcgggacgtgggatccagcctccggcctgaacatgacagagtcccaaaaagggaagccagctaatataacggactcactaagtaacaggtctctcatcgtcaccacaattctggaagagccttacgtgttatttaagaagtctgacaagcctctctacggcaacgacagattcgagggctattgtattgacctgctccgtgagcttagcaccatactcggattcacatacgaaatcagattggtggaagacggcaagtacggggcccaggatgatgctaatggccagtggaatgggatggttcgtgagctgatcgaccataaggccgacctggcagttgccccgctagccataacctacgtgcgcgagaaggtcattgatttctcaaagccctttatgactctgggcatcagcatcctgtaccgcaaaccaaatggcaccaatcctggagtgttcagctttctcaatcccttaagtccagacatctggatgtacatcctcctggcttacttgggagtttcctgtgttctttttgttattgcgagattcagcccctacgagtggtacaacccgcacccctgcaaccctgattccgatgtggtggagaacaacttcacactgttaaacagcttctggtttggggtgggcgccctgatgcaacagggtagtgagctgatgcctaaggctctgtccacacgcattgtgggaggtatctggtggttttttacactgatcataatcagctcttataccgccaatctggcagcatttttgaccgtggagcggatggagtccccaatcgacagtgcagacgatctggccaagcagacaaaaatcgaatatggcgctgttgaagatggagccaccatgacttttttcaagaagtcgaaaataagcacgtacgataagatgtgggccttcatgagttcaagacgccagtccgtactggttaagagcaacgaagaaggcattcaaagggtgctgacatctgactacgcttttctgatggagagcaccacaattgaattcgtcacccagcggaattgtaacttgacccagattggaggcctgatagatagcaaaggttatggagtgggcaccccgatgggttcaccctacagggataaaataacaattgctatcctgcagcttcaggaagaaggcaaattgcacatgatgaaagaaaagtggtggcgcggcaatgggtgcccggaggaggaatccaaggaggcaagcgctctgggcgtgcagaatattggcgggatttttatagtgctggctgccggactagtcctttctgtgttcgtggccgtgggggagttcctgtataaaagcaagaagaatgcccaactcgagaaggagagttctatttggctggttcctccttatcatcctgacactgtctag

SEQ ID NO: 189349 - DNA, 2727 bp, synthetic construct
  misc_feature 1..2727: note = Description of Artificial Sequence: Synthetic coding sequence
  source 1..2727: mol_type = other DNA
atgaagatcatcttccccatcctgagcaaccccgtgttccggcggaccgtgaagctccttttgtgcctcctgtggatcggttattcgcagggtaccacgcacgttttaagatttggaggcatatttgagtatgtggagtccgggccaatgggggccgaggaactggccttccggtttgctgtgaacacaatcaatcggaataggacccttcttccaaacactaccctgacatacgacacccagaagatcaacctttacgactctttcgaggccagcaagaaggcctgcgaccagttaagtttgggagtggctgccatattcggcccgagtcatagtagctccgctaacgctgtccaaagtatctgtaacgcgctgggcgtccctcacattcagactagatggaagcatcaggtgtcggataacaaggacagcttttatgtgtcgctgtaccctgacttttcatccctcagcagagctattctggacctcgttcagttctttaagtggaagaccgttactgtggtgtatgacgactccacaggcctgatccgtctgcaggaactgattaaggctcccagtagatataacttgagactgaaaattcgccagctgcccgcagataccaaggacgccaagccgctgctgaaggaaatgaagcgcggtaaggagtttcacgtcatattcgattgctctcatgagatggctgccggaatcctgaagcaggctctggctatggggatgatgactgagtactaccactacatcttcaccacactggacctattcgcgctggacgtggaaccctatcggtactctggcgtgaacatgactggatttaggatcctgaatacagaaaacactcaggtttcttccattatcgagaagtggtcaatggaaagactgcaggccccccctaagcctgactcaggcctactggacggatttatgacaaccgacgcagctcttatgtacgacgccgtgcatgttgtgtccgtggcggtccagcagtttccccagatgaccgtgagcagtctccagtgcaacagacataagccctggcgtttcgggaccagattcatgtcgctgatcaaagaggcgcactgggaaggtctgaccggaagaataacctttaataaaactaacgggcttagaaccgatttcgatctcgacgtgatttctctcaaggaggagggtctagagaagatcggtacctgggaccccgcatcgggactgaacatgactgagtcccagaaaggaaagcccgctaatatcaccgattcacttagtaataggtctctgatagttacaaccattttagaggaaccatacgtcctgtttaaaaagtctgacaaaccactctacggtaatgacaggttcgagggctattgtattgatctgcttagggaactgtccactatcttggggttcacgtacgaaataaggctggtggaggacggaaagtatggagcccaggacgatgccaacggacagtggaacggcatggtccgggaactgatcgatcataaagccgacctcgcagtggccccgctagctattacatatgtgcgcgaaaaagtgatagatttctccaagcctttcatgactttgggcatttcaatcctttaccgaaaacctaatgggaccaaccccggggtattctctttccttaatcccctgagccctgatatctggatgtatatcctgttggcatatctcggcgtgagttgtgtactcttcgtgatcgcacggttctctccttatgagtggtataatcctcatccgtgtaatccggattccgacgttgtcgagaataatttcactctgctgaatagtttctggtttggcgtcggcgcactgatgcagcaggggagcgaattgatgcccaaggcccttagtaccagaattgtgggcggcatctggtggttttttaccctcatcatcattagctcgtacaccgccaatctggcagccttcctgactgtagagcgtatggaatcccctattgactctgcggacgatctggcgaagcagactaagatcgaatacggcgctgtggaagatggggcaacaatgactttctttaaaaaatctaagatttctacgtatgacaagatgtgggcctttatgagctcacgaaggcagagcgtattggttaaaagcaacgaggagggcatccagcgcgtccttacttccgattatgccttcctcatggaatccaccacaattgaattcgtcacccaacgtaactgtaatctgactcaaatcgggggtctcattgactccaaggggtacggcgttggcaccccaatgggttccccataccgcgataaaatcactattgcaattctgcagctgcaagaagaagggaagctgcatatgatgaaggagaagtggtggcgcggcaacgggtgcccagaagaagagagtaaagaagccagcgccctcggcgtacagaacattggtggtatctttatagttctggcagccggccttgtactgagtgttttcgtggcagtgggggaattcttgtataaaagcaagaagaacgcccagcttgagaagcgctcattttgttcagccatggtagaggagcttagaatgtctctgaagtgccaacgacgacttaagcacaaacctcaggcaccagttatcgtaaaaacggaagaggtgattaatatgcacacctttaacgaccgacggctcccaggcaaggaaactatggcttag

SEQ ID NO: 189350 - DNA, 1935 bp, synthetic construct
  misc_feature 1..1935: note = Description of Artificial Sequence: Synthetic coding sequence
  source 1..1935: mol_type = other DNA
ggcggcatcttcgagtacgtggagagcggccccatgggcgccgaggagctggctttccggtttgctgtcaacaccattaatcgaaatcggaccctgttgcccaatacaaccctcacatatgacacacagaaaattaatctttatgacagctttgaggcaagtaagaaggcatgtgaccaactttctttgggcgtcgcggccatttttggccctagccactcatcaagtgccaatgctgtgcagtccatttgcaacgctttaggtgtcccccacattcagaccagatggaagcatcaagtgagcgacaataaagacagcttttatgtatctctgtatccggatttcagctcactgagtcgcgccatcctggacctggtccagtttttcaagtggaaaaccgtaactgtggtttacgatgacagcactgggttgatcagactgcaagagttgatcaaggctcccagcagatacaatctgcgattgaagatcagacagctgcccgctgataccaaggatgcaaagccactccttaaggaaatgaaacgaggaaaagagttccacgtaatcttcgactgctcccacgaaatggccgcaggcattctgaaacaggcccttgccatgggcatgatgaccgaatattaccattatatcttcacgaccttggatctctttgccttggacgtggaaccctaccggtacagcggagtcaatatgactgggtttaggatcttaaataccgaaaatacacaggtctcaagcattatcgaaaagtggtcgatggaacggttgcaggcgcccccaaagcccgactccggactcctagatgggtttatgacaactgacgcagccttaatgtacgacgcagtacacgtggtgagtgtggcggtgcagcagttcccgcagatgaccgtgtcatccctgcaatgtaatagacataagccatggcgattcggaactaggtttatgtccctgattaaggaagcccattgggaagggcttaccgggcggattacattcaataagactaatggactgcggacggatttcgatctcgacgtcatttctctgaaggaagagggtcttgaaaaaataggcacctgggatccagctagtggcctgaatatgacagaatcccaaaagggcaagcccgcaaatatcactgacagcttgagcaacaggagtctgatcgtgacaaccatccttgaagaaccttacgtgctgttcaaaaaatctgacaaacccttgtatgggaacgaccggttcgagggatactgcatcgatctgctacgcgaactaagcactattttgggtttcacttatgaaattagactggtggaggacgggaagtatggagcacaagacgacgccaatgggcagtggaacggcatggtgagggaattaattgaccacaaaagcaaaatatccacctacgataagatgtgggcattcatgtcatcacgccgccagtcggtcctcgtgaaatccaacgaagaaggcattcagagagttctcaccagtgattacgctttcctgatggagtccaccacgatcgaattcgttacccaaaggaactgcaacctaacccagataggaggcctgattgattcaaaaggctacggcgtgggaacgccaatgggaagcccgtatagggacaaaataacaattgccatcctgcagctccaagaggaggggaagctccatatgatgaaggaaaagtggtggagaggaaacgggtgccccgaagaggagagtaaggaggcctccgctttgggggtacaaaatatcggggggatcttcattgtgttggcagctggacttgtgctgagcgtgtttgtggcagtgggtgagttcctttacaaatctaaaaagaatgcccaattggagaaggaatcctcaatttggcttgtgccaccctatcaccctgatactgtgtag

SEQ ID NO: 189351 - DNA, 2760 bp, synthetic construct
  misc_feature 1..2760: note = Description of Artificial Sequence: Synthetic coding sequence
  source 1..2760: mol_type = other DNA
atgaccgccccctggcggcggctgcggagcctggtgtgggagtactgggctggcctgctggtttgcgccttctggatacctgactctaggggcatgccccatgtgattaggattggcggtatctttgagtatgccgatggcccaaatgctcaggtgatgaatgccgaagagcacgcattcaggttctcagcgaacatcatcaacagaaaccgcaccttgttgcctaatacaacgcttacatacgatatacaaaggattcacttccatgactccttcgaagccaccaagaaagcatgcgaccagctcgcactgggagtggttgctatcttcggaccatcccaggggtcctgcactaatgctgtgcagagcatttgcaacgcccttgaggttcctcatattcagttgcgctggaaacatcaccctttagacaataaggacacattctacgtcaacctgtaccccgattacgcatccctgtctcacgctattctcgacctggtgcaatatttgaagtggcgcagtgcaacagtcgtgtatgacgatagtaccgggctgatacggctgcaagagttgataatggctccgtccagatataacatccgcctgaaaattcgacagctccccatcgacagcgatgacagtcggccattgctgaaggagatgaagcgcggaagagagttccgcatcattttcgattgctctcacaccatggctgctcagattctgaagcaggccatggcgatgggcatgatgactgaatactaccacttcatcttcactacactggatctatacgccctggacctcgagccctatagatattcaggcgtcaatctaacgggctttcggattctcaatgtcgataaccctcatgtatccgctatcgtggagaaatggtcaatggagcggctacaggcagcgcccagaagcgagagcggcctgctcgatggcgtgatgatgaccgatgctgcgctcctgtacgatgccgtgcacatagtatcagtatgctaccaaagagcgccacaaatgacagtcaactccctgcagtgtcatcggcacaaagcatggaggtttggtggccggttcatgaatttcatcaaagaggcccagtgggaaggactcaccggccgcatagtctttaataaaacctctggcctgcgaacagattttgatctcgatattatcagtcttaaggaagacggtctggagaaagtgggtgtgtggagccctgcagacgggctgaacatcactgaggtagctaagggtcgtgggcccaatgtaaccgattcactgacaaaccgttcactaattgtaacaacggtgctcgaggaacccttcgtgatgtttcgaaaatcagaccgcactctctacggtaatgacaggttcgagggctactgtatcgatttgctgaaagagttggcgcatattttaggattcagctatgagatcagactcgttgaggacgggaagtacggcgctcaggatgataaaggccaatggaacggcatggtcaaggagctgatagaccacaaggcagatctcgcagtggccccacttacaatcacgcacgtaagggagaaggccatcgacttttctaagccgtttatgaccctgggcgtgtcgatcttgtaccgcaaacccaacggcaccaatcctagtgtgtttagttttctgaaccctttaagtcccgacatttggatgtatgtgctcttggcataccttggggttagctgcgtgctgtttgtaattgcccggttctccccgtatgaatggtatgatgcccacccatgcaaccctggctcagaggtcgttgagaataacttcactctcctcaatagcttctggtttggcatgggcagcctcatgcagcagggttcagagttaatgcctaaggctttgtccactcggattataggcgggatctggtggttctttactttaatcatcatttcatcttatacagccaatctcgcagcattccttacagtcgagcgcatggagtcccccattgatagtgccgacgatctggccaagcagacaaagattgagtatggtgccgtaaaagatggagccactatgaccttcttcaagaagtccaagattagtacattcgagaaaatgtgggccttcatgtcttctaagccctcagctcttgtgaagaacaatgaggagggtatccagagagcactaactgctgactacgctttgctcatggagtctaccaccattgagtacgtgacccagcggaactgcaatttgactcagattgggggcttgattgattccaaaggttatggcatcgggacacccatgggatccccctacagggataagatcactattgccatcctgcagttgcaagaagaggataaactgcacataatgaaagagaaatggtggcgcggctctggatgccccgaagaggaaaacaaagaggcctccgcactggggatccaaaagatcgggggcatcttcattgtgctggccgcgggactggttctcagtgtgttagtagccgttggagaatttgtatacaagctgagaaagactgccgaacgggaacagcgttcattctgttccacagtggcagacgaaatacgcttctccctcacatgccagcggcgggtcaagcacaaacctcagccaccaatgatggtcaagaccgatgccgttattaacatgcacacattcaacgatagacggctccctggtaaagattctatggcctgctccacgtcgcttgctcccgtattcccgtag

SEQ ID NO: 189352 - DNA, 2619 bp, synthetic construct
  misc_feature 1..2619: note = Description of Artificial Sequence: Synthetic coding sequence
  source 1..2619: mol_type = other DNA
atgaccgccccctggcggcggctgcggagcctggtgtgggagtactgggcgggccttctcgtgtgcgctttctggattcccgatagtaggggaatgccccacgtcattagaataggcggcatcttcgaatatgctgacggtcccaatgcccaagtgatgaacgccgaagagcacgcttttcgctttagcgcaaatatcatcaataggaacagaaccctactgccaaatacgacccttacatacgacattcagagaattcatttccatgattctttcgaagcgacaaagaaagcgtgcgaccagttggcactcggggtggttgctatattcggcccctcacaaggatcttgcacaaatgccgtccagtccatttgcaatgcacttgaggtcccccacatacaactccgttggaaacatcaccctcttgacaacaaggacacattttatgtgaatctgtaccccgactatgccagtctatcacatgccattctcgacttggtacaatatctcaagtggcgaagtgccacagttgtttacgacgattcgaccggacttatccgcctacaggagctcattatggcaccctctagatacaacatcaggctgaaaataaggcagctgcccatcgacagcgatgacagcaggccattgctgaaggaaatgaaacgaggcagagagttccgcatcatattcgactgctcacataccatggcagctcagatcttgaagcaggcaatggcgatggggatgatgacagaatactatcactttattttcactacgcttgatctgtatgctctagacctggagccttacagatatagcggcgtcaatctgaccggcttcaggatcttaaacgtggataacccccacgtttctgctattgtcgagaaatggtctatggagaggttgcaagcagcacctcggtccgagagcggcctcctcgacggggtcatgatgacagacgccgctctgttgtacgatgccgtacatattgttagcgtgtgctatcagagggcaccgcagatgacggttaacagtctgcagtgtcatcgccacaaagcctggcgcttcggtggacgctttatgaatttcattaaagaggcccagtgggaagggctgaccggaagaattgtgtttaacaagacctccggcctcagaacagattttgacctggacataatttccctgaaagaggacggcctggagaaggtgggtgtgtggagccctgccgatggtttgaatatcactgaggtggcaaaaggtcgcggacctaacgtgacggatagcctgaccaaccgtagcctaattgtcactacggtgctggaggagccctttgtgatgttcaggaaatcagatagaactctgtacggcaatgatagatttgagggctactgcatagacctgttgaaggaactggcccacattctgggattcagctacgagatccgacttgtagaagacggtaagtacggcgcccaggatgacaagggacagtggaacggcatggtgaaagagctcattgaccacaaagcagatctggccgtggcccccctaacgatcacccacgtgcgggagaaagcaattgatttcagcaagccctttatgaccctgggagtgagtattttgtatcgaaaacctaatggcacaaacccttccgtattttcattcctgaaccccttgagtcccgacatctggatgtacgttctgttggcataccttggagtcagttgtgtactgtttgtgatcgctaggttttcgccgtatgaatggtacgatgcccacccatgtaacccaggatctgaagtggtagaaaacaacttcacactccttaactcgttttggttcgggatggggtccctgatgcaacaagggagcgaactgatgcccaaagcactgtcaaccagaattatcggcggaatttggtggtttttcactcttattattatctcttcgtacaccgcaaatctcgccgcctttttaaccgttgagaggatggagtcgcccattgatagcgccgatgatctggcaaagcagacgaaaattgagtacggagccgtgaaggatggggccaccatgacgtttttcaagaagagcaagatatcaacctttgaaaagatgtgggccttcatgagttcgaagcccagcgctcttgtcaaaaataacgaagagggaatccaacgggcccttactgctgattatgccctgcttatggagtctacaaccatagagtacgtgacccaaagaaactgcaatttgacccagataggaggactaattgacagtaaagggtatggtataggtacccccatgggcagtccgtacagagataaaattactatagcaatcctccaactccaagaggaggataagctccacatcatgaaggagaaatggtggcggggatcaggctgccccgaggaagagaataaagaagcatctgcgctgggaattcagaagatcggagggatcttcatagtgttagccgcgggtttggtgttgtccgttctggtggcagtgggggaatttgtgtataagctgcggaaaaccgccgagcgcgagcaggtgtctctgcgggcatggtcacttcatagaatgggaaacggtgacagcaggtag

SEQ ID NO: 189353 - DNA, 2871 bp, synthetic construct
  misc_feature 1..2871: note = Description of Artificial Sequence: Synthetic coding sequence
  source 1..2871: mol_type = other DNA
atgccccgggtgagcgcccccctggtgctgctgcccgcctggctggtaatggtggcctgctcacctcattccctaaggatagcggctatcctggacgacccaatggaatgctcccggggtgagcgtctgagcatcactctcgccaaaaatcgcattaacagggccccagaaaggctcggaaaagctaaagtggaggtggatatcttcgaactgctgcgggatagtgagtatgagacagccgagactatgtgccaaatactgccaaagggcgttgtagcggtgctcggccccagctctagtccagcttcttcgagcatcatcagcaacatttgcggcgaaaaagaagtccctcatttcaaggtggcacctgaggaatttgtaaagtttcaattccagcgttttactacactgaaccttcacccttcaaacaccgacatatcagtggccgttgcggggatcctcaattttttcaattgtactactgcttgcctgatctgcgccaaggccgagtgtctgcttaatctggaaaagctacttcgccaattcctgatcagcaaggacaccttatctgtgaggatgctcgatgacacacgggatcccactccgctgctcaaggaaatccgagacgacaagaccgcaactattattatccacgctaacgccagtatgtctcatactatcctcctgaaagcagcagagctcggaatggtgtccgcttactacacgtacatcttcacaaacctggagttcagtcttcagcggatggactccctggtggatgatcgcgtcaacatccttggtttctctattttcaatcagagccatgctttcttccaggaattcgcacagtcactgaatcagtcctggcaggagaactgtgaccatgtgccctttactggacctgctctgagcagtgcactgttatttgatgctgtgtacgctgtagtgacggccgttcaggagctgaataggtcacaggagatcggagtgaaaccactaagctgtgggtctgcacagatctggcaacacggaacctcgttaatgaattatcttcggatggttgaactggaaggcctgacagggcacatagagttcaattcaaaggggcagaggtcaaattacgccctgaaaattctacagtttacccgcaatggttttaggcagattggccagtggcatgtggccgaaggcctctctatggacagtcatctttacgcgtctaatatctccgacactctgttcaacaccaccctggtggtgacaaccattcttgaaaacccatatctcatgttgaaagggaatcaccaggagatggagggaaatgacaggtacgagggattttgcgtggatatgctgaaagaacttgcggagatcttacggtttaattacaaaattagactggttggggacggtgtgtatggcgtgccagaggctaatgggacctggactggaatggtcggggagctgattgctagaaaggccgacttagcagtggcagggctgacgatcaccgctgaaagagagaaagttattgacttttctaagcctttcatgacactgggcatcagcatcctgtacagagtgcacatggggagaaagcccggctacttcagtttcctggaccccttctcaccgggggtatggctgttcatgctcctggcctacttagccgtatcctgcgttttgttcttggtcgcccgtctgacaccgtatgagtggtatagcccccacccctgtgcacaaggtcgctgtaatctgctcgttaaccagtactctctgggaaactcgctgtggtttcctgtgggcggctttatgcagcagggaagtactatcgccccgagagccctttcgacgcgatgtgtgtccggagtttggtgggccttcacgctgataatcatcagctcatacactgccaatctcgcagcttttcttacagtacagcgaatggacgtgcctattgagtcagtggatgatttagctgaccagacagccatcgagtacggtactattcatgggggttccagcatgaccttctttcagaactcccggtatcagacttatcagagaatgtggaactacatgtattccaaacaaccttccgtcttcgtaaagtctactgaagaggggatagcgagagtccttaattcaaattacgccttcctgctcgaatctaccatgaacgaatactacagacagaggaattgtaacctgacacagatcggaggtctgctcgataccaaagggtacggcattggcatgcccgttgggtccgtttttcgcgacgagttcgacctcgccatactccagttgcaggaaaataatcgtctggaaattctgaagagaaagtggtgggagggggggaagtgcccaaaggaagaggatcatcgcgctaagggcctgggcatggagaatatcgggggcattttcgttgtgctgatttgcggactgatcgtagctatttttatggccatgcttgagtttctgtggaccctacggcatagcgaggcaacagaagtgtccgtttgtcaggaaatggtgaccgagctccggagtatcatactgtgtcaggattcaatccatccgagacgcaggagagccgccgtgccaccgccccgcccacccatacccgaggaacggaggccccgagggaccgccactctgtccaatggaaaactgtgtggggcaggagaacccgaccaactcgcccagaggctcgcccaggaagcggctctggtagctcgaggctgcactcatattagagtgtgcccagagtgccgccgctttcaggggttaagagcacggccgtcccccgctcgatccgaggagtctcttgaatgggagaagacaacaaactcatcggagcctgagtag

SEQ ID NO: 189354 - DNA, 2871 bp, synthetic construct
  misc_feature 1..2871: note = Description of Artificial Sequence: Synthetic coding sequence
  source 1..2871: mol_type = other DNA
atgccccgggtgagcgcccccctggtgctgctgcccgcctggctggtgatggtagcttgctctccgcactcgctgaggatcgccgcaatactcgatgatcctatggaatgctcgcgaggcgaaagactgagcattaccctagcaaaaaaccgtattaatcgggcccctgaacgactgggaaaggcaaaggtggaagttgatatttttgagctgcttcgcgactccgaatatgagactgccgagactatgtgccaaattcttcccaagggagtggtggcggtccttggcccttcttccagtccagcctcctcaagcataattagcaacatttgtggcgagaaggaagtgccccacttcaaagtggcgccggaggaatttgtgaagttccagtttcagaggttcacaactctgaatttgcatccaagcaatactgatatctccgtggctgtggcaggcattctgaacttctttaattgcacgaccgcgtgcttaatctgtgctaaagctgagtgcctgctgaacctggaaaaactgctaaggcaattcctgattagcaaggataccctgagcgtgcgaatgcttgatgacacgcgcgacccaacccctctgctaaaagagattagagacgacaaaaccgcaactattataattcatgctaatgctagcatgtcccataccattctgttgaaagccgccgaactgggaatggtcagcgcttattatacgtacatctttaccaacctcgagttttctctgcagagaatggacagtctcgtggacgaccgagtgaacatccttggattcagcatcttcaatcagagccacgcttttttccaagagtttgcccagagtctgaaccagtcatggcaggagaactgtgaccacgttccatttacaggaccagcactcagctccgccttgctgtttgatgcggtatatgctgtggttaccgcagttcaggagctcaatcggtcccaggaaattggggtgaaacccctctcatgtgggtctgcacagatatggcagcatggtacttctcttatgaattatcttagaatggtagaactggaggggctgaccggacacatcgagtttaacagtaaagggcagcgtagcaactacgccctcaaaatattgcagtttacccgtaacggcttccgccagataggtcagtggcatgtggcagagggcctgagcatggactctcatctctacgcctcgaacatttcagatactctcttcaacaccacactggtggttaccaccatactagagaatccctatctgatgttgaagggcaatcatcaggagatggaagggaacgaccgatatgagggattttgcgtggacatgctgaaggaactagccgagatccttcgatttaattacaagatcaggctggtcggcgacggcgtttacggagtacccgaggcaaatggcacatggacgggcatggtcggagagctaatcgcccgcaaagccgatcttgctgtggcaggtctgaccatcactgctgaaagggagaaagtgatcgatttctccaagccctttatgacactcgggattagtattttgtatcgcgttcacatgggacgcaagccagggtactttagttttctggatccatttagtcctggagtctggctgtttatgttactagcatatctggccgtgtcatgtgtactgttcctcgtggcaaggctgaccccatacgagtggtattccccccatccctgcgcccagggaaggtgtaatctcctggttaaccagtatagcctcggcaacagcctgtggtttccggtgggaggatttatgcagcaaggctcaacaattgcccctcgcgctctgagcacgagatgtgtgtccggagtgtggtgggcctttacactgattattatctcatcttatactgcgaacctcgccgcattcttgactgttcagagaatggacgtcccgatagagtccgtggacgatttagccgatcagaccgccatcgagtatggaacaattcatggtggtagttccatgacttttttccagaactcgcgttatcagacataccagcggatgtggaactacatgtattcgaagcagccttctgtgttcgtgaagagcaccgaggaaggaatcgctcgcgtgctcaattctaactacgcattcctgctcgagtcaactatgaatgagtactaccgtcagagaaattgcaacctaacacaaatcggcggtttactggatactaagggatacggaataggaatgccagtaggctctgtgttcagagacgaattcgatctcgcaatactacagctccaagaaaataatcgtctggagatcttgaagagaaagtggtgggaagggggcaagtgtcccaaagaggaagatcaccgtgccaaagggctgggcatggagaacatcgggggtatcttcgttgtactcatatgtgggctcattgtggcaatttttatggctatgctcgagttcctctggacactgaggcactcggaggctacagaagtgagtgtgtgccaagagatggtaactgagctaagatccataatcctatgccaggatagtattcacccaagacggaggcgcgcagctgtgccacccccccgaccgccaatcccagaagagcggaggccacgcggtaccgctaccctgagtaacggcaagctctgcggtgccggcgagccggatcagctggcacaaaggctggcgcaggaggctgcacttgtggctagagggtgcacacacatcagggtgtgtcccgagtgtcgcaggtttcagggactgagggcccgtccctctcccgctcggtcagaggagagcctcgagtgggagaagacgacaaactctagcgaaccagaatag

SEQ ID NO: 189355 - DNA, 2943 bp, synthetic construct
  misc_feature 1..2943: note = Description of Artificial Sequence: Synthetic coding sequence
  source 1..2943: mol_type = other DNA
atgcccgccgagctgctgctgctgctgatcgtggccttcgccagccctagttgtcaagtactctcttcgctccgcatggccgcgatactggatgaccagacagtttgcgggcggggcgagagattagccttggctttagcaagagagcagattaacggcattatcgaggtacccgccaaagcccgcgtcgaggtggacatcttcgagctgcaacgggatagccaatatgagacaaccgacacaatgtgccagattcttccgaaaggagtggtatcagtgctggggccttcttcgtcaccagcctccgccagcaccgtgtcccatatatgcggagagaaggagataccacacatcaaagttgggcccgaagaaacaccaagactgcagtatctccgctttgccagtgtaagcctgtacccaagtaacgaggatgtgtctctggcggtgagcagaatcctgaaatccttcaattacccatcagcctcgctcatctgtgccaaagccgaatgtctgctgcgcctggaagaattggtgcggggcttcctcattagcaaggaaacactgagcgttagaatgctggacgattcccgggatcctaccccattgctgaaagaaatcagggacgacaaggtttctactatcatcatagatgccaatgcctccattagccacctgatccttagaaaggccagtgagctggggatgacctccgcattctacaagtacattctgacaactatggacttccccatcctgcatctggatggcatagtcgaggatagttctaatattctgggattttccatgttcaatacctctcaccctttttatcctgaattcgttaggtcactgaacatgagctggagggagaattgtgaggccagcacctacctcggacctgcccttagtgccgccctgatgtttgatgcggtgcacgtcgtggtgtctgcagtgcgcgagctcaacagatctcaggaaatcggggtcaagcctttagcctgtacaagtgccaatatatggcctcatggcacaagcttgatgaactacctgagaatggtcgaatatgacggtttaactgggcgagtcgagttcaattccaaagggcagcgtaccaactataccctgcggattctagagaaatccagacagggtcatcgcgaaatcggggtgtggtattccaatcgaactttggcgatgaatgccacaactctggatataaatttatcacaaacccttgcgaacaaaactctggtcgtaactacgattttagagaatccatatgttatgcggcgaccaaactttcaggccctgtcgggcaatgaacggttcgagggcttttgcgtagacatgttgcgtgagttggcagaactgctacgcttccgttatcggctgagactagtggaggatggcctctacggtgcgcctgagccaaatgggagctggacaggtatggtgggggagttgataaaccgtaaggcggatcttgccgtagcagcttttaccattactgctgaaagagagaaggtaatagatttcagcaagccttttatgaccctaggcatctctatcctttacagagtccatatggggcgaaagcccggatacttctctttcctggatcccttcagccccgcggtttggttgtttatgttactggcttatctggccgtgtcatgcgtccttttcctcgcagcccggctgtcaccgtacgagtggtataatccgcacccctgtctgagggcccgtccacacattcttgaaaatcagtatacactcggaaattcgctttggtttccagtaggcgggttcatgcaacaggggagtgaaataatgcccagggctctatcaacacgctgcgtgtctggcgtgtggtgggccttcactctcattattattagcagttacactgccaaccttgccgcattcctaactgtgcaacgaatggaagtcccggtggagagcgctgacgatctggcagaccagacaaatattgagtacggcacgatccacgcgggcagtaccatgacgttcttccagaattctagataccaaacctatcagcgtatgtggaactatatgcagtctaaacagccctctgtgttcgtaaagtccacagaggaaggaattgcccgggtcctgaattccagatacgccttcctgctggagagcacaatgaacgaatatcacagacggctcaattgcaaccttacccagataggaggcttgctggacaccaaagggtatggtattgggatgcccctgggctcaccttttcgagacgaaatcaccctggccatccttcagctacaggaaaataacaggcttgagatcctgaaaagaaaatggtgggaaggagggagatgtccaaaagaagaagaccatcgagctaagggactcggtatggaaaacattggcgggattttcattgtcctgatctgtggattgataatagctgtgttcgtagccgtaatggaatttatctggtctaccaggagatctgcagaatctgaggaggtctcggtgtgccaagagatgctgcaggagttaagacacgccgttagttgtaggaaaacctcccgatctcggcgcagaaggcgccccggaggcccgtcacgagcgttactgtccctgagggccgtgcgcgagatgaggctgtccaatggaaagttgtatagcgccggtgcggggggtgatgctggtagcgctcatggtggcccgcagaggctactggatgatcccggacccccaagcggagcaaggcctgccgctccgaccccttgcacccacgtaagagtctgtcaggagtgtagaaggatccaagcactgcgggcatcgggggcaggcgctcctcccagaggattgggcgttccagccgaggccactagcccccctcgacccagacccgggccggccgggccccgcgagctggcggagcatgaatag

SEQ ID NO: 189356 - DNA, 2946 bp, synthetic construct
  misc_feature 1..2946: note = Description of Artificial Sequence: Synthetic coding sequence
  source 1..2946: mol_type = other DNA
atgcccgccgagctgctgctgctgctgatcgtggccttcgccagccccagctgtcaagtgttgtcgtccctgcgcatggccgcaatcctggatgatcagactgtttgtggcaggggcgagcggctcgcacttgccctagcccgcgagcagattaacggcattatcgaggtccccgccaaagcccgcgtggaagtggacattttcgagttgcaacgagattctcagtacgagaccactgataccatgtgccagatactccccaagggagtggtgtccgttctgggcccctcctctagccccgcctccgctagcactgtctcacacatctgtggcgagaaggagattccacatataaaagttggcccagaagaaactcctcgcctccagtacctcagattcgccagcgttagcctgtacccatccaatgaggacgtgagcctggctgtgtcgaggatcctgaagagtttcaattatccttcagcctccctgatttgcgcaaaagccgaatgtctcttacgccttgaggagttggtgcgtggcttcctgatctccaaagagacactctcagttcggatgttggatgatagccgagatccgacacctcttctgaaggagattcgggatgataaggttagtactatcattatagatgccaacgctagcatttctcacttgatactccggaaggcttctgagttgggaatgacatcagcattttacaagtacatcctgactacgatggattttccaatcctccatcttgacggcattgtggaggatagtagtaacatcctcggcttttccatgttcaatacttctcaccctttttaccccgagttcgtccgcagcctcaatatgagttggcgggaaaattgcgaagcaagcacttacctgggacctgcacttagcgcagccctgatgttcgatgcggttcatgttgtagtctccgccgtccgagagttgaacaggtcgcaggagatcggggtgaaaccattggcctgcacctccgcaaatatatggccccacggaacgtccctcatgaattatctcagaatggttgagtatgatggactgacaggccgagtcgagttcaactctaaggggcagcgtacaaattatactctacgcatccttgaaaagtcaaggcagggccaccgggagatcggcgtgtggtattcaaataggactctagccatgaacgctacaacactggacataaacttgtcacagaccctcgccaataaaactctggtggtgactactattcttgagaacccttacgtgatgcgaagacccaattttcaggccttgagcgggaatgagcgatttgaggggttctgtgtggacatgctccgtgagctcgccgaactgctgagattcagatatcggctccgcttggtcgaggacggcttatatggggcccctgagcccaacggaagctggacagggatggtaggagagctcattaataggaaagcggatttggccgtggccgccttcactatcacagccgagagggagaaggttatagacttttccaagccatttatgactctggggatatccattttgtatagagtgcacatgggtagaaagcctgggtatttttctttcctggatcccttttcgcctgcagtttggctgttcatgcttctcgcttacctggccgtgtcatgcgtcctgtttctagcagctcggttgtcaccctacgagtggtataacccccacccctgcctccgcgccagaccccatatactggagaatcagtataccctgggtaattcactgtggttccccgtaggaggcttcatgcagcagggcagcgagatcatgcccagagcactttcaacaagatgtgtgagcggagtgtggtgggcctttacactgattatcatatccagttatacggcaaacctagccgccttcctgaccgtccagaggatggaggtccctgtagaaagcgctgatgaccttgctgatcagacgaacatagagtacggaactatccacgcgggctcaaccatgacatttttccagaattccaggtaccaaacataccagaggatgtggaattacatgcagtcaaagcaacctagcgtatttgtgaagtccaccgaagaggggatcgccagggttctgaacagtaggtatgccttcctgctcgagagcacaatgaatgaataccaccgccgtctgaattgcaacttgacccagattggcggcctgctggacaccaagggctatggcataggaatgccattaggctccccctttagagatgagattacactcgcaatcctgcagctgcaagagaacaaccgcttagagattctgaaaaggaaatggtgggaaggaggaaggtgccctaaggaggaggaccatagagctaaaggcctcggcatggagaatataggtgggatctttattgtattgatttgcggtctcatcatcgccgtcttcgtagcagtcatggaatttatctggtcaactaggcggtcagctgagtctgaggagacacccgcattgcatccagctgcctgccagtgcagcgcccttggaccccgcaccccactgaaagagccgtcaatgctgcttgtgaaggtcccctccacgcgcgtgcaggtcgcgttcagccgtacctccctgagacaggtgtgccctttcctgctgcaacaccagctttcatctttgtattggatccaggcgactaacgtgcagatctgctgtcacttttcttctcttaagccttcacctgacctgacatttcctccctctcaccgacccttgagtagtttgttatttactgctttggcggcagttgggggccttccagacgccagcagtttttttttcccaccgatttcttcatgtcctcccctgcaaagcgggattgggccgtgccattccacggaggctacactggtgacttccaacttccacgtttag

SEQ ID NO: 189357 - DNA, 1077 bp, synthetic construct
  misc_feature 1..1077: note = Description of Artificial Sequence: Synthetic coding sequence
  source 1..1077: mol_type = other DNA
tgatgggccttcaccctgatcatcatcagcagctacaccgccaacttagccgcctttctcaccgtccagagaatggaagtgcctgtggagagtgccgacgatctggcagatcaaactaatattgagtatgggacaatccacgctggaagcacaatgacattctttcaaaattctagataccagacctaccaacggatgtggaattacatgcaatctaagcagccaagcgtgttcgtgaagagtactgaagagggcattgccagggttctgaattctagatacgccttcctcctggaaagcaccatgaatgagtaccatcgccgcctcaattgcaacctgacccaaattggcggtctgctcgacacaaagggatacggtattgggatgcccctcggatctcccttccgggatgaaatcaccctagccatcttgcagctgcaagagaataaccggttggagatcctgaagagaaagtggtgggagggcggtcgctgtccaaaggaggaggaccatcgggccaagggcctgggtatggaaaacatcggagggattttcattgtcctgatttgtggtctgatcatagccgtgttcgttgcagtgatggaatttatctggtctaccagaaggtctgcagagtcagaggagaccccagctcttcaccctgccgcgtgccagtgctcagctttaggtccgcgaactccgctcaaggaaccgtcaatgctcctggtcaaagtgcccagcactagggtgcaggtcgcattttcgcgtacctcgctgcgccaggtgtgtccattcctcctgcaacaccaactgtccagcttgtactggattcaggcaactaatgtgcagatatgctgtcacttctcaagcctgaagcctagccccgacctcacatttcccccatcccaccggcctctgtcctcattgctgttcaccgctctggccgcagttgggggactgcctgatgcttcctccttcttctttccgcctatatcctcctgccctccgctgcaatccggtattgggccctgtcacagcaccgaagccacactcgttacttcaaactttcacgtatag

SEQ ID NO: 189358 - DNA, 2769 bp, synthetic construct
  misc_feature 1..2769: note = Description of Artificial Sequence: Synthetic coding sequence
  source 1..2769: mol_type = other DNA
atgagcaccatgcggctgctgaccctggccctgctgttcagctgctctgtcgcccgagccgcctgcgacccaaaaatcgtgaacatcggggccgtacttagcacgaggaagcatgaacagatgtttagggaggctgtgaaccaggctaacaaacgacacggctcttggaaaattcaactgaatgccaccagtgtcactcacaagcccaacgctatccagatggccctgtcagtctgcgaagatctgataagtagccaggtctacgccattctggtgtcccatcctccgaccccaaacgatcacttcactccaacgcctgtgtcctacaccgccggtttctatcgcatacctgtactggggttgacaactcgcatgtcaatatattccgataaaagcattcatctctctttcctaagaacagtgcctccctatagtcatcagtcatcagtgtggttcgaaatgatgcgtgtgtatagttggaaccacataattttgctcgtgtccgacgatcatgaggggcgggcggcacagaaacgtctggagaccctgcttgaggaacgtgagtccaaggccgagaaggtgctgcagttcgacccgggcacaaagaacgtaacggctctccttatggaagccaaagagctggaggcacgcgtaattattttgtctgccagcgaggatgacgccgcaaccgtatatagggccgccgccatgctgaatatgacgggcagcggatacgtgtggctggtgggcgagagggaaattagtggcaacgccctgcggtacgccccagatggtatcctgggactccagctcattaatggcaagaatgagagtgcgcacatctcagacgcggttggtgtcgttgcccaggccgtgcatgagctcctggaaaaagagaatatcacagacccccctaggggatgcgtgggtaacaccaatatttggaagaccgggcctttatttaagcgggttctcatgtcttccaaatacgcagacggtgtgacggggagggtggaattcaatgaagatggagacaggaagttcgctaactacagtatcatgaacctgcagaacagaaaactcgtgcaggttgggatctataacggaacacacgtcatccccaatgataggaaaataatttggcctggaggggaaaccgaaaaaccgcgcggttaccagatgtctacccggctcaaaattgtgaccattcatcaggaacccttcgtgtacgtcaagccaacgctgtccgacggcacatgcaaagaagagttcactgttaatggggatccagtaaagaaagtcatctgcactggccccaacgatacttctcctggaagtcctcgacatactgtacctcagtgttgctatggattctgtatagacctgcttattaagttggccaggacaatgaacttcacatacgaggtgcacttggtagcagacggcaaattcgggacacaggagcgggtgaacaactccaacaagaaggagtggaatggcatgatgggagagctgctttccggccaagcagatatgatagtggctcctttgactattaataacgaaagagctcaatatattgaatttagcaaacctttcaaataccaggggttgacaatcttggtcaaaaaagagatcccaagatcaactctcgactctttcatgcagccattccagtcaacgttgtggctgttagtgggtctgtccgtccacgtggtcgccgtaatgctatacctgctggaccgtttctcgccatttggccgatttaaagtgaattctgaagaggaagaagaagacgcattgactttgtcgagtgccatgtggttctcatggggggtgctgctgaatagcggaattggagagggggcgcctagaagcttttcagcgcgtattctcgggatggtttgggccggttttgccatgatcatagttgcctcctacaccgcgaacctcgcagcgttccttgtattagaccgacccgaggagaggattactggcatcaacgaccccaggctccgtaacccttctgacaagtttatctacgccactgtcaagcagtcaagtgtggatatttatttccgccggcaagtggaactctctaccatgtacagacacatggagaagcacaactatgaatccgccgccgaggccattcaggccgttcgggacaataaactgcacgctttcatttgggactcagccgtcctggaatttgaagcctcgcagaagtgtgatctggttaccacaggagaactgttctttcgcagtggctttggcatcggaatgaggaaggatagcccatggaaacaaaatgtcagcctgtctatcctcaagtcccacgagaatggcttcatggaagacctggacaagacttgggtaaggtaccaggagtgtgattctagatctaacgcacctgcaactctaacatttgagaatatggccggcgtatttatgctggttgcaggtggcatagtggcagggattttcctcattttcatcgagatagcttataaaagacacaaggatgctcgtagaaagcagatgcaactcgctttcgccgcggtcaacgtgtggcggaaaaatctacaggatcgtaagtccggtagagccgaaccagatccgaaaaagaaggctacctttcgcgctatcacttctaccctggccagcagttttaagcggcgacgcagcagcaaggacacgcagtatcaccctaccgacattacaggccccttgaacctatccgatccatctgtgagtacagtagtctag

SEQ ID NO: 189359 - DNA, 2730 bp, synthetic construct
  misc_feature 1..2730: note = Description of Artificial Sequence: Synthetic coding sequence
  source 1..2730: mol_type = other DNA
atgagcaccatgcggctgctgaccctggccctgctgttcagctgctctgtggcccgggctgcctgtgaccctaagattgtgaacatcggagccgtgctgagcactcgcaagcacgagcagatgttcagagaagctgttaatcaggccaataagcgccacggttcgtggaaaattcagttgaacgctacctccgttacccataaacctaatgccatccaaatggccttgagcgtgtgtgaggacctcatctcttcccaagtgtacgcaatcctcgtgtcgcatccgcccacaccaaacgatcacttcacacccaccccggtctcctatacggctggtttttatagaattcctgtcctcggactgacgactcggatgtccatatatagcgacaaatcgattcatttgagctttctccgaacagtacctccctatagccaccagagctctgtgtggtttgagatgatgagggtctacagctggaaccacatcatactgctggtgtcagatgatcacgaagggagggcagcccagaagaggctcgaaactcttcttgaagaacgcgagtctaaggccgaaaaggtcctccagttcgatcctgggactaagaacgtgacggctctgttgatggaggctaaggaactggaggccagggtgataattctcagcgcctctgaagacgacgccgctactgtataccgggctgctgccatgctgaacatgacgggaagcggatacgtgtggctcgtgggagaacgtgagatctccggcaacgctctgaggtatgcacctgacgggatattgggacttcagcttattaacggaaaaaatgaaagtgctcacatctctgatgccgtcggagttgtggcccaagccgtgcacgagctcctagagaaagagaacattaccgatccgccacgcggctgtgtgggaaacacaaacatctggaaaacgggcccgctttttaaacgggtgttaatgtcaagtaagtatgcagatggtgtgactggtcgggttgagtttaatgaggatggggaccggaaatttgccaactactccattatgaatctgcagaataggaagctggttcaagttgggatttataacgggacccatgttattccaaatgaccggaaaatcatctggcccggcggcgagacagagaagccacggggttaccagatgtcaacgcggcttaagatcgtgaccattcaccaagagcccttcgtctatgttaagcccaccttatccgacgggacctgcaaggaagagttcaccgtaaacggcgatccagtcaaaaaagtgatttgtactgggccaaacgatacgtccccgggttctcctcgtcacacggtcccgcagtgttgttacggcttctgcatagaccttcttattaagctcgcacggaccatgaatttcacgtatgaggtgcacctcgtggctgacgggaaattcggaactcaggaacgtgttaacaacagcaataaaaaagaatggaatggaatgatgggggaattgctgtctggacaggcagacatgattgtggccccgctcacaattaacaatgagcgagcccagtatatcgaattttctaaaccttttaagtaccagggcctgacaatcctggtcaaaaaggagatccctagaagcacactggattcatttatgcaaccatttcagagtacactgtggttgctggtgggcctaagcgtacacgtggtcgccgtgatgctgtatttgctggataggttcagcccctttggcagattcaaggtcaattccgaggaggaggaggaggatgcactgactctatccagcgcaatgtggttcagctggggcgtcttgctcaatagtgggatcggggagggtgcccctaggagtttctcagcgaggattcttggcatggtttgggccggattcgccatgattatcgtggctagttacactgccaacttggctgcatttctggttctcgatcggccagaggagcgaatcactggcatcaatgacccaaggctgcgaaatccctctgacaagtttatttacgctaccgtgaagcaatcaagtgtagatatctattttcgtagacaggtggaactgagcacgatgtatagacatatggagaagcacaattatgagtctgcagccgaggctatccaggcagtgagagacaataaactgcatgccttcatctgggacagtgccgtccttgagttcgaggcaagtcagaaatgtgatttggtgacaacaggtgagctgttttttcgttctggctttgggattggtatgcggaaggacagcccctggaagcagaatgttagcctgtcgatcctcaagtcacatgaaaatgggtttatggaagatctggataaaacctgggtcagataccaagagtgcgatagccgttctaacgctccagccactttgactttcgagaatatggccggggtgttcatgttggtggctggaggcattgttgccgggatcttcctcatatttatcgagatcgcatacaagcgccacaaagacgccagaaggaaacagatgcagctggccttcgctgcggtgaatgtctggcgcaagaatctccaggtgggacaggccacgctgcgcggactggtcccacgggcaaggccaggccacggaccacccccgagtccaaaggcggtggcccttgcgttggcattggtagggagaaccggggctcggtctcatggccagggccagtggtag

SEQ ID NO: 189360 - DNA, 2832 bp, synthetic construct
  misc_feature 1..2832: note = Description of Artificial Sequence: Synthetic coding sequence
  source 1..2832: mol_type = other DNA
atgagcaccatgcggctgctgaccctggccctgctgttcagctgctctgttgcccgagccgcatgcgatccgaaaattgttaacattggcgctgtgctgtcaacgaggaagcatgagcagatgttccgagaggctgttaaccaggccaataagcgacacggctcctggaaaatccagttgaacgctacatctgtgactcataaacccaatgccatacagatggctctgagtgtttgtgaagaccttatttccagtcaagtgtatgcaatactcgtttcccatcctcctacacccaacgaccacttcacaccaacccctgttagttacacagctggattctatcgtattcctgtgttgggccttactaccagaatgtccatctacagcgacaaaagcattcacctgtcattcctgcgaactgtgccaccatatagccaccagtcaagtgtctggttcgaaatgatgagagtgtatagctggaaccacatcattctgctcgtgagcgatgaccatgaagggcgggcggcccaaaaaaggctggaaaccctgctcgaagaacgtgagagtaagtcaaaaaagaggaactacgaaaacctggatcaactctcttatgacaacaaaaggggtcccaaagcagagaaagtgttacagtttgatcccggcactaagaacgtgacggccctgcttatggaggccaaggaacttgaagcccgtgtgataatactgagcgctagcgaagacgacgcagctaccgtgtatcgagctgccgcgatgctaaacatgactggctccgggtatgtgtggctggtcggggaaagagagattagtggaaatgcgctaaggtacgcccccgacggcatcctgggattacagctgattaatggcaagaacgaatccgctcacatcagtgacgccgtcggagtggtggcccaggccgttcatgagctcctggagaaagagaatatcaccgatccccctaggggttgcgtgggcaacacaaacatctggaaaactggacccttgtttaagcgcgtgctgatgagctcaaagtacgccgacggcgttacaggccgcgtggaatttaacgaggatggggatcggaaattcgctaactattccattatgaatctgcagaacagaaagctggtgcaggtgggcatctacaatggaacccatgtgattccaaacgataggaagattatatggcctgggggggagacggaaaagccccgggggtaccagatgtcaacaagactcaaaattgtcaccattcatcaggagccattcgtgtatgttaagccgacacttagcgacggaacttgcaaggaagagtttactgtgaacggtgatcctgtgaagaaggtgatctgcacaggaccaaatgatactagccctggatcacccaggcacacagtcccccagtgctgctacggtttctgtattgatttactgattaagctggcccgaaccatgaactttacctacgaggtccacttggtggccgacgggaagttcggaacacaggaacgtgtaaataactccaataaaaaggagtggaacggtatgatgggtgaactcctgtcaggccaggctgatatgattgtcgcccccctgacaatcaataacgagcgggctcagtacatcgagttctctaaacctttcaaataccaggggctaactattctcgtgaaaaaggaaatccctagatccactctcgactctttcatgcaaccatttcagtccacactctggctcctagtcggactgtccgtgcacgtcgttgcagtgatgctatacctgctagacagattctcccccttcggtaggttcaaggtgaattccgaagaagaggaggaggatgcacttacactctctagcgccatgtggttctcgtggggggttctcctgaattccggcattggtgagggcgcaccgcgctccttttctgctcgtattcttgggatggtctgggcagggtttgccatgattattgtggcctcttacaccgcaaacctggctgcctttttagtgctcgatagaccagaggagcggatcaccgggatcaacgatcctcgcctgagaaatccctccgataaatttatttatgccacggtaaaacagagtagcgtggatatctattttagacgccaggtggagctgtccaccatgtaccggcatatggaaaagcataactacgaaagtgccgctgaggcaatccaggccgtgagggacaataagctacacgcattcatttgggattccgctgtcttggaattcgaggcttcgcagaaatgcgatctggtcacaacaggtgagctctttttccgtagtggattcggcatcggaatgaggaaagattctccatggaaacagaacgtgtccctgtccatacttaagtctcacgagaatggcttcatggaagaccttgataagacatgggtgagatatcaggaatgtgatagcagaagtaacgctcccgccacgttgacatttgagaacatggcaggggtctttatgctggtagcaggggggatcgtcgccggcatcttcctgatattcatcgaaattgcctataagcgccacaaagatgcaagacggaagcagatgcagctagccttcgccgccgtaaacgtgtggaggaagaacctgcaagatcggaaaagcggaagggccgagccggaccccaagaagaaggccaccttccgggctataacaagtacattagcttcaagctttaaacggaggcgctcctccaaagacacccagtaccacccgacagatataacgggacctctcaatctctccgaccctagtgtgagcacagtggtgtag

SEQ ID NO: 189361 - DNA, 2769 bp, synthetic construct
  misc_feature 1..2769: note = Description of Artificial Sequence: Synthetic coding sequence
  source 1..2769: mol_type = other DNA
atgagcaccatgcggctgctgaccctggccctgctgttcagctgctcagtggcacgcgccgcgtgtgaccccaaaatcgtgaatattggagcggtgttgtccacccgaaaacacgagcagatgttcagagaagctgtgaaccaggccaataagcgacatggctcctggaaaatccagctgaatgcaactagcgtcactcacaagcccaacgccatacaaatggcactctcagtgtgcgaagatctcatatccagtcaggtttacgcaatccttgtgtcacatccaccaacaccaaacgatcacttcacacccaccccggtcagctacactgcagggttttaccgcatccctgtgctcggacttactactcgaatgagtatttattccgataaatctatccatctgtcatttctcagaaccgtgcccccatacagtcaccaaagttcggtgtggttcgagatgatgcgggtatatagttggaatcacatcatcctactggtcagtgatgaccacgaaggccgggcggctcaaaaacgactcgagacattgttggaggaacgcgaaagtaaatccaagaagcggaactacgagaacttagaccaattgtcatacgacaataaacgagggccaaaggccgagaaggtcctgcagttcgatcctggaacaaagaatgtgactgcgctgcttatggaagccaaagagctcgaggcaagagtgataatcctgagcgcttccgaagacgatgctgcaaccgtgtatcgggctgcagctatgttgaatatgactggctcagggtatgtgtggttagtcggagagagggagatctcaggtaatgcccttcggtacgcccccgatgggattcttggacttcaattaattaacggaaaaaacgagtccgcccacatctccgacgctgttggcgtggtcgcacaagccgtgcatgaactcctcgaaaaggaaaacattactgaccctccgaggggctgtgtcggcaacactaatatatggaaaaccgggccgctgttcaaaagagttttgatgtcctctaaatatgccgacggtgtgactgggcgggttgaatttaatgaggatggagatcgaaagttcgccaattactctatcatgaatctgcaaaataggaaacttgtgcaggttggcatctataatgggacgcacgtcattcccaacgatagaaaaatcatatggcccgggggtgaaactgagaagcctagaggctatcagatgtcgacccgactgaagatcgtcaccattcaccaggagcccttcgtgtatgtgaagccaaccctctctgatggtacatgtaaagaagagttcacggtgaatggagaccctgtcaaaaaggtaatttgcactggtcccaatgatacaagccctggtagtccccggcacaccgtgccccagtgctgttatggattctgcattgatctattaataaagctggctaggaccatgaattttacttatgaagtacatctagtggccgatggcaaatttggaacccaggagagagttaataattctaacaagaaagagtggaatggaatgatgggagaactgctttctggtcaggccgatatgatcgtggcacccctcaccatcaataatgaaagggcccagtacatcgagttctccaagccctttaagtatcaggggttgaccattctcgtgaaaaaggagataccccgcagcaccctagatagttttatgcagcccttccagtccaccctctggctgctggtcggactgtctgtgcacgtcgtcgccgtaatgctctatcttctcgaccgattctctccatttggccgatttaaggtgaatagtgaggaggaggaggaggacgctctcacactcagctccgcaatgtggttcagttggggcgtgctgttgaactccgggattggcgaaggcgcgcctcgctctttctcagcacgcattctcggaatggtttgggccggcttcgctatgatcatcgtggcgagttacacggccaacctagcagcttttcttgtcctcgacaggccagaggagcggatcaccggtatcaatgatccccgactgcgtaatccttcagacaagttcatctacgccacggttaaacagtcaagtgttgacatctacttccgccggcaagtggagctgtccactatgtatagacacatggaaaagcacaactatgagtcagctgccgaggctatacaggccgtgcgagacaacaagctgcatgccttcatatgggattctgccgtactcgaatttgaggcttcacagaagtgcgacctcgtgaccaccggcgaactcttcttccgtagcggcttcggtataggcatgaggaaggacagtccctggaaacaaaacgtaagtctctccattcttaaatcgcatgagaatggatttatggaagacctagacaagacctgggtgaggtaccaagagtgtgactcccgctccaatgcaccagccaccctgacatttgaaaacatggccggtgtattcatgctcgtggcaggtggaattgtggcaggaatctttctaatatttattgaaatcgcctataaacgccacaaggatgcgagacggaagcaaatgcagttggcattcgcagcggtgaacgtgtggcgcaaaaacctccagtccaccgggggcggccggggggcccttcagaaccagaaggatacagtgctgcctcggcgagccattgaacgcgaagagggccagttacaactgtgcagtcgccatcgggagagctag

SEQ ID NO: 189362 - DNA, 2721 bp, synthetic construct
  misc_feature 1..2721: note = Description of Artificial Sequence: Synthetic coding sequence
  source 1..2721: mol_type = other DNA
atgagcaccatgcggctgctgaccctggccctgctgttcagctgcagcgttgcgagagccgcctgtgatcccaaaatcgtgaacatcggggccgtgctgtctacaaggaaacacgagcagatgtttagggaggccgttaatcaggcaaacaaaagacatggcagctggaaaatccagctgaacgccaccagtgttacacacaagccaaatgccattcagatggccctaagcgtctgcgaggacttaatcagttcccaagtttacgccatactggtatctcatccccctactcctaacgaccacttcacacctactcctgtgtcttacaccgctggtttttacaggattcctgtgttaggccttacaacaagaatgagcatctattctgataagtctatacacctgtccttcctgcggacagtcccaccgtattcccaccaaagttccgtttggtttgagatgatgcgagtgtatagctggaatcacattatcctccttgtttccgacgaccacgagggaagggccgcgcagaaacggctggagactcttctcgaggagagggagtccaagtctaagaagcggaactatgaaaacctcgaccagttgagttatgataataagagaggccccaaggcagaaaaggtcctccaattcgatccaggcaccaaaaatgtcacagcgctactgatggaggcaaaagagctggaggcacgtgttatcatcctgtcggcttcggaagacgacgccgccacagtctatcgtgccgcggctatgcttaacatgacagggtcagggtacgtttggctcgtaggcgaacgggaaatttcaggcaatgccttgcgttacgctcctgatggcatactcgggctgcagttgataaacggaaagaatgaatccgcgcacatctccgatgctgtgggtgtggtagcccaggctgtgcacgagcttctggagaaggagaatatcaccgatccaccaaggggttgtgtcgggaataccaacatttggaagacaggtccactcttcaagcgagtcttgatgagcagtaagtatgccgatggggtcaccggtagggtggaattcaacgaggatggcgatcgaaagttcgcaaactacagcattatgaatttacagaacaggaagctagtccaggtgggcatctacaacggaacgcacgtgattcccaacgataggaaaataatttggccggggggggagactgagaagccaaggggttatcaaatgagtacacggctgaagatcgtgaccatacatcaggagcccttcgtgtatgtgaaaccgaccctcagtgacggcacatgtaaggaagagtttaccgtgaacggtgatccagtgaaaaaggtgatctgtaccggccctaatgataccagcccaggctctccgcgacacacagtgccccagtgctgttatgggttttgcattgatcttttaattaagctggctagaaccatgaatttcacatatgaggttcatctggtggctgatggcaagttcggcacacaggaaagggtgaacaactctaacaaaaaagaatggaatgggatgatgggtgaacttctgagcgggcaagcagacatgattgttgcaccactgactattaataacgaacgggcacaatacatagaattttccaagccttttaaatatcagggcctgacgatcctggtgaagaaagagattccacgctcaacactggatagtttcatgcagccctttcaaagcacactatggctgctcgtcgggttgtcagtgcacgtagtcgccgtgatgttataccttcttgacagatttagcccttttgggagatttaaggttaattccgaggaggaagaggaagacgctctcacattgtcctcagccatgtggtttagctggggcgtgctcttgaactcaggtattggcgagggggcacctcgaagcttctcagcccgcattctggggatggtttgggcaggcttcgcgatgattatcgtcgctagctatacggctaatcttgccgcattcctggtactcgaccgcccggaagaaaggattacaggaattaatgacccacggttacgcaatccatcagataaatttatctacgcaacagtgaagcagtcctcagtagatatatattttcgtcgacaggtggagctgtccaccatgtatagacacatggaaaaacataactacgaaagtgccgccgaggcgatccaagccgttcgggacaacaagcttcacgcgttcatttgggattcggcagtgttggaatttgaagccagccaaaagtgcgaccttgtgactactggggagctgttttttcgctccgggtttggcatcggtatgcgaaaagattcgccgtggaaacagaatgtgtcattgtccattctgaaatctcatgaaaatgggttcatggaagatctagacaagacctgggtacgttatcaagaatgcgatagccgatccaacgcccctgctacactcaccttcgaaaacatggctggagtgtttatgctcgtggccggcggcatagtggccgggattttccttatattcatcgaaatcgcctataagagacacaaagacgcacggcgcaagcaaatgcagctcgcctttgcagccgtaaatgtatggcgaaagaacttacaacagtatcaccccacagatattactgggcctctcaatctgtccgatccaagcgtttctaccgtcgtatag

SEQ ID NO: 189363 - DNA, 2817 bp, synthetic construct
  misc_feature 1..2817: note = Description of Artificial Sequence: Synthetic coding sequence
  source 1..2817: mol_type = other DNA
atgagcaccatgcggctgctgaccctggccctgctgttcagctgctctgtagcacgcgccgcctgtgatccgaagattgttaacattggagccgttctctctacccgcaaacacgaacagatgtttcgcgaagccgtgaatcaggctaataagaggcatggcagctggaagattcagctcaatgccacctctgtgactcataaacctaacgccatacaaatggcactgtctgtgtgtgaggatttgatttcgtcacaggtctatgccatcctcgtgagccaccccccaaccccgaatgaccatttcacacccactcccgtcagctacaccgctggattttatcggatccccgtgctgggactcaccacaaggatgagcatctatagtgacaaaagcatccacctcagtttcctaaggacagtgcccccatactcgcaccagtcatcagtctggttcgagatgatgagagtatattcgtggaaccacattattctattggtgtcggacgaccacgagggaagggccgcacagaagcggctcgagaccctgctggaagagagagagagtaaggccgaaaaagtacttcagtttgaccctgggaccaaaaacgtgacagcattgctaatggaagccaaggagctggaagcaagagtcattatcctctccgcgtcagaggacgacgcagccactgtgtatcgggcggcagcaatgctgaatatgaccggttccgggtacgtgtggctggtgggcgaaagggaaatcagcggcaacgccctcaggtatgccccagacggtatcctgggattgcagctcattaacgggaaaaatgagtctgcccacattagtgatgccgtcggcgtggtggcgcaagcagtgcacgagctgcttgagaaggaaaacattaccgatcccccccggggatgcgtggggaacaccaatatctggaaaacaggccctctctttaaacgtgtgctcatgagctccaaatatgccgatggggtgacgggccgagtggaatttaacgaggatggcgaccgcaagtttgctaattattccataatgaatctgcaaaatcggaagttagttcaggttggcatttataatggcacccacgtcatccccaacgatcgtaaaatcatctggcctgggggcgaaactgagaagcccagaggataccaaatgtccacgcggttgaagatcgtgaccatccaccaagagccgtttgtgtatgtaaagcccacactcagtgatggaacatgtaaggaggaatttactgtcaatggcgaccccgtgaaaaaggtaatctgtactggaccaaatgacacatcacctgggagtcctaggcacactgtaccacagtgctgctatggtttttgcattgacttacttataaaactggccaggaccatgaacttcacctacgaagtgcacctggttgctgatggcaaatttggcactcaagagagggtgaataactccaacaaaaaagagtggaacggtatgatgggggaattactgtctggacaggcagatatgattgtggctcccttgactatcaataacgaacgggcccaatacatagaattttcgaagccttttaagtaccagggcctgacgatactagtaaagaaagaaatccctcgcagcaccctggatagttttatgcagcccttccaatccacattatggctgctggtggggctgtcggtacatgtagtggccgtgatgctgtacctcctggataggttctccccatttggaagattcaaggtcaactcagaggaggaggaggaggacgccctgacactgagcagcgccatgtggttttcctggggggtgctgctgaattctgggataggcgagggagcgcccagatcttttagcgcgcgaattcttgggatggtgtgggcgggtttcgcaatgataattgtggcttcttataccgccaatctggccgcctttctcgtgctggatcgccccgaggagcggattaccggcatcaatgatcctcgacttcgcaacccatctgacaaatttatatacgcgaccgtgaaacagagctccgtcgatatctatttccgacgacaggtcgagcttagcacgatgtaccggcacatggaaaagcacaactacgagagcgctgcagaggccatccaggctgttcgcgataataagctgcatgcctttatctgggattccgctgttctggaattcgaagccagtcagaagtgcgatttggttacaacaggagaacttttttttagatccgggtttgggatagggatgcggaaggattctccctggaagcagaacgtgagcctctccatcttaaaatctcacgaaaatggcttcatggaggatctcgataagacgtgggtgaggtaccaagaatgtgacagccgctccaatgctcccgctactctgacatttgaaaatatggccggagtgttcatgctggtggccgggggaattgtcgccgggatcttccttatctttatcgagatagcttacaaacgccacaaagacgcccggcgcaaacagatgcagcttgccttcgctgccgtgaacgtctggagaaaaaatctacaagatcggaagtccgggcgagcagagccagatccaaagaaaaaagctaccttccgagctataaccagcacgctagccagcagctttaaaagaaggagaagctcaaaggatacctcaactggaggaggacggggtgctcttcagaatcaaaaagataccgtcttgccgaggagagccatcgaaagagaggagggtcaactgcagctgtgttccagacatagagagtcttag

SEQ ID NO: 189364 - DNA, 4395 bp, synthetic construct
  misc_feature 1..4395: note = Description of Artificial Sequence: Synthetic coding sequence
  source 1..4395: mol_type = other DNA
atgggccgggtgggctactggaccctgctggtgctgcccgccctgctggtttggaggggcccagctccgagtgccgctgccgaaaaaggaccgcctgccttgaatatcgcggtgatgctcggccactcacacgatgtcaccgaaagggaactgcgcactctgtggggcccggagcaggccgccggactgccacttgacgtgaacgtggtcgctttactcatgaatcggaccgatcctaagagcctaatcacccacgtatgcgatctgatgagcggcgcccggatccacggcctggtgtttggagatgataccgatcaagaggcggtagcacagatgcttgattttatctcttcccatacttttgtgcctattcttgggattcacgggggcgcatcaatgatcatggccgataaagatcccacatcgaccttctttcagtttggtgcttccatacagcagcaggccaccgtgatgctgaagatcatgcaggattacgactggcacgtgttctccctagtgactaccatctttccaggttacagagaatttataagttttgtgaagacaactgtggacaattcttttgtggggtgggatatgcaaaacgtgataacccttgatacctcatttgaggatgccaagacgcaggtacagcttaaaaaaatccattcatcagtgattcttctctactgctccaaggacgaagctgtgctgatcctcagcgaagcaaggtcgctgggactgaccgggtatgatttcttctggatcgtcccctccctggtttctggcaacaccgaactaatcccaaaggagttcccgtccggactgatcagcgtgagctatgatgactgggactattctctggaagcacgcgtgagggacggaatcggcatacttaccaccgcagcgtcctctatgctggagaagttctcttacatccctgaggccaaggcctcatgctacggacagatggagagacccgaggtccccatgcacacgctgcaccctttcatggtaaatgtcacttgggatggtaaggacctgagcttcaccgaggaagggtaccaggtccaccctcggcttgtagtgattgtgctgaataaggaccgcgagtgggagaaagtgggtaagtgggagaaccacacattatccctgcggcatgcagtctggccacgttataaaagcttctctgattgtgaacccgacgataatcatttgtcaatcgtgacgctggaagaagcccccttcgtgatagtggaagacatagatcccttaacggagacgtgtgtgagaaataccgtgccgtgtcgtaagttcgtcaaaatcaataatagcacaaacgaaggcatgaatgtgaaaaaatgttgcaaaggtttttgcattgacattctcaagaaactgagtagaacagtcaaatttacatacgacctgtacctggttacaaatggaaaacatggcaagaaggttaataatgtctggaatggaatgattggcgaagtggtctaccagcgcgccgtaatggccgtgggtagcctaacgataaatgaagaacgctctgaagtggtcgacttcagtgtccctttcgtagaaacgggtatcagcgtgatggtgagccgcagcaacggaactgtctcacctagcgcgtttcttgaacctttttccgcatccgtttgggtcatgatgttcgtgatgctgttgatagtgtccgcaattgcagtttttgtgtttgagtactttagcccggtcggctacaatcgaaaccttgctaaggggaaggccccacacggaccctccttcaccattggaaaagccatctggctgctgtggggcctcgtgttcaataacagcgtgcccgtccagaatcctaaaggcaccacttctaagataatggtcagcgtttgggcctttttcgccgtgatttttcttgcttcctacacagcgaatctagcagccttcatgatccaggaggaattcgtcgaccaggttacgggcctgtcagacaagaagtttcagcgtccacacgattactcccccccctttagatttgggactgtgccgaacgggtcaacggagcgcaacataaggaacaactacccgtacatgcaccaatacatgaccaaattcaatcagaagggggtggaagacgccttggtaagcttgaaaaccgggaaactggacgcatttatttacgatgcagccgtgctcaattacaaagccggtagggacgagggctgcaagctggtgaccattggctctgggtacatattcgccactacagggtatggtattgcactgcagaaaggttctccttggaagcgccaaattgacctggctctgcttcagttcgttggggacggtgagatggaggaactcgaaaccctttggctgaccggcatttgtcacaacgagaagaatgaagtaatgtcctcccagctcgacatagataatatggctggagtgttttatatgctcgcagccgccatggccctgtctctgatcacctttatctgggagcaccttttttactggaaattaaggttctgtttcaccggggtctgcagtgaccgcccaggactgctgttttctatctcccgagggatttattcctgtatccatggcgttcatatcgaagagaaaaaaaaatcacccgattttaacctcacaggctctcagagcaatatgctgaagctcctgcgcagtgccaaaaatatatctagcatgagtaacatgaattctagtaggatggacagcccaaagcgggcagccgacttcatccagcgaggctcactcatcatggacatggtgagcgataagggtaacctgatgtacagcgacaacaggagctttcaaggaaaggagtctatttttggggataatatgaacgaactgcaaacgttcgtggccaaccgacagaaagacaacttaaacaactacgttttccaggggcagcacccactgactctgaatgaatctaatccaaacactgtggaggttgccgttagtacagagagcaaggccaattctagacctcgtcagctgtggaagaagagcgtggacagcatcagacaagactccctaagccagaaccctgtgagccaacgggacgaagccacagctgaaaacagaacccactccctcaaatccccgcggtacctgcctgaggagatggctcactcagatatcagtgaaacatctaatcgcgcgacatgtcaccgagagcctgataattcaaagaaccataaaacgaaggacaactttaagcgatccgtagcttctaaatatcccaaggactgctcagaggtggagagaacctatttgaagacgaaaagctcctcacctagagataaaatctatacaatcgacggcgaaaaggagcccggatttcacctggatccccctcagtttgtggagaatgttactctaccagagaatgtcgacttcccagatccataccaggacccctccgagaattttaggaaaggtgactctacacttcccatgaacaggaaccccctacataatgaagaaggactctctaataatgatcagtacaagctgtactctaaacactttaccctgaaggataagggatctccccattctgagacttctgaaagatatcgccagaactctacccattgcagaagttgcctgagcaatatgccaacatatagcgggcacttcaccatgagaagcccattcaagtgcgacgcgtgtttgcgcatgggcaatctttacgacatcgatgaagaccagatgctgcaggagacaggaaatcctgcaactggcgaacaggtgtaccagcaggattgggcccaaaataacgccctgcagttacagaaaaacaaacttaggatttcccggcagcactcatatgacaacattgtggacaaacctcgagaactagatctcagtcgcccctcaaggtcaatatctttaaaggacagggagaggctactggagggaaacttttacggttccctcttctcagtgccatcaagtaagctcagcggcaagaagtcttctctgttcccacaggggctggaggactcgaaaagaagcaaatccctgcttcccgaccacacgtcagataacccctttctccattcacacagagacgaccagcgcctagtcataggacgctgtccgtctgatccttataaacactccctgccaagccaggctgtcaatgactcatatcttaggtcgtcattgcggtccacagcctcttactgcagccgcgattctagaggtcataacgatgtctacatatcggagcatgtaatgccttatgcagcaaacaagaataacatgtactcgactccccgcgtccttaattcctgctccaacaggcgggtgtacaaaaaaatgcccagcattgaatccgatgtctag

SEQ ID NO: 189365 - DNA, 4395 bp, synthetic construct
  misc_feature 1..4395: note = Description of Artificial Sequence: Synthetic coding sequence
  source 1..4395: mol_type = other DNA
atgggccgggtgggctactggaccctgctggtgctgcccgccctgctggtctggagaggccccgccccaagcgctgccgccgagaaaggcccaccagcattaaacatcgccgtaatgttgggccactcccatgatgttacagagcgagagctccgcactctttggggccccgaacaggccgcaggcttaccccttgatgtcaatgtcgtcgctctgctgatgaatcgcacagaccccaagtcactcattacacacgtctgtgacctcatgagcggagccaggatccatggactggtgttcggcgatgataccgaccaggaagccgtcgcccaaatgctcgatttcattagtagccacacgtttgtgcccatcctaggtattcacgggggggcttccatgattatggctgacaaggacccaacaagcacctttttccaatttggtgccagcatccagcagcaggctaccgtgatgctcaagataatgcaggattatgactggcacgtgttctccctggtgaccactatctttccaggttatcgggagttcatcagcttcgtgaagacaacagtggacaattcgttcgtggggtgggacatgcagaacgtaatcactctcgacactagctttgaagacgccaaaacgcaggtccagctcaagaagatccattcaagtgtcatcttactgtactgctcgaaagacgaagcagttctcatccttagcgaggctcgcagtctgggactaaccggttacgattttttttggatcgtccctagcctcgtgagtggcaatacagaactgattcctaaagagtttcccagcggcctcattagtgtttcttatgacgactgggactatagtctcgaggcgcgtgtccgtgatggcatcggaatccttacaactgcggcttcatctatgttggaaaaattttcctatattcccgaagccaaggcctcttgttatggccagatggaacggcctgaagtgccaatgcacactttgcatccttttatggttaatgtcacctgggatgggaaagatctctcttttaccgaagagggctatcaagttcatccaaggctcgttgttattgtgttgaacaaagatagagagtgggaaaaggtaggcaagtgggagaaccataccttatctctaagacacgccgtgtggcccaggtacaaaagctttagcgactgcgagcccgatgacaatcacctatcgatcgtgaccctggaggaggccccattcgtcatagtggaggatatcgaccccctcactgaaacttgtgtgcgaaacacagttccctgtagaaaattcgtgaagatcaataatagtacaaatgaaggaatgaacgtaaagaagtgttgtaaggggttctgtatcgatatcctgaagaagctgtctagaacagtgaaattcacctacgacttgtatcttgtcacaaatggcaagcatgggaagaaggtgaataacgtctggaacgggatgattggtgaggtggtctatcagagggctgttatggccgtcggctccctgacaatcaatgaagagaggtccgaggtcgtcgacttctccgtgccatttgtcgagactggaatctcagtgatggtgagccgctctaacggtaccgtctcgccttctgctttcctggaacctttttcggcctctgtttgggtgatgatgttcgtaatgctccttatcgtgtctgccattgccgtcttcgtctttgagtacttttcccctgtcggctataatcggaatctggcgaaaggaaaagccccccacggcccttcttttacaatcggaaaggcaatctggcttctgtgggggctcgtctttaacaattccgtgcccgttcaaaatccaaaaggaaccactagtaagatcatggtctcagtgtgggctttcttcgccgtgatctttctggcatcctacactgcaaacctggcggccttcatgatccaagaagagttcgtagatcaagtgacggggttgtccgataagaagttccagcgcccccatgattacagcccccccttccgattcgggactgttcctaacgggtccacggagagaaatattcgaaacaactacccctatatgcatcagtatatgaccaaattcaaccagaagggtgtggaggacgcgctggtaagcctgaagacgggtaaattggatgccttcatctatgacgcagccgtgctcaactataaagcggggagggatgaaggttgtaaactggtcaccatcggatccggctacattttcgcgaccacaggctatgggatcgcactgcagaaaggaagtccatggaaaaggcagattgatctggccctgctccagttcgtgggagatggcgagatggaagagctggaaacactttggctgaccgggatctgccataacgagaagaatgaggtgatgagctcacagctcgacatagacaacatggcaggagtattttatatgcttgctgccgccatggccctgagtctaattaccttcatctgggagcatcttttttactggaagcttcgcttctgtttcacaggtgtttgttccgacaggcccggcctgttattcagcattagcagaggcatttactcatgtattcatggagttcacatcgaggaaaagaaaaagtcccctgatttcaacctcacgggctcgcagagtaacatgctgaagctgttgcggagcgccaagaatatcagttcgatgagtaacatgaactcgtcacggatggacagcccgaagcgggccgcggatttcatccaaaggggaagccttatcatggacatggtttccgacaaggggaacttgatgtactccgacaatcggtcttttcaaggcaaagaatcaattttcggagataatatgaatgaattacaaacctttgtggctaaccgccagaaggacaatctgaataattacgttttccaggggcaacatccattgaccttgaacgagagcaatcctaacaccgtggaagtggctgttagtacagaatctaaagcgaattcccgtcccaggcaactgtggaaaaaatctgttgattccatccgccaagactcactgtcgcagaacccagtctctcagcgggacgaggccactgctgagaatcgaactcactctctcaagagtccgagatatctgcccgaagagatggctcatagcgatattagcgagacctccaaccgagccacttgccacagggagcccgataattccaaaaaccacaaaaccaaagacaattttaagcgctcagtggcttccaaatacccaaaagactgtagcgaggtcgagcggacatacctcaagacgaaaagttcttctccacgcgacaagatctacactatcgatggcgagaaggaaccggggtttcatcttgacccaccccagttcgtagaaaatgtcacactgccggagaatgtggactttccagatccctaccaggacccatctgaaaacttcaggaagggcgactccacactaccaatgaatcggaaccccctgcataatgaagaaggactaagtaacaatgaccagtacaagttgtatagcaagcattttaccttaaaggacaaaggttctccccactctgaaacttcagaacggtatcgccagaacagcacgcactgtagatcctgtttgtcaaacatgcctacttacagcggccatttcacaatgaggtcaccttttaagtgtgatgcttgcctgcgaatgggaaatctctatgacatcgatgaagatcagatgcttcaggagacggggaaccccgccaccggcgagcaggtttatcagcaagactgggctcagaataacgctctccagctccagaaaaacaagctgaggatctcccggcagcactcctatgataacatagtggataaaccccgagaactcgatctgagtcgacccagcaggagcatctcactcaaggatagagagcgtttactcgaaggtaatttttacggatctctgttcagtgtcccctccagtaaactgagcggtaaaaaaagctccctcttccctcaaggcctcgaggattctaaaaggtcaaagtctttacttccagatcatacaagcgataaccccttcctccacagtcacagggatgatcagcggctggtgatcggacggtgtccttctgacccttataagcactctttgccgtcacaggcagtgaatgatagctaccttcgaagcagtctgagatcaaccgcttcttattgctcacgcgactcccgcggccataacgatgtgtacataagtgaacatgtgatgccatacgctgccaataagaacaacatgtacagtacaccgcgggtcctcaattcttgcagtaataggagggtttacaagaaaatgccaagcattgagtccgacgtttag

SEQ ID NO: 189366 - DNA, 4395 bp, synthetic construct
  misc_feature 1..4395: note = Description of Artificial Sequence: Synthetic coding sequence
  source 1..4395: mol_type = other DNA
atgggccgggtgggctactggaccctgctggtgctgcccgccctgctcgtatggcggggtccagctccctcagccgctgctgagaaaggacctcctgcattaaatattgccgtaatgttggggcacagtcatgatgttacggaacgggagcttagaaccctgtgggggccggagcaggcagcaggcttgccgcttgacgttaatgttgtcgcccttttgatgaacagaactgatccaaaatctcttattactcacgtgtgtgacttgatgagcggtgccaggatccacggtttagtgtttggagatgacaccgaccaggaggctgtggctcagatgttggatttcatctcaagccacaccttcgtccctatacttggtattcacggcggagcctcgatgattatggcagataaagatcccacgtccacgtttttccagttcggcgcttccatacagcaacaggccacagtgatgctaaagatcatgcaagactatgactggcacgtcttttcattagtaacaaccattttcccgggctacagggaatttatatctttcgtcaaaactactgtggataattcgtttgtgggctgggacatgcaaaacgtgatcacactcgatactagcttcgaagacgccaaaactcaggttcaattaaaaaaaattcatagctccgtaatactcctctactgttccaaggatgaagccgtgttaatcctcagcgaagctagatcccttggcctaacgggctacgactttttctggattgtaccctcgctagtttctggcaacactgagctcataccgaaagagttcccatctggcctcatatctgtctcctatgacgactgggactacagcttggaggctagggttagggacgggatcggcatcctgactacagccgctagctcgatgctcgagaagttttcctacatccctgaggcaaaggcctcatgctacggccagatggagcggccagaggtgccaatgcatactctgcatccttttatggtgaacgttacttgggatggtaaagacttatcattcacagaagagggataccaggttcatccacgcctcgtagtgatagtcctcaacaaagatagagaatgggaaaaggttggtaaatgggagaatcataccctcagtctgaggcacgctgtgtggccgcgatataagtcattttcagattgtgagcctgacgataatcatttgtctatcgtcacccttgaagaggcgccttttgtgatcgtcgaggacatcgaccccctgaccgagacatgtgtacgaaacactgtaccctgtaggaaatttgtgaagattaataattccaccaatgaaggaatgaacgtgaagaaatgctgtaaggggttctgcatagatatactgaaaaagttaagtcggaccgttaaattcacgtatgatctgtatctggtgaccaacggcaagcatggaaagaaggtcaacaacgtatggaacgggatgatcggggaggtcgtgtaccaacgcgccgtaatggccgtcggcagtctgaccataaacgaagagcgtagcgaagtggtagatttttccgtcccgtttgtggagaccggcatttcagtgatggtctcacgatctaatgggactgtgtcccctagcgcattcttagagccattctcagcatccgtttgggtcatgatgttcgttatgttactgatcgtcagcgctattgccgttttcgttttcgagtatttctctccagtgggatataaccgcaacctggcgaaggggaaggcgccacacggccccagtttcaccattgggaaggcgatttggttattatggggcctcgtctttaataattccgtgccagtccagaatccgaagggcaccaccagcaaaatcatggtgtcagtctgggcgtttttcgctgtgattttcctcgcaagttacacggccaatctcgctgcgttcatgattcaggaagagttcgtggaccaagtgaccgggctatctgataaaaaattccagagacctcacgactactctccaccttttagatttggaacggtgcccaatggctctaccgagaggaacattcggaacaattacccttatatgcatcaatatatgacaaaattcaaccagaaaggcgtggaggatgctcttgtgagtttaaagaccgggaaactcgatgcttttatctatgatgctgccgttctcaattataaagccgggcgcgatgagggctgcaaattggtgactatcggctccggatacattttcgccactactggttatggcattgccctccaaaagggctcgccctggaaacgccagattgatctggcattgctgcagttcgttggggatggtgagatggaagaactggaaaccctctggctcaccggcatctgccacaatgaaaaaaacgaggtcatgagctcacagttggatatcgataacatggccggagtgttctacatgctggcggcagcaatggccctctccctgattacatttatttgggaacatctgttctactggaagctgcgcttttgcttcactggcgtgtgctccgaccgccctggactgctgttctcaatatcccgtgggatttatagctgtattcacggagtacatatagaagagaagaagaagagccccgactttaatcttaccgggagtcagagtaatatgttgaagctcctgagatcagctaagaacataagctcaatgtccaacatgaacagcagcagaatggactcccctaaaagggcagccgatttcatccagcgcggctctttaataatggacatggtgagcgacaagggtaatctcatgtactctgataacagatcttttcagggcaaggagtctatttttggagataacatgaacgagctccaaacatttgtggcaaaccggcaaaaggataacctcaataattatgtctttcaggggcagcacccattgacactgaacgaaagtaacccaaacaccgtcgaggttgcagtgagtacagaaagcaaagcaaattccagacctcgccaactgtggaaaaagtctgtggacagcattcggcaggactctctgtcccaaaatccagtgtctcagagggacgaagccaccgccgaaaatagaacccactctctaaaaagccctcgctacctcccagaggagatggctcactctgacatatccgaaacatccaatcgcgccacctgccaccgcgagccggataactcaaagaaccataagaccaaggataactttaaaaggagcgttgcatctaaatacccaaaggactgtagcgaagttgagagaacctacttgaagacaaagagctcaagcccccgcgacaagatttatacaatcgatggagagaaggagcccgggttccacctggacccccctcagttcgtggagaatgtcactcttcccgagaacgtggacttccctgacccctaccaggacccgtctgagaacttccgtaagggagactcgactctgccaatgaacagaaatcctctgcacaatgaggagggactaagtaacaacgaccagtacaaactatacagcaagcacttcacactgaaggataaagggtctccacactccgagaccagcgagcggtatagacagaacagcactcactgcaggtcttgcctgtccaatatgcctacttacagtggacactttaccatgcgatccccctttaaatgtgatgcatgcctgagaatgggcaacttatatgacattgacgaagaccaaatgctgcaggaaacggggaatccagctaccggggagcaggtctaccagcaggattgggcccagaacaacgccctgcagttgcaaaaaaacaaactgcgaatttcacgtcagcattcatacgataatattgtagataagccacgtgaactcgatctttctaggccttctaggagcattagcctgaaggacagggaacggctgctcgagggaaacttctacggtagcttgtttagcgttccaagctccaagctctctgggaaaaaaagctcactgttcccacaaggccttgaggattctaaacgatctaagtcattactaccagatcacacatcagacaaccccttcctacactcccatagggacgatcaaagacttgtgattggtagatgcccttcggatccatacaaacattccctgccctctcaggcggttaacgattcatatcttcgaagttctctgcgttctacagcctcttactgttcacgggactcccgcggacataacgacgtgtatatttccgaacatgtgatgccctatgccgccaacaaaaataatatgtactccacaccgcgggttctgaattcttgctcaaaccgtcgcgtttacaagaagatgccttctattgagtcggatgtttag

SEQ ID NO: 189367 - DNA, 3846 bp, synthetic construct
  misc_feature 1..3846: note = Description of Artificial Sequence: Synthetic coding sequence
  source 1..3846: mol_type = other DNA
atgggccgggtgggctactggaccctgctggtgctgcccgccctgcttgtgtggaggggtcctgctccgtcagccgctgcagaaaaaggtccgcctgcacttaatatcgcagttatgttggggcactctcatgacgtcaccgaacgcgagctccggaccctgtgggggcctgaacaggcggcaggcctacctttggatgtcaacgtggtggcgctcctgatgaacaggaccgatccgaagagcttgataacccacgtttgcgatctcatgagtggggcaagaatacacgggcttgtctttggagacgatactgatcaggaagcagtagcacaaatgcttgattttatatcttctcataccttcgtaccaattctgggcatacacggtggcgcatccatgattatggccgataaggaccctacgtccaccttctttcagttcggcgcatccattcagcagcaggcaaccgtgatgctaaaaattatgcaggactatgattggcatgtgttttccctggttactaccatcttccctggatatcgtgagttcatttcctttgtgaagaccacggtcgacaattcatttgtgggctgggacatgcagaacgtcatcaccctggacacaagtttcgaggatgcaaagacgcaggttcagttgaaaaaaatccactcatcggttatcctcctgtattgttctaaggacgaggcagtgctgattctttcagaagctcgctcattgggactcaccgggtacgacttcttctggattgtaccatccttggtgtctggcaacaccgaacttattcctaaggagtttccttcaggtctgatcagcgtgtcttacgatgactgggattactccctggaggcaagagtccgagatggaatcgggatcctgacaacagccgcctcgtctatgctggaaaagttttcgtatatccctgaggctaaggcatcatgctacggtcaaatggagcgcccagaagtgccgatgcacacactgcacccctttatggtgaatgtaacatgggacgggaaagacctgtcattcactgaagaagggtaccaggtccatccgcgcttggtggtgattgtcctgaataaggaccgtgaatgggaaaaagtaggaaagtgggagaaccacacactgagccttaggcacgcagtgtggcctaggtacaaatccttctctgactgcgagccggatgataatcatctgtccatcgtaaccctcgaagaggccccctttgtcattgttgaggatatcgatcctctaaccgaaacgtgtgttcgaaacacagttccttgccgtaagttcgtcaagattaacaattccaccaatgagggaatgaacgttaaaaagtgttgtaaagggttttgcatcgacatactgaagaagctatctagaaccgtcaaattcacatacgacctctatctggttaccaacggtaaacatggcaaaaaagtgaacaatgtatggaatgggatgataggagaggtcgtatatcaacgggcagtcatggcggtgggctccctgacaattaacgaggaaaggagcgaggtagtggacttcagcgtgccattcgtcgagacgggcatttcggtgatggtgtccaggagtaacggaacagtctcgccatctgccttcctagaaccattctcagcttcagtctgggtaatgatgttcgtgatgctcttaatcgtatccgccatcgcagtatttgttttcgagtatttctcgccagttggctataaccggaaccttgccaagggtaaggctccccacgggccgtcatttaccatcggtaaggccatatggctgctttggggtctggttttcaacaactctgtgcctgtacaaaatcctaagggaaccactagcaaaattatggtatccgtttgggcctttttcgccgtaatttttctggcatcatacacggccaatcttgcagcctttatgatccaggaggaattcgttgaccaggtgacgggactcagtgacaagaagttccaaaggccacacgactactcccctcctttccgcttcgggacagttccaaacgggagcaccgagagaaacataagaaacaattacccgtatatgcaccagtatatgacgaagtttaaccagaaaggagtcgaggacgcccttgtaagtctaaagacaggcaaactcgacgcctttatttacgatgctgctgtactgaactataaagccgggagggacgaaggttgcaaactggtcaccatcggctcaggctatatatttgccactactggatatgggattgccttacaaaagggtagtccatggaagcgccagattgacctagccctcttacaatttgtgggcgatggagaaatggaggaactggagaccctgtggttgactggcatttgccacaatgagaaaaacgaggtgatgagcagccaactggacatagataatatggccggggtcttttatatgctggcagcagcgatggctttaagcctgattacctttatttgggaacacttgttttactggaaactgcgcttctgcttcacaggtgtctgtagtgataggcccggtctcctgttttctatctccagggggatttactcctgcattcacggcgtccatatcgaggaaaagaaaaagtcgcccgattttaacttaaccggatcacagtccaacatgctcaaattgcttaggtctgcgaagaatatcagttcaatgtcgaacatgaacagcagcagaatggatagccccaaacgcgctgcagatttcatacagcgggggtctctcatcatggacatggttagcgacaagggcaatttaatgtatagcgacaacagaagctttcagggcaaagagtccattttcggcgataacatgaatgagctccagactttcgttgccaaccgtcagaaggacaacctgaataattatgtgtttcaggggcaacacccgctgacactgaatgagtctaaccctaacactgtggaagtcgccgtttccactgagagcaaagccaacagcaggccccgccagctgtggaaaaaaagtgttgattctatccgtcaggactcccttagccaaaacccagtttcccaaagggatgaggccacagccgagaataggacccactccctgaagtctcctaggtacctcccggaagagatggcacactccgatatctctgaaacttcaaaccgagcgacctgccaccgtgaaccagataattcgaagaaccacaagactaaagacaacttcaagaggagtgtggcatctaagtatcctaaggattgctccgaagtagaacgaacatacctcaagactaaatcttcaagccccagggacaagatttataccatcgacggtgagaaggaaccaggttttcatttagatccaccccagttcgtcgagaacgtgacacttccggaaaatgttgacttcccggacccataccaggaccccagtgagaactttcgtaagggcgattcaacattacctatgaatagaaacccacttcacaacgaagaaggcctctctaataacgaccagtataagctctattcaaagcacttcacccttaaagataagggcagcccccactctgagaccagtgaaagatataggcagaatagtacacactgtagatcttgtttatccaatatgcccacttatagcgggcacttcaccatgaggtcaccatttaaatgtgatgcctgtcttaggatgggtaatctgtacgacattgacgaggaccaaatgttacaggaaacgggtatgaccaacgcatggctcctgggggacgccccaaggacactcaccaatactaggtgccaccctagacgatag

SEQ ID NO: 189368 - DNA, 3375 bp, synthetic construct
  misc_feature 1..3375: note = Description of Artificial Sequence: Synthetic coding sequence
  source 1..3375: mol_type = other DNA
atgctgaagatcatgcaggactacgactggcacgtgttcagcctggtgacaactatcttccccggttaccgggagttcatttcctttgttaagacgactgtggataacagcttcgttggatgggacatgcaaaacgtaattacactggacacctcatttgaagacgctaagacacaggtgcagttgaaaaagatccattcgtcagtgattctactgtattgttcgaaggatgaagctgtgctaattctcagcgaagcccgttctctgggccttactgggtacgattttttttggatcgtgccctcactggtgagcggcaatacagaacttattcctaaggagtttccctccggtctcatcagcgttagctatgacgactgggattacagtctcgaagctcgagtgcgcgatgggatcgggattctcaccactgcagcaagttcaatgctggagaagtttagctacatccccgaggccaaggcctcttgctatggacagatggagcggcccgaggtaccaatgcatactctgcacccctttatggtgaatgtgacctgggacgggaaagacctgagctttacggaggagggctaccaggtgcaccccaggctggtggttatagttctcaacaaagaccgagagtgggaaaaggtgggaaagtgggagaaccataccctttcactgaggcacgctgtctggccacgatataagtctttcagtgactgtgaacctgatgataatcacttgtcgattgtcaccctagaagaggctccattcgtaattgtagaagacatcgacccgctgacagaaacctgtgtgcgaaataccgtgccctgtcgcaaattcgtgaagatcaataattccacaaacgaggggatgaatgtgaaaaaatgctgtaagggcttttgcattgatatcctgaaaaagctgagccgaaccgtcaaattcacgtacgacctctaccttgtcacgaacggcaagcacggtaaaaaagtgaataatgtttggaacggcatgattggagaggtggtgtaccagcgcgccgtaatggctgttgggtcgcttactattaatgaggagagatctgaggtggtggactttagtgtgcctttcgtcgagaccggaatttcagtgatggttagccgcagcaatggaactgtgtctccctccgccttcttggagccatttagtgcgtccgtttgggtgatgatgtttgtcatgctgctgattgtgagtgccatagcggtgtttgtgtttgagtactttagcccagtggggtacaaccggaaccttgcaaagggtaaggcaccacatggcccaagcttcacgatcggaaaggcaatatggctcctgtggggtctggtctttaacaattccgtgcccgtgcagaacccaaaaggcaccactagcaagattatggtgtcagtttgggcatttttcgctgttatatttcttgcctcttacactgcaaaccttgccgcttttatgatccaggaagagtttgttgatcaagtgacagggttaagcgacaaaaaatttcagagaccccatgactacagtcctccatttcggttcggaacagttccgaatggaagcacagagaggaatattcgtaacaattacccctacatgcaccagtatatgacaaaattcaaccagaagggcgttgaggatgcgcttgtttctttaaaaacaggtaaacttgacgcttttatttacgatgccgctgtcctcaactacaaggcagggcgcgatgagggctgtaagttggtgacgattggaagcggatacatttttgccaccaccggatatgggatagccctccaaaagggaagcccatggaagagacagatcgatctggccctgcttcaatttgtgggtgacggtgaaatggaggaactggaaacgttgtggctcaccggcatctgtcacaacgagaagaacgaagtgatgtcatcccaacttgatatcgacaatatggcaggagtcttttatatgctcgctgccgctatggctctttccctgataacttttatttgggagcaccttttctactggaagctgcggttctgctttaccggcgtgtgtagcgatcgcccaggccttttattttcaattagtcgggggatctactcctgcatccacggggtgcacatcgaggagaaaaaaaaaagtccagactttaatctaaccggatctcaatcaaacatgctgaaacttctgcgctcagcgaaaaacatttctagcatgtctaatatgaacagcagtcggatggactcccccaagcgcgccgcagacttcatccaaaggggctctcttatcatggacatggtttccgataaagggaatctgatgtactctgataatcgtagtttccaaggtaaggagtctatattcggcgacaacatgaatgaactgcaaacgttcgtggctaaccgtcagaaggataaccttaacaactacgtgtttcaaggccaacatcccctgactctgaacgagtctaaccccaatactgtagaagtcgccgtatcgaccgaatctaaagcgaacagcaggcctaggcagttgtggaagaaaagtgttgattctataaggcaggactctctgagccagaatccggtcagccaacgcgacgaggcaacagccgagaatcgaacgcattctctcaaatcgccaagatatctgcctgaagaaatggcacattctgatatctcagagacaagcaatcgggccacgtgtcaccgagagcctgacaatagcaagaaccacaaaactaaagacaactttaagcggtctgttgcatctaaatacccaaaagattgctctgaggtcgagcgaacctacctgaaaaccaagagcagtagcccacgggacaaaatttatactattgacggtgaaaaggagcccggtttccacttggatcccccacagttcgtcgaaaacgtaaccctgcctgagaatgtggacttcccagacccctaccaggatccatccgaaaattttcggaagggcgactctaccttacccatgaataggaaccccctgcataatgaagagggacttagcaacaacgatcagtacaaactctatagcaaacattttacactcaaagacaaggggtctcctcattccgagaccagtgagagataccgacagaactcaacacactgccggtcctgtcttagcaatatgcccacctacagcgggcacttcacgatgcgctcaccgttcaaatgcgatgcctgtctgagaatggggaacctgtatgatattgatgaggatcagatgttacaggaaaccggtatgaccaatgcgtggcttctgggggatgccccccgcacgttgaccaatactcgctgccaccctcgacgatag

SEQ ID NO: 189369 - DNA, 4455 bp, synthetic construct
  misc_feature 1..4455: note = Description of Artificial Sequence: Synthetic coding sequence
  source 1..4455: mol_type = other DNA
atgaagccccgggccgagtgctgcagccccaagttctggctggtgctcgctgtgttggcggtttccggaagtcgggccaggtcccagaaaagtcctcccagtataggtatagccgtgattctggtcggcaccagcgatgaagtggccattaaggacgcccatgaaaaggatgattttcaccacctttcagtggtcccccgggtggaattagtggctatgaatgaaaccgacccaaagtctatcatcacccgaatttgcgatcttatgtcagaccgaaagatacagggcgtcgtgttcgccgacgatactgaccaggaggccatcgcccagattcttgactttatttctgcacagaccctgaccccaattctaggtatacacggaggaagtagcatgatcatggccgacaaagatgaaagcagcatgttcttccagttcggcccctctatcgagcagcaagcctcagtcatgctcaacatcatggaggagtacgactggtacatcttctcaattgtcacgacttatttccctggctaccaggactttgttaataaaattcggagcaccatcgaaaacagcttcgtaggctgggaactcgaggaagtcttgctcttggatatgagtttagatgacggagacagcaagatacaaaatcaactgaagaagctgcagagtccgatcatcttactttattgcaccaaagaagaggctacatacattttcgaggtcgccaactcggtggggctgaccggctatggctacacatggatcgtgccttcattggtggcaggggatacggacaccgtgcctgcagagtttcccacaggactgatcagtgtgtcctatgacgaatgggattacggtctcccggctagggtaagagacgggattgctattattactacagccgccagtgacatgttgagcgagcacagctttattcccgaacccaagtctagttgttacaatacccacgagaagcggatataccagtccaatatgctaaaccgctatctcattaatgtgacatttgagggccgcaacctttccttctccgaagacggctaccagatgcatcctaaactggtaattatcctgctgaacaaagagcggaagtgggaaagagtgggcaagtggaaggacaagagcctccaaatgaagtactacgtttggccgaggatgtgccctgaaacagaggagcaggaggacgaccacctgtcaatcgtgaccctggaggaggcacccttcgtcatcgtggaaagtgtggaccccctgtccggcacctgtatgcgaaacacagtaccttgtcagaagcggatcgtgacggaaaacaaaacagacgaagagcctggttacatcaagaaatgttgcaaaggtttttgtattgatatcctgaagaaaatttcaaaatctgtgaagttcacatacgatctttacctcgtgaccaatggaaagcatggtaagaaaatcaacgggacctggaacgggatgattggtgaagtggtgatgaaacgggcttatatggccgttggaagcctgaccatcaatgaagaacgatcagaggtggtggacttttccgtcccatttatcgaaactggtatctctgtgatggtcagccggagcaatggcaccgtgagtcccagcgctttcctggagcccttttccgcggacgtttgggtaatgatgtttgtcatgctgttaattgtgtcagccgttgcagtgttcgtgttcgagtatttttccccggttggctacaacagatgtctcgcagatggacgggaaccaggcggacccagcttcactatcggtaaggccatctggctgctttggggactggtcttcaataatagcgtacccgtgcagaatcctaaggggaccactagtaagatcatggtttcagtgtgggcattctttgctgtcatcttcctggcgtcttataccgccaatcttgcggcctttatgattcaggaggaatatgttgaccaggttagtggtctgagcgataagaaattccaacggccaaacgatttcagccctccgtttaggtttggcaccgtgcctaatgggtcaactgagcgaaacatccgcaataactatgcagagatgcacgcctacatgggtaaattcaatcagaggggggtggacgatgcactgctttccttgaaaaccgggaaactagatgcttttatctatgatgcggcagtacttaattatatggccggcagagacgagggttgcaagctcgtcaccatcggcagtgggaaggtgttcgccagtacgggatacggcattgctatccagaaggattcagggtggaagcggcaggttgatctggctattctgcaactgtttggcgatggagaaatggaagagttagaagcgctctggctcacggggatttgccacaatgaaaagaatgaggttatgtctagccagctggacatagacaacatggccggcgtgttttatatgctgggggctgcgatggcattatccctcatcactttcatctgcgagcacctcttctattggcagttcaggcactgcttcatgggagtttgctcgggcaagccaggcatggtgttctctatcagccggggtatatatagctgcattcacggggtagccattgaggaacggcagtccgtgatgaatagtcctactgcgacaatgaacaacacccattcaaacatcctacgacttctgaggactgccaagaacatggcaaatctgagcggcgtgaatggctcccctcaatcggcgctggactttatcaggcgcgagtcctcagtctatgacatctccgaacacagacgctcatttacccactcagactgtaaaagctacaacaaccccccatgcgaagaaaacctctttagcgactacatctctgaagtggaaagaacgttcgggaatctacaattaaaggatagcaacgtttaccaggaccactatcaccatcatcatcgtccccactcaattggttccgccagttccattgatggcctctacgactgcgataacccaccctttactacccaatctcgctctatcagcaaaaaacctctggacataggcctcccgtcgtctaagcacagccaattgtccgatctctacgggaaattttctttcaaaagtgatcgctactcaggccacgacgatctcatcagaagtgatgtgagcgacatctctacccacaccgtgacctatggcaatatagaagggaatgccgccaaaaggcggaagcagcaatacaaggactccctgaagaagaggcccgcttccgccaaaagcagaagggaattcgacgagatcgagctggcctatcgcaggcggcctcccagatccccagaccacaaaagatactttcgagataaagaggggctgcgcgacttctatctggatcagttcaggactaaggagaactctcctcattgggaacacgtggacctcacagatatctataaggagaggagcgatgacttcaagagggacagtgtgagtggcggcggcccctgtaccaaccgctcacacataaaacacgggactggtgacaagcatggggtagtttccggagtgcccgcaccctgggagaaaaatctgactaatgttgagtgggaggatcggagtgggggaaacttctgtcggtcctgtcccagtaaactccacaattactctacaacagtgaccgggcaaaacagtggaaggcaggcttgtattcgttgtgaggcttgcaagaaggctggtaacctgtacgatatcagcgaggataatagcctgcaggaactcgaccagcctgctgctccggtcgctgttacgtctaacgcaagcacaaccaagtatccacagagtcctactaattcgaaagcccagaagaaaaaccgcaataagttgcgaagacagcacagttacgataccttcgttgatcttcagaaggaagaggctgccctggccccacgatccgtgagtctgaaagacaaaggacgttttatggatgggtccccatacgcccacatgttcgagatgagcgcaggcgaaagtacatttgcaaacaataagtcctccgtgccaaccgcaggacaccatcaccataacaatcccgggggcggttatatgctgagtaaatctttgtatcctgatcgagtcacgcaaaacccttttatccctacctttggcgatgaccagtgcctgttgcacggcagcaagagctacttctttagacaacctactgtggctggagcctcaaaagccaggcctgattttcgggctctcgtcaccaataagccagtggtcagcgcattacatggcgccgtcccggcgcgcttccagaaagatatctgtattggaaatcagtccaatccttgcgtgccaaataacaagaaccctagggccttcaatggatcgtccaacgggcatgtatatgagaagctttcatcgatagagagtgacgtatag

SEQ ID NO: 189370 - DNA, 3702 bp, synthetic construct
  misc_feature 1..3702: note = Description of Artificial Sequence: Synthetic coding sequence
  source 1..3702: mol_type = other DNA
atgggcggcgccctgggccccgccctgctgctgaccagcctgttcggtgcgtgggcgggcctgggaccgggtcagggtgaacagggtatgaccgtggcagtcgtatttagtagtagcggccccccacaggcgcagtttcgggcgcgtctgacaccccagagctttctcgacctgcccctggaaatccagcccctgactgtcggcgttaacaccaccaatccatcctcactcttaacacaaatctgcggattgttaggggccgcccacgttcacggcatcgtttttgaggacaacgtggatactgaggctgtggcccagattcttgacttcatctcgagccaaacccatgttccaatactttctatctcgggcggatccgcagtcgtgctgacgcccaaggagccgggttccgctttcctacagctaggagtgtccttggaacagcagttacaggttttgtttaaagtcctggaagaatacgactggtctgcgttcgccgtaataacctccctgcaccctggacacgccctctttctggagggcgtccgagcggtggcggatgcgtctcacgtgtcttggcggctactggatgttgttacactagagttagggcctggcggacccagagcaagaacacagaggttactgaggcaactggatgccccagtgtttgttgcgtattgtagccgcgaggaggctgaagtgctgtttgcagaggctgctcaagcgggactcgttggacctggacacgtatggctggtccccaatctagctctcggaagcactgatgcccctcctgcaacattccctgtggggcttatctccgttgtgaccgagtcatggcgactctccttaaggcagaaagtcagggacggcgtggccatactggccctgggcgcgcattcgtactggagacaacacggcaccttacctgcccccgcaggagattgccgggtgcaccctggaccagtgtcaccagctagagaggcattctacagacacctcttaaatgttacttgggagggcagagacttcagcttctctcctggcggctatctcgtacagcccaccatggtggtgattgctcttaaccgccatagactctgggagatggtcggacggtgggaacatggcgtgctttatatgaaatatccggtttggccccgctatagcgcaagtctgcaaccagtggttgactcccgacacctaacggtggccactctggaagaacggccattcgttatcgtcgaatcaccagacccagggactggcgggtgtgtccctaacacggtgccttgtaggaggcagagcaatcacacattctcatcaggagatgtggcgccatacactaaactctgttgcaagggcttttgcattgatatcctgaaaaaactcgcaagagtagtgaagttttcctatgatttatatctggtaaccaatggaaagcatggaaagcgggtaagaggagtctggaacggcatgatcggagaggtctattacaaaagggccgatatggcaataggatccttgaccattaacgaagaaaggagcgagatcgttgacttttcagtgccctttgtggagacagggattagtgtgatggtggctagaagtaatggaacagtgtcgcccagcgcctttctggagccttactcccccgcagtgtgggtcatgatgttcgtcatgtgtctaaccgtggtcgcaataacagtgtttatgttcgaatatttcagtcccgtgtcctacaaccagaatctgacacgagggaaaaaaagtggaggacctgcctttaccatcggcaagtctgtgtggctgctgtgggctcttgtattcaacaactctgtgcccattgaaaacccccgagggacaacttccaagataatggttttggtctgggcatttttcgctgttatatttcttgcatcttacacggccaacttggccgccttcatgatccaggagcagtacatagataccgtgtccgggctgtcagataagaaattccaaaggccccaggatcagtatccccctttccgctttggcacagtgcctaacggcagcaccgagaggaacatacggagtaattaccgcgatatgcatacacacatggtgaaattcaaccagaggagcgttgaggatgccctgaccagcctgaaaatgggcaaactagacgccttcatctatgatgccgcagtcctgaactacatggctgggaaggacgaaggatgcaagctggtcaccattggatccggtaaggtgttcgcaaccactggctacggcattgccatgcaaaaggatagtcattggaaacgtgcaattgatctcgcactcctgcagttcctcggcgatggggaaactcagaaattagagaccgtatggctgtctggcatttgtcagaacgaaaaaaatgaggtgatgagtagtaagcttgatatcgataacatggccggagtcttttacatgctcctggtggctatgggcctggcccttcttgtgttcgcatgggaacatttggtgtattggaaattacgccactccgtacctaatagctcacagttggatttcctgcttgctttctcccgtgggatctactcctgtttttcaggagtgcaatctctggcaagtcctccacgtcaagctagccccgatctaacagcttcttctgctcaagccagtgtcctgaagatgcttcaagctgcaagagacatggttacaaccgctggagtgagctcttccttggatagagctacacggaccatcgagaattggggaggaggcaggagagcccctccacccagcccctgtcccacccctcggagtggtccctctccctgtctacctactccggaccctccaccagagcccagcccgaccggctgggggcctcccgatggaggcagggcagcactggtcaggagggcgccacagcctcctgggagacctcctactcctggcccaccgcttagcgacgtttcaagagtctcccgccgaccagcatgggaagcccggtggccagtacggactggccactgcgggagacacctgtctgcctccgagcggcctctgtctcccgcaagatgccactactctagcttccccagagctgaccgaagcggaaggccatttctgccgctgttccccgagctggaggatcttccgctgttagggccagaacagctagcccgaagagaagccttgcttcacgctgcctgggctagggggtcacgaccacgccatgctagcctgccaagtagcgtcgcagaggccttcgctcgcccttcgagcctccctgctgggtgtactggaccagcttgcgcacgaccagacgggcactccgcttgtagaagactggcacaggcacagtccatgtgcctgcccatctacagagaagcatgtcaggaaggcgagcaggccggggcacccgcatggcagcataggcagcacgtctgtctgcacgcccatgctcatctgccattctgctggggggcagtttgcccgcacctcccaccgtgtgcgagtcacggatcttggctgagcggagcttggggccccttaggccaccgaggaaggacattgggcctgggaaccgggtaccgcgactcagggggccttgacgaaatatctcgcgtggcacggggtacacagggtttccccggtccttgcacctggcgtcggatttcatcacttgagtcagaagtttag

SEQ ID NO: 189371 - DNA, 2724 bp, synthetic construct
  misc_feature 1..2724: note = Description of Artificial Sequence: Synthetic coding sequence
  source 1..2724: mol_type = other DNA
cggggccagggcggcgacacccggagcaagggcacccggcagcccgagccgcccggtgcctcgcgggaccctgcccgctcatgctgggaccctcctgtggatatgggcggagccctaggtccagccctccttctcacaagtctctttggcgcttgggccgggctgggccctgggcagggggagcagggcatgactgtcgcagttgttttctcaagttctggccccccccaggctcagtttcgagcccgcctcaccccacaaagcttcctggacttgcccttggaaatccagccactgacggtcggcgtgaacactacaaatccttctagcctcctcacccaaatctgcgggctccttggcgcggcccatgtgcacggaatcgtcttcgaggacaatgttgatacagaggcagtggcccaaatccttgacttcatctcaagccagacgcacgtcccaatactgtccatatctggcggatctgctgtggtgttaacccctaaggaacccggcagtgcttttcttcagctgggagtttccctggaacaacagctgcaggtattattcaaagtcctcgaggaatatgattggtctgcctttgctgtaattaccagcctgcatcccggtcacgcactttttctggagggggtgcgcgccgtcgccgatgcttcccacgtgtcctggaggctgctagacgtggtgacactcgagctgggcccagggggaccccgggcgcgcacccagcggctgcttcgccagctggacgctccggtgttcgtcgcatattgtagccgtgaagaggccgaagtgctctttgcggaggcggcgcaagcagggttggtaggccccggacacgtttggcttgtaccaaacctggcattgggctctacggacgctcccccagccacattccccgtggggctgattagcgttgttacagaaagctggagactgtcgctccgtcagaaggtgagggacggagtggctatccttgctttgggggcccattcttattggcgtcagcacggaacactccctgcacctgctggtgattgccgagtgcaccctggtccagtctctccagctcgtgaggctttttatcgccatctgcttaatgtgacctgggaaggacgggacttttccttttcccctggaggctatctcgtccagcccaccatggtggttattgcgctgaacagacataggttgtgggagatggtcggaaggtgggaacatggcgttctgtacatgaagtacccagtatggccccgttacagcgctagccttcagcctgtcgtggatagcagacacctcaccgtagctacgttagaagaacgtccatttgtgatagtggagtcccccgatccaggaacaggcgggtgtgtccccaatacggtcccctgtcggcgccagtctaaccacacattttcatcaggagacgtggccccatatactaaactgtgttgcaaagggttctgcattgacatactaaagaagctggccagggtcgtcaagttcagctacgacctgtacctggttacaaacggtaaacacggcaagagagtaagaggcgtctggaatggaatgatcggtgaggtgtactataagagagccgacatggctattgggtcattaaccattaacgaagagagaagcgaaattgtggacttctccgtgcccttcgtggaaaccggaatttccgttatggttgcccgctcaaacggtacggtgtctccaagcgctttcctggagccctacagtccagccgtgtgggtcatgatgttcgtcatgtgtctcaccgttgttgcaataaccgtcttcatgttcgagtatttctctcctgtgtcatataatcagaacttaactagggggaagaagtcgggcgggcctgcttttaccataggcaaatctgtctggctgctttgggccttggtattcaacaactctgtacccatcgagaatcctcgcggaaccacgtcaaagattatggttctggtatgggcctttttcgcagtgatttttctggcctcctataccgcaaacctggcagctttcatgattcaggagcaatacatcgataccgtgtccggcttaagcgacaagaagttccagaggccacaggaccaatacccccctttccgctttggtacagtgcccaacggcagtacagagcggaacatcaggagcaattatagagatatgcacacccacatggtgaaattcaaccagaggagtgtggaggacgctctcaccagtctcaaaatgggaaaactcgacgccttcatttacgacgccgccgtactgaactacatggccggaaaagatgaggggtgtaagctggtaaccattggttctggtaaagtcttcgccactaccggctatgggatcgccatgcagaaggactcccactggaagagggccatagaccttgcattgctgcagtttttgggtgacggggagacgcaaaagctagaaaccgtgtggctgtcaggaatctgtcaaaatgagaagaacgaggtgatgagcagtaaactggacatcgataatatggccggagtgttctatatgttgttggtagcgatgggtcttgcactgctggtcttcgcatgggaacatctggtatactggaagcttaggcacagtgtgcctaatagttcccagctagattttctgttagccttcagtagggtgggcgctcatccgagccctcacagacctaagttttag

SEQ ID NO: 189372 - DNA, 4011 bp, synthetic construct
  misc_feature 1..4011: note = Description of Artificial Sequence: Synthetic coding sequence
  source 1..4011: mol_type = other DNA
atgcggggcgccggcggcccccggggcccccggggccccgccaagatgttactattgctcgcactggcctgcgctagcccttttccagaagaggccccaggacccggcggggctggcggacccggggggggccttggcggtgccagacccttaaacgtcgcactcgtgtttagcggacctgcatatgcggccgaggctgcgcgacttggtcctgctgtggccgccgccgttcgcagccctggcttggacgtgcgccccgtggcacttgtattaaacggttctgacccacgctcactggtgctccagctgtgcgacctcctgagcggtctaagagtacatggtgtggtattcgaggacgattcaagggcacctgccgtggcccctatacttgattttctgagcgctcagacaagcctacctatagttgcggttcacggcggagctgccctcgttctgacaccaaaggaaaaagggtcaacatttttgcagttaggatcatcaactgaacagcagctgcaggttatatttgaagtgctggaggagtacgactggaccagcttcgtggctgtgaccacacgtgctccaggccaccgggcatttttgtcttacatcgaggtgttgaccgacggatccttagtgggctgggaacataggggggcccttacactcgaccctggcgctggcgaagcagtcctcagcgctcagttgaggtccgtttccgcccagatcagactgctgttctgtgccagggaggaggccgagcctgtatttagagccgcagaggaggccggtcttaccggcagcggctacgtgtggtttatggttggtccccagctagctggaggcggcggatctggagcgccaggggaacccccactgcttccagggggagccccactgccagctggacttttcgcggtcagatctgctggatggcgcgacgacctggcgagaagagtagccgccggagttgccgtagttgctcgcggtgcccaagccctgttgcgagactacggttttctccctgaactgggccacgattgcagggctcagaatcgaactcatcgcggcgaatctctccaccgatattttatgaacatcacctgggacaatcgggactacagctttaacgaggatgggttcctggtgaatccatctctcgtcgttatctcgctgacccgcgaccgaacctgggaagttgtgggatcatgggagcagcaaactctgagactgaaatatcccctgtggtcaaggtatggacggttcctccagcctgtggacgacacacaacacctgaccgttgccaccctggaagagaggccatttgtgatagttgagcccgctgatcctatctcagggacgtgcattagggatagtgtgccctgtcgatcccaactcaatcgaacacattctcctcccccagatgcaccaagaccagagaagaggtgttgtaaaggattttgcatcgatattctgaagcggctggcccacaccattggcttctcatacgacttatatttggttacaaacgggaaacatggaaaaaagatcgatggagtttggaacggaatgataggggaagtcttttaccaaagggctgatatggctatcggcagtttaactatcaacgaggagcggtcggaaatcgtcgatttttcagtgccttttgtcgagactggcattagcgtgatggtggcaaggtctaatgggacagtgtccccttccgcttttctagagccatacagtccagccgtttgggttatgatgtttgtaatgtgccttacagtcgtggcagtgacagtgttcatttttgagtacctttcacccgttgggtacaacagatctctcgccaccggaaaaagacctggcggctctacattcacaatcggaaaatcaatttggttgctttgggcccttgtattcaataatagcgtgcccgttgaaaacccccgaggtaccacatctaagatcatggtcctggtctgggcattcttcgcagtcatcttccttgcgtcatatactgcgaacctagctgcattcatgattcaagaagagtatgtggacactgttagcggcctgagtgatagaaaatttcagcgaccgcaggaacagtatccgcccttgaagttcggtacggtgccaaacggctccacagaaaagaatatacgtagcaactatccagacatgcattcgtacatggtgcgctacaatcagccgagggtggaggaggctttaacccagttgaaagccggaaagcttgacgctttcatctatgacgcggctgttctcaactatatggccagaaaagacgagggttgcaaactcgttactataggctctgggaaagtattcgctacaacaggttacgggattgcgctccataaaggatctcgctggaagagacctatcgacctggccctgctccagtttctgggtgatgacgagattgagatgctggagcgcctgtggctgagcgggatctgccacaacgataagattgaagtgatgtcctcaaagttggacatcgataatatggccggggtattctacatgctgctcgttgccatggggctttcactgctggtctttgcctgggagcatctcgtctattggagacttcgccactgtctgggaccaacccacagaatggattttctgctggccttttcaaggggaatgtatagttgctgttcagcggaggccgcccccccaccggccaaacccccccccccacctcaacccttgccatcaccagcttacccagctcccaggcccgcccccgggccggctccatttgtgccaagagaacgcgcaagcgtcgacaggtggcgacgtaccaagggagccgggccgccagggggggccgggctggccgacgggtttcatagatactacggcccaatcgagccacaaggactggggctgggcctgggggaggcccgggctgcccctaggggtgccgctgggcgtcctctatcaccgcccgccgcccagccgcctcagaaaccccccccttcttactttgcaatcgttcgggataaagaaccagcagaaccccccgccggcgctttccctgggttcccaagcccgcctgccccgcctgccgcggccgcgactgccgttggacctccactgtgcagactcgcctttgaggacgagtcaccccccgcccctgcaagatggcctaggagcgatcctgaatctcaacctctgttgggcccaggcgctggcggtgctggtggaacggggggagctgggggcggagcccctgctgcaccacctccatgtagggcagctccaccgccatgtccgtacctggatctagagccgagtccgtctgatagcgaagactcagaaagccttggcggagcttcactcggcggactggagccatggtggtttgcggacttcccgtacccgtatgccgagcgcctgggcccacctcctggtcgatactggagcgtggacaagctgggtggttggagggccggatcctgggattatttacctccgcgctcaggccccgccgcatggcactgtcgccactgcgcctcgttagagctgcttccacccccaaggcatctctcttgcagtcacgacgggcttgacggcggctggtgggcacctcctccaccgccatgggctgccgggcctttgccgcgtaggcgggccagatgtgggtgtccccggtcccaccctcacagacctagagcctcacataggacccccgctgccgctgccccacaccaccacagacatagaagagccgcggggggctgggacttaccacctccagcccctaccagtagatccttggaggatctctcttcgtgcccccgagcggctccagcacggcgccttactgggcccagtagacacgctcggaggtgtcctcacgccgcccactggggcccccccttgccaacagccagccaccgccgtcatagggggggcgatctgggcaccagaagaggcagcgcccactttagctctttggagtctgaggtttag

SEQ ID NO: 189373 - DNA, 1116 bp, synthetic construct
  misc_feature 1..1116: note = Description of Artificial Sequence: Synthetic coding sequence
  source 1..1116: mol_type = other DNA
atgagccacgagaagagcttcctggtgagcggcgacaactacccccctcctaatcccggctatcccggtggacctcaaccccccatgcccccctatgctcagcctccatacccaggcgccccttacccacaacctccgtttcagccatctccctacggccagcccggttatccacacgggcccagcccttacccccagggcggttatccgcaaggcccgtatccacaaggcggctacccacagggcccctaccctcaggaaggatacccacagggcccctatccccagggtgggtacccacagggaccttatcctcaatccccttttccacccaacccttacggacagccccaagtctttcccggccaggacccagacagtccacagcacggaaactaccaggaagagggcccaccttcttactatgacaatcaggattttcctgctaccaactgggatgataaatcaatccgtcaggcttttatccggaaggtatttctagtgctcacactgcagctgtctgtcacactaagcaccgtgagcgtctttactttcgtggctgaagttaaaggcttcgtaagggagaacgtgtggacgtattacgtctcctatgccgtttttttcatctctttgatcgtgctttcttgttgtggtgacttccgaagaaaacacccctggaacctggtggcactgagtgtgcttactgctagcctgtcatacatggtcggaatgattgcaagtttctacaacaccgaagctgtgattatggcggtggggattaccacagccgtatgtttcacagtcgtcatcttttccatgcaaaccaggtacgacttcacctcctgcatgggcgtgctgctagtatccatggtcgtgctgtttatcttcgccatcctttgcatcttcattagaaacaggattctggagattgtatatgcctcactcggcgccttgctgttcacctgttttcttgcggtggacacacaactgctattgggtaataagcagctctcactgtctccagaggaatatgtctttgccgccctgaatctgtacacggatataattaacatattcctctacatcctcacaatcatcgggcgagctaaggagtag

SEQ ID NO: 189374 - DNA, 1116 bp, synthetic construct
  misc_feature 1..1116: note = Description of Artificial Sequence: Synthetic coding sequence
  source 1..1116: mol_type = other DNA
atgagccacgagaagagcttcctggtgagcggcgacaactacccccctccaaaccctggctacccagggggcccccagccgcctatgcccccttacgcccaacccccgtatcctggagcaccttatccgcagcctccgtttcaaccctcaccctatggacagccgggataccctcacggacccagcccttatccgcagggcggctacccccaaggaccgtacccacagggcggatacccacagggaccttatccacaggaaggctaccctcaggggccttacccccagggtggataccctcaaggtccttaccctcaatctcccttcccgccaaacccctatggccagccccaggtatttccaggtcaagatcccgactcaccccaacatggcaattaccaggaagagggccccccttcctactacgacaaccaagacttccccgccaccaactgggacgacaaaagcataaggcaggccttcattagaaaagtgtttcttgtactcacattacagctgtcagtaactctatccacagtttctgtgtttacattcgtggcggaggtgaaaggtttcgtccgggaaaatgtttggacctactacgtctcgtatgccgtattctttatcagcttgatcgtgctcagttgctgtggggacttcaggagaaaacacccctggaatttggtggccctttcggtgcttacagcatccctgtcatatatggttggcatgatagcctctttttataatacagaagccgtcatcatggcagtgggaatcaccaccgctgtttgcttcaccgtggtcatatttagcatgcaaactcggtatgacttcacctcctgcatgggcgtgctgctggtcagtatggtcgtcctctttattttcgccattttatgcatctttattcgtaatcgcattctcgagatcgtctatgcaagcctcggtgcattactgtttacatgctttttagccgtagacacacagctcttgctgggtaacaaacagctctctctgtcaccagaggaatacgttttcgcagctcttaatctgtacaccgacattataaacatatttctgtatattctgacgatcatcggaagggcgaaggagtag

SEQ ID NO: 189375 - DNA, 825 bp, synthetic construct
  misc_feature 1..825: note = Description of Artificial Sequence: Synthetic coding sequence
  source 1..825: mol_type = other DNA
atgagccacgagaagagcttcctggtgagcggcgacaactacccccctccaaatcccggatatcccgggggaccccagcccccaatgcctccttatgcccagcctccttatccaggagctccctaccctcagcccccatttcagccaagcccttatggccagccgggctaccctcacgggccttctccctatcctcagggcggctacccacaaggaccctacccgcaggggggctatccacaggggccgtatcctcaggaaggctacccacagggaccatacccgcaaggtgggtacccacaggggccttatccacagtcaccgtttcccccaaatccgtacggacagccacaggttttcccgggccaggatcctgattctccacagcatggcaattatcaggaggaaggcccaccgagttattacgataatcaagatttcccagcgactaattgggatgataaatccatcagacaggcattcataaggaaggtcttcctggtgctgacgctccagctgtccgttacattgtctacagtgtcagtcttcacctttgtcgctgaggtgaaaggatttgtacgggaaaacgtctggacttactacgtcagctacgctgtgttctttatttccctcatcgtgctatcttgctgcggtgatttccgccgaaaacacccctggaatctcgtagccctgtctgtcctaacggccagcctgtcctacatggtaggtatgatcgccagcttctataacacagaggcggtaattatggctgtgggtattacgacagccgtatgtttcactgtggtcatattctccatgcaatag

SEQ ID NO: 189376 - DNA, 306 bp, synthetic construct
  misc_feature 1..306: note = Description of Artificial Sequence: Synthetic coding sequence
  source 1..306: mol_type = other DNA
atgagccacgagaagagcttcctggtgagcggcgacaactacccccccccaaaccccggctatcccggcgggccgcagcctcctatgcccccctacgcgcagcccccctatccgggcgccccgtatccccagcctccctttcagccctctccatacggacagccaggatatcctcatggtcctagtccttatccgcagggagggtacccccagggtccctacccacaaggggggtaccctcaagggccctatccccaggaaggatatccgcagggcccatatcctcaagggggttatcctcaatag

SEQ ID NO: 189377 - DNA, 1059 bp, synthetic construct
  misc_feature 1..1059: note = Description of Artificial Sequence: Synthetic coding sequence
  source 1..1059: mol_type = other DNA
atgagccacgagaagagcttcctggtgagcggcgacaactacccccctccatacccgggagccccatatccacagcctccctttcaaccctccccctatggccaacctggatatcctcatgggccaagcccgtacccccagggtggatacccccaggggccttatcctcaggggggatacccccaagggccttatcctcaagagggctaccctcaagggccatacccacaaggcggctatcctcaaggcccataccctcagtcaccttttccacccaatccctatggccagccacaggtgtttcctggccaggatcctgattccccgcagcacggcaactaccaagaggagggtccaccatcctactatgataaccaggactttcccgcgacaaactgggatgacaagtccatccggcaggcctttatcaggaaggtgttcctcgtgctcaccctacagctctccgtaacactgtctacagtcagtgttttcacattcgtggccgaggtgaaagggttcgtgagggagaacgtgtggacttattatgtctcctatgctgtgttttttataagcctgatcgtgctttcttgctgtggcgactttagacggaaacacccttggaatctggtggctctgagcgtgctgaccgcctccctgagctatatggtcggtatgattgcatcattttacaacacagaggccgtgattatggcggtcggcatcactacggccgtgtgtttcaccgtggttattttcagcatgcaaaccagatacgactttacatcatgtatgggagtcctcttggtatccatggttgtcttgtttatcttcgcgatcctgtgcatcttcatacggaatcggatccttgagatcgtgtacgcctcactgggagcattgctgtttacctgcttcttggccgtggatacacagttgctattaggcaacaagcaactgtccctatcaccggaagaatacgtgttcgccgccctgaacctctatacagatattatcaatatttttctctatatcctcacaataatcggacgtgcaaaagaatag

SEQ ID NO: 189378 - DNA, 3348 bp, synthetic construct
  misc_feature 1..3348: note = Description of Artificial Sequence: Synthetic coding sequence
  source 1..3348: mol_type = other DNA
atgcggcggctgagcctgtggtggctgctgagccgggtgtgcctgttgcttcctccaccgtgcgccctggtgctggctggggtccccagctcgtcctctcatccacagccttgccagattctgaaacggattggacacgcagtacgggtgggtgctgtacacctgcaaccttggactacggcgcccagagccgcgtcgcgtgcccccgatgatagtcgagctggcgcccagcgggatgagcctgagccggggaccagacgaagccccgctccctcacccggagcccgttggctgggatccacacttcatgggcgcggtcctcccggctctcgtaagcccggggaaggtgcacgcgccgaagccctgtggccaagagatgctttgttattcgcagttgataatctgaacagggtcgagggtttacttccatacaacttgagtcttgaagtcgtaatggcgatcgaagccggcctgggtgacctgccccttctcccattcagcagcccttcatcaccttggagctctgatccattttcattcctgcaaagcgtctgccacaccgttgtagtacagggagttagtgcactgctagcatttccgcaatcccaaggggagatgatggagctggacttggttagtctggttctccatatcccagtgataagcatagtacgccatgagtttcccagggagtcccagaaccccctccacctgcagctgtctctagagaatagcttgtcttcggacgcggacgtgacagtctctatactgacgatgaataattggtacaactttagtctgcttctgtgccaggaagattggaacataactgattttctcctattgactcaaaataatagcaagtttcatctgggatccattataaatatcactgcaaatttgccatccacacaggatttactcagtttccttcagattcaactggaaagcattaaaaactcaaccccgactgtcgtgatgtttgggtgtgacatggagtcgattaggaggatcttcgagattaccacacagttcggcgtgatgcctccagaattgcgctgggtgctgggcgactcacagaacgtggaagaactccggactgaggggctgccgctgggtctcatcgctcacgggaagactacacaatctgtgttcgagcattacgtccaagatgcaatggagctcgtcgccagggcagtcgcaaccgcaacaatgatccaacccgaacttgcactcattccttcgactatgaattgcatggaagtggagacaaccaacctaacaagcgggcagtacttaagccgattccttgccaataccacctttagagggctttctgggtcaattagagtaaaggggagtactattgtgagtagcgagaataacttctttatttggaatctacagcacgacccaatgggaaaaccgatgtggactagattggggtcgtggcagggcgggaagatcgtcatggactacggaatctggccggagcaggcccagcgtcataagacgcactttcagcacccttcaaagctgcatctcagagtggtcaccctgattgagcatcccttcgtgttcacccgggaagtggacgacgaggggctctgtccagccgggcagctctgccttgacccaatgacaaacgactcttccaccctcgacagcttgttttccagtttacacagctccaacgatactgttccgattaagtttaagaaatgctgctatggctattgtattgatctgctcgaaaagatcgcagaggacatgaactttgatttcgacctttacattgtgggggacgggaagtacggagcctggaaaaacgggcactggactggcctggtgggggatctgctcagagggactgcccatatggccgtgacttcattttcaattaatactgctcgcagccaggttatcgacttcaccagtcccttcttctcgacatctctcggtatcctggtacgcactagagatacagcagcacctatcggtgcattcatgtggccccttcactggaccatgtggctaggtatctttgtggcgctccatattaccgctgtgttcctgacgctttacgagtggaaatctccatttggactgacccccaaagggcggaataggtccaaagtcttctctttcagtagcgctctcaatatttgttacgccctcctcttcggtcgcacagttgccatcaaaccccctaagtgctggaccggtaggttcctgatgaacctttgggccattttctgcatgttttgcctctcaacctacaccgccaacttggccgctgtgatggtcggagagaagatatatgaagaactgagtggaattcacgaccccaagctgcaccacccctcacaggggttccgtttcggtactgtgcgggaatcaagtgccgaagactatgtgagacagtccttcccggagatgcatgagtacatgcgacgctacaatgttcctgctaccccggacggcgtggagtatcttaagaatgatccagagaagcttgacgcttttatcatggataaagccctgttggattatgaggtctccatcgacgccgactgtaagctcctgacagtgggaaaaccatttgctattgagggctatggaatcggcctgcccccgaactcccccctgaccgcaaacatttctgaattaattagtcaatacaaatctcatggcttcatggatatgctacacgataaatggtatcgggtggtcccttgtggtaagaggtcgttcgctgtcacggagacactgcaaatgggcatcaaacacttctcaggcctgttcgtgttgctgtgcataggcttcggactctctattctcacaacgatcggagagcatatcgtctaccgcctgctgctccctcgcattaagaataaatcaaagctccagtattggctgcacaccagtcagcgtctgcaccgtgccataaacaccagtttcatagaggaaaaacagcaacactttaaaacgaaacgggttgagaagcggagcaatgtggggccaaggcagctgaccgtgtggaacacctccaatctgtcacacgacaacaggaggaagtatatcttcagcgatgaggagggacaaaatcaactcggaatccggatccatcaggacatacctctgcctccccgcagacgggaactcccagctctcagaactaccaatggcaaagctgattcactgaacgtgtctcgcaacagcgtaatgcaggaactgagtgaactggagaaacagatccaagtgatcaggcaggaactgcagcttgctgtttcccgtaaaacagaactggaggagtatcagagaacctcacgtacatgcgaatcatag

SEQ ID NO: 189379 - DNA, 3585 bp, synthetic construct
  misc_feature 1..3585: note = Description of Artificial Sequence: Synthetic coding sequence
  source 1..3585: mol_type = other DNA
atggtgggcctgctgctgttcttcttccccgccatcttcctggaggtttcacttctgcctcgcagtcctggccgaaaagtgctgctggctggagcgtctagccaacgctcagtagcgaggatggacggcgacgtgattatcggcgcgctcttctcggtccatcatcaaccacctgccgaaaaagttccagaacggaagtgtggggaaatacgcgaacagtacgggatacagagggtcgaggccatgtttcatacactcgacaaaattaatgcagacccagtgctgcttcctaacatcacacttggaagtgaaatcagggatagctgctggcatagttccgtggcccttgaacagagtattgaattcattagggattcacttatctccattcgcgatgagaaggatggtataaaccgctgtctacccgacggacaatctctcccacctggacgcaccaagaaacccattgccggagttatcggcccaggcagtagttctgtcgccattcaggtccagaatctgctccaactctttgacatccctcagatcgcctacagtgctaccagcatagacctgtccgacaaaacactgtacaagtattttctccgggtggtccctagcgataccctgcaggccagagctatgctggacatcgtcaaacgctacaactggacctatgtgtccgccgtccacactgagggcaattatggcgaatctggcatggacgcttttaaggaactcgctgcgcaggagggcttatgcatcgctcactccgataagatatattccaatgctggcgaaaagtcctttgaccgcctgctgcgtaaattgagggaaagactcccaaaggcccgtgtggtggtctgcttttgtgaaggtatgacagtgaggggcttgctctctgcaatgcgcaggctgggtgtagtcggagaattcagcttgatcggctcagatggttgggctgatcgggatgaggtaatagaaggatacgaggtggaagccaacggcgggatcactataaaactacagagtcccgaggttagaagcttcgatgactattttctgaagctgcggctcgacaccaatacacgcaatccgtggtttccagagttctggcagcacaggtttcaatgtaggcttcctggccacctccttgagaatccgaactttaagagaatttgcaccggaaatgagagcctcgaggaaaactacgtgcaagatagtaagatgggttttgtcataaacgccatctacgcaatggcccacggcttgcagaacatgcaccatgccttgtgccctggccatgtcgggctgtgcgatgctatgaagcctatcgacggatctaaactcctggatttcctgatcaagtcctctttcattggagtgagcggggaagaggtgtggttcgatgagaagggcgatgcgccaggacggtatgatatcatgaacctgcagtataccgaagctaatagatatgattacgtccatgtgggaacatggcacgagggcgtactaaacattgatgattacaaaattcagatgaataaatcaggcgtggtccgttcagtatgcagcgaaccttgcctgaaaggacagatcaaggtgatcaggaaaggagaagtcagttgctgctggatctgtacagcatgcaaggaaaacgagtatgtgcaagacgagttcacttgcaaggcgtgtgacctggggtggtggcccaatgccgatctcactgggtgcgagcctattccagttcgctacctggaatggtccaacatcgagtccataatcgccatagccttcagctgcctcggcatactcgtgaccctttttgtaacactgattttcgtgctctatagggacacgccagtggtgaagtcctcctccagagagctgtgttacattatactggctggcatattcctaggatatgtttgcccattcacactcatcgccaagccaactaccacctcttgttacctccagcgacttctcgttggcctgtcatcagcgatgtgttattctgctttagtgaccaagacaaacagaatcgccagaattctcgcgggaagtaagaaaaaaatttgtactcgcaaaccccgatttatgagcgcttgggctcaggtcattatcgcttctatcttgatcagcgtgcaactgaccttggttgtgacactgattatcatggaaccccccatgcccattctgagttatccctcgataaaagaggtgtacctgatttgcaatacctccaatcttggcgttgtcgctcctctggggtataatgggctactcatcatgtcctgcacttactacgcatttaaaacccggaacgtgcccgctaattttaacgaggctaaatacatcgccttcaccatgtacaccacctgcattatttggcttgccttcgtcccgatttatttcgggtccaactacaagatcatcaccacgtgcttcgcggtcagccttagcgtcaccgtagcattgggctgcatgttcacccccaaaatgtatattataatagctaaaccagaaagaaatgtccggtccgcctttaccacttctgacgtggtaaggatgcacgttggcgatggtaagctgccgtgcaggagcaacacttttttgaacatatttcgccggaagaaggcaggcgcaggaaacgcgaactcaaacggaaagagtgtttcctggagcgagcccggtggaggacaggtgcccaagggacagcatatgtggcacagactcagcgtccacgtgaagacaaacgagactgcatgcaatcagacagccgtgattaagccacttacgaaaagctatcagggaagtggaaaatcactgacattcagcgatacttcgacaaagacattatacaacgtggaggaggaagaagatgcacagcctatcaggttttcccccccgggaagtcctagtatggtcgttcatcggagagtccccagcgccgcaaccaccccgcctcttccgtcccatttgaccgcggaggaaaccccactgttccttgctgaacccgccttgcctaaggggcttcccccaccgctgcagcagcaacagcagcctccgccccagcagaaatccttaatggaccagctgcagggcgtggtgtctaacttctctacagcaattcccgacttccatgctgttttggccggacccggtgggccagggaatggactgcggagcctctaccctcccccaccacctcctcagcacctgcagatgctcccgctgcagctgtcaacatttggcgaagaactggtttccccccccgctgacgatgacgacgacagtgaaagatttaagctgctccaggaatatgtgtatgagcacgagagagagggaaatacggaggaagacgagctcgaagaggaggaggaggatctccaggccgcaagcaagctcactcccgatgattcacccgccttaacacctccatctcctttccgcgacagcgttgcctcagggagctccgtgccctcttcaccggtgtcagagtctgtcctatgtacaccgcctaatgtctcttacgcctcagttattctcagagactataaacaatccagctccactctttag

SEQ ID NO: 189380 - DNA, 3585 bp, synthetic construct
  misc_feature 1..3585: note = Description of Artificial Sequence: Synthetic coding sequence
  source 1..3585: mol_type = other DNA
atggtgggcctgctgctgttcttcttccccgccatcttcctggaggtcagcctgctgcccagatctccaggaaggaaggttctgctggcaggcgcatcgagccaacgaagcgtggctcgaatggacggagacgttatcattggcgctttgttctcagtgcaccatcagccccccgccgaaaaagtgcccgaacgcaagtgcggggagatacgcgaacaatatgggatccagcgggttgaggcaatgtttcataccctggacaagatcaatgccgatccagttctgctgccgaacatcacgctgggatcagaaatacgggacagttgctggcatagctccgtcgccttggagcagtcgatcgagtttatcagggactcgctgattagtataagggatgagaaagacggcatcaatagatgcttgccggacggacagagcctgccccctgggcgcaccaagaaacctattgctggcgtcatcggcccgggctccagctctgtggccattcaggttcagaatctactccaactgttcgacatcccccagatcgcgtactcagctacatcaatagacctctctgataagactttgtacaaatacttccttcgggtggtaccaagcgacacactgcaagccagggccatgttggacatcgtgaaacgatataattggacctacgtcagtgctgtgcatacagaggggaattacggggagtccggcatggacgcatttaaagaactggctgctcaggagggcttatgtatcgcacattctgacaagatttactctaatgcaggcgaaaagtccttcgaccgattgctgcgtaagctaagagagagactgccgaaagccagggtggtggtgtgcttttgcgagggtatgactgtgagaggactgttaagcgctatgcggcggctgggtgtggtcggggagttctccctaataggatccgacggatgggcagatcgcgacgaagtgattgaggggtatgaagtcgaggcaaacggagggattaccattaagctgcagtcgccggaggtcagaagtttcgacgattatttcttgaagttgcggttagacaccaacactagaaacccatggtttcccgagttttggcagcatcgctttcagtgcagacttcccggtcacctgcttgaaaacccaaatttcaagaggatctgtaccgggaacgagtctctcgaggagaactacgtgcaggactcgaaaatgggctttgtgatcaatgccatctacgccatggcacacggcctacaaaatatgcaccacgctctctgccctggccacgtgggactctgcgatgcaatgaaacccatcgatggaagcaagctgttggattttcttattaagtcttccttcattggcgtctctggggaggaggtgtggtttgatgagaaaggcgatgcccccggaaggtacgatatcatgaatttgcaatacacagaagctaatcgctacgactacgtgcacgtgggaacttggcacgagggggtgttgaatatcgatgattataagatacaaatgaacaagagtggggtggtccgctctgtgtgtagcgaaccgtgcctgaagggtcagatcaaggtcatcagaaaaggagaggttagctgttgttggatttgtacggcatgtaaagaaaacgaatacgtacaggacgagttcacttgtaaagcctgtgacctcggctggtggccgaacgctgacctcactggctgcgagcccatcccagtccgctacctcgagtggtcgaacattgagtccattatcgccatcgccttctcctgtttaggcatcttggtgactcttttcgttacgttgatttttgtcttgtatcgagatacacccgtggtgaagagttcgagccgcgagctctgttacataattctggctggaatcttcctgggttatgtctgtccatttactttgatcgctaagccgactactacttcgtgctacctacagaggctgttggtcgggctttcatccgctatgtgctactccgccctggtaacaaaaacaaataggattgcccgcattttggctggcagcaagaaaaagatatgtacacggaaacctcgttttatgagcgcctgggcacaggttatcattgcatctatcctgatctcggttcagcttacactggtggtgaccttgattatcatggaacctcccatgcctatcctgagttaccctagcatcaaggaggtgtacttgatctgtaacacgtccaacctcggagttgtggcccctctgggatataatgggctgctgatcatgtcctgcacatattacgcatttaaaactcggaatgtgccagcaaactttaatgaggcaaagtacatagcgttcaccatgtacacaacttgtattatttggttagcttttgtcccaatctactttggctccaattataagattatcacgacctgttttgctgtgagcctgtcagttaccgttgccttgggttgtatgtttacgcctaagatgtacattatcatcgccaaaccagagcgaaatgtaaggtctgcattcaccacctccgatgtcgtgcggatgcacgtcggggacggaaagctgccatgtagaagcaacacatttctgaacatctttcgccgcaagaaagccggcgcagggaacgcaaattccaatgggaaatcagtgagctggagcgaacccggggggggccaggtgcccaagggccagcacatgtggcaccgtttgtcggtccacgtaaaaactaatgaaacggcgtgcaatcagaccgccgtgatcaagcctctcaccaagtcgtaccagggtagtggaaagtctctcacattcagtgacacctctactaaaacattatataatgtggaagaagaggaagatgctcagccgattcggttttctcctccaggttcaccctcaatggtggtgcatcggagggtgccatcggccgccactactccacccctgccctcacacctaaccgcagaagaaacacccctctttctggctgaaccagcactcccaaaggggcttccccctcccctgcagcaacagcaacagccgcccccccaacagaagagtctgatggaccagcttcaaggcgtcgtgtccaacttttccacggctatccctgacttccacgctgtgctcgccggcccgggggggccagggaacgggctgcggtctctctatccgccacctcccccaccccagcacctccaaatgctgcctctccagctttcaactttcggcgaggagttggtttctccaccggccgacgatgatgatgatagcgaacgattcaagctgctgcaggagtatgtgtatgagcacgagagagagggtaacaccgaagaggacgagcttgaagaggaagaggaagacttgcaggcggcctccaaactcacgcctgatgactcacctgcactgacaccaccctccccattccgggactctgtcgcaagtggctcaagcgtgccctcctcaccagtgagcgagagtgtactgtgtacgccaccgaatgtgtcatacgcttccgtgatacttcgagattacaagcaatcctccagcacattgtag

SEQ ID NO: 189381 - DNA, 2721 bp, synthetic construct
  misc_feature 1..2721: note = Description of Artificial Sequence: Synthetic coding sequence
  source 1..2721: mol_type = other DNA
atggtgggcctgctgctgttcttcttccccgccatcttcctggaggtgagcctcctgccccgcagccccgggcgtaaagttcttctggctggtgcctcgagccagcgatcagtggcccgaatggatggggacgttatcatcggcgccctgttttccgtccatcaccagccccccgctgaaaaggttccagagcgcaagtgtggggaaatccgtgagcaatacggtattcaaagagtcgaagcaatgtttcacaccctggataaaatcaacgccgacccggtgttactccccaacatcacactcggctcagaaataagggattcctgctggcacagttccgttgctttggagcagagcattgaatttatcagggacagtctgatttctattagagatgaaaaggatgggatcaatagatgcctgcctgatggacagtccctgcccccaggacgcacaaaaaagcccatcgcaggagtgatagggcccggttcgagcagtgtggcaatccaagtccagaacctgctgcagttatttgatataccccaaatcgcatactccgcaacttccattgatctgtctgataagactctgtacaagtactttttgcgcgtcgttccgagcgacaccctgcaagcgcgagccatgctagacatcgtgaagcggtataattggacttacgtcagtgccgtgcacacagagggtaattacggcgagtctgggatggatgcctttaaggaactcgcagcccaggaaggtctgtgtatagcccactctgataagatctatagtaatgctggagaaaaatcattcgaccgccttctaagaaagcttcgcgaaaggctgcctaaggccagggtggtggtgtgtttttgcgaaggcatgactgtacggggcctgctgtccgccatgcgcagactcggtgttgtcggggaattctctctcattggatccgatggctgggccgatcgggacgaggtgatcgaagggtacgaagtggaagctaacggcggcatcactataaagctgcagtcccctgaagtccgcagctttgacgactattttttaaaactgcgcctagacactaacacaagaaacccatggtttccagagttctggcagcaccggttccagtgccgattgcccggacatttactggagaaccctaattttaaacgaatctgcaccggcaacgagagcttggaagagaattacgtccaagacagcaaaatgggcttcgtgattaacgcaatttacgcgatggcgcacgggctgcagaacatgcatcacgccctgtgcccagggcacgtgggactttgtgacgctatgaagcctatcgacggtagcaagctgctggatttcctgattaaatcatcttttatcggcgtgtctggagaagaggtatggttcgacgaaaagggagatgccccaggtcgatacgacattatgaaccttcagtacactgaggccaatagatacgattatgttcacgttggcacatggcacgaaggcgtgctgaacatcgacgactacaagatacagatgaataagagcggagtcgtgaggagcgtctgcagtgagccttgtctgaaggggcagattaaggtgatccgaaaaggggaagttagctgctgttggatctgcaccgcctgcaaagagaacgaatatgtacaagatgagttcacatgtaaagcatgtgatctcgggtggtggcctaatgccgatttaaccggctgtgagcctatccctgttaggtatctggaatggagcaatattgaatctattatcgctatcgcattcagttgcctgggcatcttagtcactctgttcgtgaccctgattttcgtactatatcgggacacacctgtggtcaagtccagctcacgggagctctgttatataattctcgctggcatatttctcggatacgtgtgcccctttacccttatcgcaaagcccaccaccacaagctgttatctgcagcgccttctggtcggcttaagttcagccatgtgttatagcgcactagtgaccaaaaccaataggatcgccaggattctagccggaagcaagaaaaagatctgtaccagaaaacctcggtttatgtctgcctgggctcaggttatcatcgcctccattctcatatccgttcagctgactctggttgttacactcattattatggagccccccatgccaatactttcataccccagtattaaggaggtctatcttatctgtaacacttcaaacctgggcgtagtcgctccactaggatacaatggtttgctgattatgtcttgtacctactatgcttttaagacacgtaatgtccccgctaactttaatgaggcgaaatacatcgccttcacaatgtacaccacttgtattatttggctcgctttcgttcccatttactttggaagtaattacaagatcatcactacatgttttgccgtcagtctcagtgtgacggtagctctaggttgcatgttcactccgaaaatgtatataattatagccaaacctgaacgtaatgttagatctgcttttacaacgtccgacgtggtacgcatgcacgtcggcgacgggaagctgccttgtcggtcgaatacattcttaaatatctttaggcgcaaaaaagccggagcggggaacgccaagaaacgtcagccggaattttctccgacctcgcagtgccccagtgctcacgtccagctgtag

SEQ ID NO: 189382 - DNA, 2721 bp, synthetic construct
  misc_feature 1..2721: note = Description of Artificial Sequence: Synthetic coding sequence
  source 1..2721: mol_type = other DNA
atggtgggcctgctgctgttcttcttccccgccatcttcctggaggtcagcctgctcccaaggtcccctgggcggaaggtgttactggcgggggcctccagccagagatccgttgcccgcatggatggcgacgtgatcattggcgccctctttagtgtccaccaccagccacctgctgagaaagtccccgaaagaaagtgcggcgagattagggaacagtatggtattcagcgggtcgaggcaatgttccatacactagataaaataaatgctgatcccgtcctcttgcccaacataaccttgggctctgagattagggacagttgctggcattcgtctgtggctcttgaacaatcaattgagtttatccgagattccctcatcagtataagagacgaaaaagacgggataaatagatgcctccccgacggccagtcattaccccctgggcgaacaaaaaagccgatagccggagttataggacccgggagcagcagcgtggcgatccaagtgcagaacttgctgcagctgttcgatattccccagatcgcctacagcgcgacatctatcgacctgagcgacaaaactctgtataagtatttcctgcgcgtggtaccctctgacaccctgcaggctcgcgctatgctcgatatcgttaagcgatataactggacttacgtaagtgccgtgcacactgaggggaattacggtgagagcggcatggacgctttcaaggagctagcagctcaagaagggttgtgtatagctcattccgacaagatctacagtaatgccggcgaaaagtcttttgataggttgctgcgtaagcttcgcgagcgattgcctaaggctcgcgttgttgtctgtttctgcgaggggatgacggtgaggggcctgctgagcgccatgaggagactgggcgtggtgggcgaattctcgctgattggttccgatggctgggctgatagggatgaagttatagagggatatgaagtggaggctaatggtggaataacaatcaagttacagtcacctgaggtgcgttcctttgacgattatttccttaagcttcggctcgataccaatacacggaacccatggtttcccgagttttggcagcacagattccagtgccgactgcccgggcacttgctggagaacccgaacttcaagcgaatctgtactggtaacgagagtttggaagaaaactacgtgcaggactccaagatggggttcgtgatcaacgccatctatgccatggcacatggactccagaatatgcatcacgcactgtgcccagggcatgtgggactgtgcgacgccatgaaacctatcgacgggtctaagttgcttgattttctcattaaaagctcgtttattggtgtatccggtgaggaggtctggttcgatgaaaaaggcgatgctcccggaagatatgatattatgaatttgcagtacactgaagccaatcggtatgactacgtccacgtgggaacttggcacgagggtgtcttaaatatagacgattataagatacagatgaacaagagtggcgtcgttagaagcgtctgctctgagccgtgcctgaaaggccagatcaaagtgatcagaaagggtgaagtctcatgttgttggatctgcacagcctgcaaagaaaatgagtacgtgcaagacgagttcacatgcaaagcatgtgacttaggatggtggcccaatgctgacctcaccgggtgcgagcccattccggtgcgttacttagaatggtctaacattgagtctatcattgctatcgctttttcctgcctggggatcttagtgacactgttcgttactctgatcttcgtattgtacagggataccccagtggtaaaatccagttcaagagagctgtgttatattattctagcaggcatctttcttggctatgtgtgccctttcaccctcattgccaaacctaccactacgagttgttatctccaacggcttctggtgggactgtcttccgccatgtgctattcagcacttgtgacaaagactaaccgaattgcgcggatcctcgctggtagcaaaaaaaaaatatgtacaagaaagccccgcttcatgtcagcctgggcgcaggtgatcatagccagcatcttgatttctgttcagctcactctcgtggtaaccttaataataatggaacctcctatgcctattttgagttatccaagtattaaagaggtctacctgatctgtaacacgtccaacctgggagttgtggctcccttaggttataatggccttcttatcatgtcctgtacctactacgcattcaagactcgcaacgttccagccaatttcaatgaggcaaagtacattgcctttacaatgtacacgacctgcataatttggctcgcattcgtccctatctacttcggttcgaattacaaaatcattaccacatgtttcgcagttagccttagcgtgactgtcgctctgggttgcatgttcacgccaaagatgtacattatcatcgccaaaccggagcgcaacgtgcgctccgcttttacaacctccgacgtggtccgcatgcacgtgggtgatgggaagctgccttgccggagcaacacgttccttaacatattcaggaggaagaaggcaggagccggaaacgcgaagaaacgtcagcctgagtttagtcccacatcccaatgccctagcgcccatgtgcaattgtag

SEQ ID NO: 189383 - DNA, 2721 bp, synthetic construct
  misc_feature 1..2721: note = Description of Artificial Sequence: Synthetic coding sequence
  source 1..2721: mol_type = other DNA
atggtgggcctgctgctgttcttcttccccgccatcttcctggaggtctcattactgccccggtcccccggccggaaggtgctcctcgccggggcatcctctcaaaggtctgtcgcccggatggacggcgatgtgatcattggcgctctatttagcgttcaccaccagccgccagccgaaaaggtacccgaacggaaatgcggcgaaattcgcgaacagtatggaatccagagggtagaggcgatgttccatactcttgataagatcaacgccgacccagtgctgctgcctaacatcacactcggttctgagatccgcgattcctgttggcattcctctgtggcactggagcagagcattgagtttatccgcgacagcctgatctctatcagggatgagaaagatggaatcaatcggtgtctgcctgacgggcaatcgttgccaccgggacgcaccaagaagccaattgccggtgtgatcggtcctggatcctcatcagttgcaatccaggttcaaaatctgttgcaactcttcgatatccctcaaattgcttacagtgccacatctatcgatctgagcgacaagaccctgtacaagtactttctccgggtggttccgagcgatacccttcaggccagagccatgctggacatcgttaaacggtataattggacatacgtatctgccgtgcatacagaaggcaactacggagagtctggcatggacgcgttcaaggagctagctgcccaggaagggctgtgcattgcacacagtgacaagatctactcgaatgccggggagaaatcattcgatcggctgctgcgcaagttgagggagcggctccctaaggcgagagtggtggtatgtttttgtgaaggcatgactgtgcggggcctgttgtcagctatgcgccggttgggggttgttggggaattcagtcttattggctccgatggttgggctgatagggacgaggtcatcgagggttatgaagtcgaggctaatgggggcatcacgatcaagctgcaaagcccagaggttcgctcattcgacgattatttcctgaaactccggttggacactaacacacgcaatccttggttcccggaattctggcagcacagatttcaatgtagattgccaggtcatctcctggaaaatcctaacttcaagcggatctgcaccggaaacgaaagcctggaagaaaattatgtgcaagattctaaaatgggatttgtgataaacgcgatctacgcgatggcccatggcctccagaacatgcaccacgctctgtgtccaggtcatgttggactctgtgatgcaatgaaacccatagatggctccaaactgcttgatttcttaattaagagctcctttattggagtctctggagaagaagtgtggtttgatgagaagggcgacgctcccggtagatatgacataatgaacttgcagtacactgaagccaatcgctacgattacgtgcacgttggaacgtggcacgagggggtccttaacatagatgattacaagatacagatgaataaatcgggagtcgtgcgctctgtttgctccgagccatgccttaaagggcagattaaagttatccggaaaggagaggttagctgctgctggatctgtaccgcatgtaaggagaatgaatacgtgcaggatgaatttacttgcaaggcgtgcgacctgggttggtggccaaatgccgatttgactggctgcgaaccgattccggtaagatacttagaatggtccaacatagagtccattattgcgatcgcgttctcttgtctcgggatccttgtaacactgttcgtgaccttgatcttcgtgctgtatagagacacaccagttgtgaaatcttccagcagggagctctgctacatcatattggctggcatcttccttggttatgtgtgccctttcaccctcatcgcaaaacctacaacaacatcctgttacctgcagcgtcttttggtgggcctttcatctgcgatgtgctacagcgccctcgtcaccaaaacaaacagaattgccaggattctggccggcagcaagaaaaaaatttgtaccagaaagccgcggttcatgtcagcctgggcccaagtaatcatcgcttcaattctcatcagcgtgcagttgacactggtagttacactgatcatcatggagcctccaatgcctatcttatcgtacccttcaattaaagaggtgtacctaatttgtaacactagtaacttgggggtggtcgcaccacttgggtataatggtctgctgatcatgtcatgtacatattacgcctttaagactagaaacgttccagctaacttcaatgaggccaaatacattgcctttacaatgtatacaacctgtattatttggctcgcattcgtgcccatctacttcgggagtaattacaaaattatcactacatgcttcgcagtgagcttgagtgtgaccgttgcactcgggtgtatgttcacacccaagatgtacattattattgccaagcctgaacgaaacgtgcggagtgctttcaccacatctgacgttgtgcggatgcatgtgggggacgggaagctgccctgcagatctaacacgttcctgaatatatttcgtcggaagaaggctggggcaggaaatgctaaaaagagacagcctgaattttcaccaactagccagtgcccttcggctcacgtgcagctgtag

SEQ ID NO: 189384 - DNA, 2619 bp, synthetic construct
  misc_feature 1..2619: note = Description of Artificial Sequence: Synthetic coding sequence
  source 1..2619: mol_type = other DNA
atgggcagcctgctggccctgctggccctgctgctgctgtggggcgccgtcgctgaaggcccggccaagaaggtcctgacactcgagggcgacctcgttttagggggcctgttcccagtgcatcaaaagggaggccccgctgaggattgtggccccgtgaatgagcatcggggaattcagagactagaggcgatgttatttgctctggaccggatcaaccgagacccccacctgctgcccggcgtccgacttggggcccacatcctggatagctgcagcaaagacactcacgctctggagcaggcgctggattttgttagggccagcctgagcaggggagccgatggttcccggcacatatgccctgatggaagctatgctacacacggggatgctccgacagcaatcacaggcgtgattggtggatcttattctgatgtcagtatacaggtcgcgaacttgctgaggctattccaaatcccacagattagttacgctagcacatctgcaaaattgtcagacaaaagccgatacgactactttgctcgcaccgtgccacctgacttcttccaggctaaggctatggcagagatcctgcgctttttcaattggacgtatgtgagcactgtagcctctgagggagattacggagagaccgggatcgaagcctttgaactggaggctagagcacgcaacatctgcgtggcaacttctgagaaggttgggcgggctatgtcacgtgcagcgttcgaaggggtggtccgggcactgctgcagaaaccttctgcccgggttgccgtgctgttcactagatccgaggacgctcgtgaactgctggctgcttcgcagcgcctgaatgcgagctttacttgggtggcgtccgacggctggggagctcttgagagcgtcgtcgcaggttctgaaggggcggctgaaggtgctattacaattgaactggcctcctatcccatctcggactttgcctcgtactttcagtccctcgatccttggaataattcacgcaatccttggttccgcgagttttgggagcagcgttttcgctgctcattccgccagagggactgcgcagcccattcactgcgcgcggtcccctttgaacaggagtccaaaataatgtttgttgtcaacgcagtatatgccatggctcacgcactccacaatatgcaccgagccctgtgcccgaacactacacggttatgcgacgcaatgagaccggtgaatggcaggaggctttacaaagatttcgttctcaatgttaaatttgatgctccttttcggcctgccgacactcacaacgaagttcgctttgatcggtttggggacggaatcggccggtataatatattcacatatctcagagccgggagcggccgttataggtatcaaaaagtcgggtactgggccgagggcctcactctggatacatctctgatcccttgggctagcccaagcgcaggccctctgcccgccagtaggtgctcagaaccatgtctgcaaaatgaggtaaagtctgtccaacctggcgaagtgtgctgctggttatgtatcccttgccagccatatgagtataggctggatgagttcacatgtgcagactgcggattaggctattggccgaacgcctccctgacaggctgctttgagctaccacaggaatatattcgttggggtgatgcatgggccgtgggcccggtcaccatcgcctgtctgggggcactcgccaccctgttcgtgcttggtgtgttcgtccgccataacgcgaccccggttgtgaaagcctccgggcgagaactgtgttacatcctgctcggcggagttttcctctgttactgtatgacattcatattcatagccaagcccagtaccgcggtgtgtaccctccggcgtctcggtctggggaccgcgttttccgtgtgctatagcgccctcttgacaaagaccaatcggattgcccgcatattcggcggcgctagagaaggagcccagcggccccgatttatctcacccgcttcccaggtggccatctgtctggcccttatctcaggacagctcctgatcgtagtggcttggctggtcgttgaggcaccgggcacgggcaaggagacagcccccgaaaggcgcgaagtggttacactccgatgtaatcacagggatgcttccatgctgggctccctagcttacaacgttctcctgattgccctttgcactctgtatgccttcaaaactcgcaagtgccctgaaaatttcaatgaggctaaattcattggatttactatgtacacgacgtgtatcatttggctcgcgtttttgccaatcttttatgtgacttcctcagattatagagtgcagaccacaaccatgtgcgtttctgtgtctctttctggatctgtggttttgggctgcctgttcgccccaaaattgcacattatcctgttccaaccgcaaaagaacgttgtgagccacagagctcccacatcacggttcggctctgccgccgctcgtgcgtcatcgtcgttaggccaagggagtggttcacaattcgtgcccactgtgtgtaatggccgagaggtagtagattcgacaacaagttccctgtag

SEQ ID NO: 189385 - DNA, 213 bp, synthetic construct
  misc_feature 1..213: note = Description of Artificial Sequence: Synthetic coding sequence
  source 1..213: mol_type = other DNA
atgggcagcctgctggccctgctggccctgctgctgctgtggggcgctgttgcagaagggccggctaaaaaagtgctcaccttggagggcgacctggtgttgggtgggcttttccccgtgcaccaaaaaggcgggccagctgaagattgcggacccgttaacgaacaccgcggcatacaacgacttgaagcgatgctgttcgctctggattag

SEQ ID NO: 189386 - DNA, 2640 bp, synthetic construct
  misc_feature 1..2640: note = Description of Artificial Sequence: Synthetic coding sequence
  source 1..2640: mol_type = other DNA
atgaagatgctgacccggctgcaggtgctgaccctggccctgttcagtaaaggcttcctgctctccttgggggaccacaacttcttgaggagggagattaagattgagggtgacctagtgctggggggactattccccatcaatgaaaaggggactggtactgaagagtgcggccggatcaacgaggaccgaggaatacagaggctcgaggcgatgctcttcgccattgacgaaattaacaaggacgattacctgttgcccggggtgaaactgggcgtacacattctggacacttgttccagagacacgtacgccctcgagcaaagtctggaattcgtgcgcgcatcactgaccaaagtagatgaggcagaatacatgtgtccggacggtagttacgccatccaggagaatatacccctgttgatcgcgggagttatcggcgggtcttactccagcgtcagtattcaggtggcaaatctcctccgcctgtttcaaattccccaaatctcttatgcctcaacatccgccaaactctctgacaagtcacggtatgactacttcgcacgcacagtgcctcccgacttctaccaagccaaagcaatggccgaaatcctgagatttttcaattggacctatgttagtaccgtcgcctcggaaggagattatggggagacaggtatagaggcgtttgagcaggaagcacggctcagaaatatatgcatcgcaaccgcagaaaaagtggggcgatctaatattcgaaaaagctatgacagcgtgatcagagagctcctacagaagcctaatgcccgcgtggtggtgttattcatgaggagcgacgacagccgggagcttattgcggcagcctcgcgtgccaatgccagttttacatgggtggctagcgacggctggggggcgcaggagtcaataatcaaaggttccgagcacgtggcctatggggcaatcacattagagttggcatctcagccagtgcgacagtttgacaggtattttcagtccctcaatccatacaataatcaccgaaatccctggtttcgcgatttttgggaacagaaattccagtgttctctacagaacaagcgtaatcacagaagggtttgtgacaaacacctggccatcgactctagtaattacgagcaggagagcaaaattatgtttgttgtgaacgccgtgtatgccatggcgcatgctctacacaagatgcagcgaacactatgccccaacactacgaagctgtgcgatgcaatgaaaattctggacggaaagaagctgtataaagactatttattaaagatcaattttaccgcccccttcaaccccaacaaggacgcagattcaattgtaaaatttgatacatttggggacggcatgggaaggtataatgtgtttaatttccaaaatgtgggaggtaagtactcgtaccttaaggtcggccattgggctgagaccctgtctctcgacgtcaacagtattcattggtctcgcaatagtgtgccaacaagccagtgttctgacccttgcgcccctaacgagatgaagaacatgcaacccggggacgtgtgctgctggatatgtattccatgcgaaccctatgaatacctggctgatgagtttacatgtatggactgtgggtccggtcagtggcccactgcagacctcaccggctgttatgatctgcccgaggattacatccggtgggaggacgcttgggccatcgggcccgtgactatagcttgtcttggattcatgtgcacttgtatggtggtgacagtattcatcaagcacaacaacacccccctggtgaaggcttccgggagagagctttgctacattcttctctttggcgttggcttgtcctattgcatgacgttttttttcattgctaagccttcacctgttatatgcgctcttcgtagactcgggttggggtcatctttcgcaatctgttactccgctctactgactaaaacgaactgcatcgctaggatttttgacggggtcaaaaatggcgcacaaaggcccaagtttatctcccccagtagccaggtgttcatctgcctggggctcattctggtgcagatcgtcatggtgtccgtctggctaattctggaggccccgggaacccgccggtatactctcgccgagaaacgcgaaacagttatcctaaaatgcaacgttaaagactcatcaatgctcattagcctcacctatgacgtgatcttggtgatattgtgcacagtgtacgcattcaaaactcggaaatgcccagaaaatttcaacgaagccaaatttatcggcttcacaatgtatactacatgcataatatggctcgcatttttgcctatattctacgtcaccagctccgattatcgggttcagaccactaccatgtgcatcagtgtatctctctctgggttcgttgtcttgggatgcctgtttgccccaaaagtgcatatcatcctgttccagccccaaaagaacgtcgtgacgcacaggctccaccttaataggttttccgtcagcggcacaggcacaacatacagccaatcttcggcttctacttacgtaccaactgtctgtaacggaagagaggtcctggacagtactaccagtagcctgtag

SEQ ID NO: 189387 - DNA, 1608 bp, synthetic construct
  misc_feature 1..1608: note = Description of Artificial Sequence: Synthetic coding sequence
  source 1..1608: mol_type = other DNA
atgctgacccggctgcaggtgctgaccctggccctgttcagcaagggttttctgctgtccctgggcgatcataacttcctgcgtagagaaatcaagatcgagggagatctggtattaggtggactatttcctatcaatgagaagggcacaggtaccgaggagtgtggaagaatcaatgaggataggggtatccagcgactcgaagccatgttgttcgcaattgatgaaattaataaggacgattatctcctccccggcgtgaaactgggagtgcatattctggacacgtgcagcagagatacgtacgccttagaacagtccctggaatttgtccgggcatcattgacaaaagtggatgaagccgagtatatgtgccctgacggtagctacgcaattcaggagaatatccctctgctaatcgcgggagtcatcggaggaagctatagcagcgtgtcaattcaggtggctaaccttctccgtcttttccagatcccccaaatttcctacgcgagcacttctgcaaaactgtctgacaagtctaggtatgactacttcgcaaggactgtaccccccgatttctaccaagcaaaagctatggccgagatccttaggttcttcaattggacctacgtctctactgtggcttccgaaggcgactatggtgagacaggtattgaggcctttgaacaggaggcacgtcttcgaaatatttgtattgctactgcagagaaggtgggccgtagcaatatccgaaagtcttacgacagtgttatccgtgagttattgcagaaaccgaatgctagggtcgtcgtgttgtttatgaggtcagatgattcccgcgagctgatcgccgctgctagcagagctaacgcctccttcacatgggtggccagcgatggctggggcgcccaagagtctatcataaaagggtcagagcacgtggcctacggtgccatcacccttgagctggctagtcagcctgtgagacagtttgacaggtacttccagtcgctgaacccctacaataatcatagaaatccctggttcagagatttctgggagcagaagttccagtgctcattgcaaaacaaaaggaaccatagaagagtctgcgacaaacacctggccatagactcctctaattatgagcaggaaagtaaaattatgtttgtcgtgaatgctgtgtatgccatggctcacgccctgcacaagatgcagaggaccctttgtcctaacactaccaagctctgtgatgcaatgaaaatattagatggaaagaaactctacaaggattacttgctgaaaatcaatttcaccggggccgatgataatcacgttcacctgtgccagcctgagtggctgtgcggtctgggcttgtttgtctgtacccaggggagtcaccatcctgtctcaacacccgaggagtgctgccacactcaaacggccccgcagcaagtacagtgccagtggaattgggaccatatcctgagtgtcttgtgtaaacacgtctgtgcaaacggtgttcagtgggcaggcagtccgaggctgcaccacctgattagcgtcatcgtgaactgtagttccgtgctagtgttcctggactgttag

SEQ ID NO: 189388 - DNA, 264 bp, synthetic construct
  misc_feature 1..264: note = Description of Artificial Sequence: Synthetic coding sequence
  source 1..264: mol_type = other DNA
atgaagatgctgacccggctgcaggtgctgaccctggccctgttctctaaggggttcctgctgtccctaggagatcataactttcttaggcgggaaattaagatcgaaggcgacctggtgcttggaggcctgttcccaatcaacgaaaaggggactggtactgaggaatgtggccgtatcaatgaagatcgcggcattcagcgcctggaggcgatgttgtttgcgatcgatgagataaataaggacgattatttgctgccttag

SEQ ID NO: 189389 - DNA, 1614 bp, synthetic construct
  misc_feature 1..1614: note = Description of Artificial Sequence: Synthetic coding sequence
  source 1..1614: mol_type = other DNA
atgaagatgctgacccggctgcaggtgctgaccctggccctgttctccaaaggattccttctgtccctgggtgaccacaacttcctccggcgcgaaatcaaaatcgaaggggacctagtgctgggaggattgtttcccatcaatgagaagggcaccgggaccgaggaatgtggccgcatcaatgaagatcgggggatccagcgcttggaggctatgctgtttgcgatcgatgagattaataaggacgactacttattacccggcgtgaagttaggagtgcacatcctcgatacttgctcccgtgatacttatgccctggaacaatccctggaattcgtgcgtgcgagcctgacaaaagtagatgaggcggagtatatgtgtcctgatggttcttacgccatacaggaaaacatccccctcctaattgctggcgtcattggagggagttacagttcagtgtctatccaggtggctaatttacttcgactgtttcagatccctcagatctcttacgcctctacatcggcgaaactatccgataagagccgttatgactacttcgccaggaccgtgccacctgacttttaccaagccaaagcaatggccgagatccttaggtttttcaactggacctatgtgagtacagtggctagcgaaggcgattatggggagacagggattgaggctttcgagcaggaagcccgcctgcggaacatctgcatcgccactgctgagaaggtggggagatctaacatcagaaagtcctatgactcggttatcagagaactcttgcaaaagccaaacgctcgagtggtggtgctcttcatgcgtagcgacgacagtagagaactgatagcagccgcgtcgagggcaaacgcctcctttacatgggttgcatcagacggttggggggcccaggagagtattatcaaagggtccgagcatgtagcctatggggccataaccctcgagctcgccagccaacctgtacgacagttcgatcgctattttcagtccttgaacccctataataaccatcgaaacccgtggttcagggatttttgggagcagaagtttcaatgttcgctgcagaataaaaggaaccaccgccgtgtttgcgataagcatctcgccatcgattcttcaaattacgagcaagagtccaagataatgtttgtcgtgaatgcagtatatgccatggcacatgccctgcacaaaatgcagagaaccttgtgtcctaacaccactaaactgtgcgacgctatgaaaattctcgatggtaagaagctgtacaaggattatctactgaaaattaacttcaccggcgccgacgataaccacgtgcatttgtgccaacccgaatggctctgtggcctcggactctttgtatgcacccaaggctctcaccatcctgtctccacgccagaggagtgctgtcacacacagaccgccccccagcaggtacagtgccaatggaattgggatcatatcctgtccgtgctgtgcaagcacgtgtgcgcaaacggggtccaatgggccggatcccctagactccaccacctaataagcgtgattgtcaattgctccagcgtgctcgtctttctggactgttag

SEQ ID NO: 189390 - DNA, 246 bp, synthetic construct
  misc_feature 1..246: note = Description of Artificial Sequence: Synthetic coding sequence
  source 1..246: mol_type = other DNA
atgaagatgctgacccggctgcaggtgctgaccctggccctgttcagcaaaggatttctcctgtcactgggggatcacaactttctccgccgagagattaagatcgagggtgatttagtgctgggaggactcttcccaatcaatgaaaaaggcaccggcacagaagagtgtggcaggatcaacgaggatagaggcattcagcgactggaggccatgctttttgcaatcgacgagatcaacaagtag

SEQ ID NO: 189391 - DNA, 2256 bp, synthetic construct
  misc_feature 1..2256: note = Description of Artificial Sequence: Synthetic coding sequence
  source 1..2256: mol_type = other DNA
atgagccagagccccggcgccggcagccccccccccctgccccccagatctgcccctgtaccagcacggagctgtaggtgcgaggtggccaacctcttacgcctgtttcagattccccagatttcttatgcttctacttctgccaagctgagcgacaaaagccggtacgactatttcgcacgcacagtgccccccgacttttaccaggccaaagccatggccgagatcctgcggttttttaactggacgtacgtgtctaccgttgcatcggaaggggactatggagaaactggaatcgaagcctttgagcaggaggcccgcttgcgcaatatctgcattgcaactgcggaaaaggtggggcggtcaaacattagaaagtcttacgacagtgttattagggaactgttgcaaaaacctaacgcaagagtcgtggtcctgtttatgaggtccgatgattcaagggagctcatcgctgccgctagccgggcaaatgcttcttttacctgggtcgcctcagatggctggggggctcaggagagcatcataaaaggttccgaacacgtagcatatggagctatcacattggagttagcctcacagcctgttagacagttcgatagatacttccagagtctgaacccatataacaaccaccggaatccttggtttcgggatttttgggagcagaaattccagtgttcactgcagaataagcggaatcacagacgagtctgtgataaacatttggccatcgattcttctaactacgagcaggagtcaaagattatgttcgtggtcaacgctgtgtatgcaatggcacatgccttgcataagatgcagaggaccctctgcccaaatactaccaagctctgtgatgcaatgaaaatcctcgacgggaagaagctgtacaaagactatctgttgaagataaactttacagctccttttaatccgaacaaagacgccgatagcatagtcaaattcgacacattcggagacggaatgggacgctacaatgtcttcaatttccagaatgtcggagggaagtattcctaccttaaagtcgggcactgggccgagacgctgagtcttgatgtgaattccatccactggtcacggaactccgtgccaacttcccagtgctccgatccctgtgccccgaatgagatgaaaaacatgcagcccggggacgtctgctgttggatatgtatcccttgcgagccatatgagtacttagccgatgaatttacctgtatggactgcggttcaggccagtggccaactgcagatttgacaggctgttacgatctgcccgaggactatattcgctgggaggatgcctgggccatcggcccagtaactatcgcttgcctggggtttatgtgcacctgtatggtggttacggtgtttatcaagcacaacaacacacccctggtcaaagcttctgggcgggaattatgctacattctgctgttcggtgtgggcctctcatactgcatgacatttttcttcatagccaagccctctccagtgatctgcgcgcttagacgattgggcctcgggtcctcgttcgctatttgttattcggccctgttgaccaaaacaaattgtatcgcaagaatcttcgatggcgtcaagaacggagctcagcgtcctaaatttatcagcccatcatctcaggtcttcatatgccttggccttatcttagtgcaaatcgtcatggtgtctgtgtggcttatcctggaagctccagggaccagacgatataccttggccgagaagcgcgagaccgtgatactgaagtgtaacgtaaaagacagctccatgctcatcagccttacttatgatgtcattctggtgattttatgcaccgtttacgcattcaaaacaaggaagtgccctgaaaatttcaacgaggctaagttcattggattcaccatgtacacaacatgtatcatttggttggctttcctccccattttctatgtaacctcatccgattatagagtacagactacaacaatgtgtatcagcgttagcctgagcggcttcgtcgtcctaggatgcctgtttgcaccgaaagttcacatcatccttttccagccccagaagaatgtggtaacccaccgactgcacttaaacaggttttccgtttcaggcacaggaacgacttatagtcaaagttcagcaagcacatatgttcctactgtctgcaacgggcgggaagtcctggattctactacttcctctttgtag

SEQ ID NO: 189392 - DNA, 1416 bp, synthetic construct
  misc_feature 1..1416: note = Description of Artificial Sequence: Synthetic coding sequence
  source 1..1416: mol_type = other DNA
atgcggcggaccaaccacgagcccgagcccggctgccggctgaccgcagccgccgccaccgccgtgtcttccagtagttgtcaggagctctccgtgcgtgcacctttcaacccaaataaagacgcagatagtatagtcaaattcgacacctttggagatggcatgggtcgctataacgttttcaactttcaaaacgttggcgggaagtactcatatctgaaagtcggtcactgggcggagaccctcagtctggatgtaaacagcatccactggtctagaaatagcgtcccaacaagccaatgttccgacccttgcgcacccaacgaaatgaaaaatatgcagcccggcgacgtttgctgttggatctgcatcccctgtgagccatatgaatatttagctgacgaatttacctgcatggattgcggctctggccagtggcctacggctgacttgaccggctgctacgatctccccgaagattatatccggtgggaagatgcctgggccattggccccgtcactatcgcctgcctgggatttatgtgtacttgcatggttgtgaccgtgttcatcaaacataataacactcctctggtgaaggcttccggccgtgagctctgctatatcctcctgtttggggttgggttgtcttactgcatgacattctttttcatcgctaaaccctcgcctgtaatttgcgctctccgaaggctcggtctcgggtccagctttgcaatatgttattcagccctgcttactaagactaactgcatcgctcggatctttgatggggtgaaaaacggggctcagagacccaagtttatatctccaagttcgcaggtcttcatatgcctgggtctgattcttgtgcagattgttatggtatctgtatggctcatccttgaggcccccggcaccagacggtataccctggcagaaaaacgagagacggtgatacttaaatgtaacgttaaggactcgtctatgctcatcagcttaacctatgacgtcatcctcgtgattctgtgtacagtttacgccttcaagactcggaaatgccctgaaaattttaacgaggctaagtttatcggattcaccatgtatacaacatgtatcatctggctagcttttctacctattttttatgtgaccagtagtgactacagggtgcagactaccaccatgtgtatctctgtgtcactgagtggatttgtggtgctgggatgtctgttcgcgcccaaggtgcacatcatcctgttccagcctcaaaaaaacgtggtgactcatcgactgcacttgaaccgtttttctgtgagcggtaccggtacaacctatagccaaagcagtgcgagcacatatgtcccaacagtttgcaatggtcgggaagtgctggattcaactaccagttccctgtag

SEQ ID NO: 189393 - DNA, 2391 bp, synthetic construct
  misc_feature 1..2391: note = Description of Artificial Sequence: Synthetic coding sequence
  source 1..2391: mol_type = other DNA
atgcccgcctgggagcccggcgtggccgccagctgcggctggcgggcacctccctgcagtcccctgcggctgtgcatcgccccccacccatgcacccctccttcctcccaccaagggaacttaacatgccggctgccaccccgatcattcgggttctgtcgatgtgtgtgggtacggactagggggccaagcctgcccggtgagcaggtctctttggcggctcatgagtccgagggcgctgccgcccagttaggcagcagccctgagattgatcctcggagaccccggtgtctgttgccggaatctgcccagattccacagatctcctatgcctcgacggcccctgatttgtccgacaatagccgttacgactttttttcccgagtcgtcccttctgacacgtaccaagcccaggcaatggttgacatcgtgagggccctgaaatggaattatgtgagcacagtagcgtccgagggctcttacggcgagagcggcgtggaggcttttatacagaagtccagggaagacgggggcgtgtgcattgcccagtctgtgaaaatcccaagagaaccaaaagccggggagttcgataagatcatccggaggctgctggaaactagcaacgcgcgtgcagttattatcttcgccaacgaggacgatatccggagagtcctggaggcagcacgccgcgctaaccaaaccggtcattttttttggatgggatccgattcatggggctccaagattgcccccgtgctgcatttggaggaagtggcagagggcgccgtgactattttgccgaagcggatgtcggtaagagatcgtgaacgcatcgggcaggattccgcatacgaacaggagggaaaggtccaatttgtgattgatgccgtgtacgccatgggacatgcactacacgccatgcatagagatctgtgcccgggacgcgtgggcctatgcccccgcatggaccccgttgatggcacacaacttctgaagtatatccgtaacgttaattttagtggaatagccggcaaccctgtaactttcaatgaaaacggcgatgctcccggcaggtacgacatctaccagtaccaactcagaaacgacagtgcagaatacaaagtcataggctcgtggacagaccatttacatctgcggatcgaacgaatgcactggcccgggagcgggcagcagctaccacgatcaatatgttccctcccatgccagcctggagagagaaagaagaccgtcaaaggaatgccatgttgctggcattgtgagccctgtactggctatcagtatcaggtggatagatacacttgcaaaacatgcccatatgatatgcggccgacggagaacagaacaggctgtagaccaataccaattatcaagctggagtggggttctccatgggcagttctgcccctgttcctggccgtcgtgggcatcgccgccaccctgtttgttgttatcactttcgtgcgttacaatgatacgccaatcgtgaaggcctctggcagagaactaagctatgttttgctcgccggcatctttctttgctacgccacaacttttctcatgatcgccgagccagacctgggtacctgctccctgaggcgaattttcctggggctcgggatgtctataagttacgccgctctgctgacaaaaactaatcggatttaccggatttttgaacaaggcaagagaagcgtatctgcgccgaggtttatctcgccagcaagtcagttagctataacatttagcctgatctcgctgcagctgttgggcatctgcgtgtggttcgttgtggaccccagccattccgtagtggactttcaggatcagagaaccctggaccccagatttgccagaggggtgctcaagtgcgatatctcagatcttagtttaatctgtctgttgggctactctatgctcctcatggtaacatgcactgtctatgcaattaagacccgaggggtccctgagacgttcaacgaagcaaagcctattgggttcaccatgtatacgacctgcattgtctggcttgcttttatcccaatcttctttgggactagccaatctgcagacaagttgtatatccagacaacaactctaacggtaagcgtgtcactgagcgcctctgtgagtttgggcatgctgtatatgccaaaggtctatattattttgttccacccagagcaaaatgtgcccaaacggaaacgcagccttaaagctgtggtcacagccgcaactatgagtaacaagttcacccagaagggaaactttcgccctaatggagaagccaaatctgaactctgcgagaatctagaggcgcctgcacttgcgacgaagcaaacttacgtgacgtacactaatcatgctatctag

SEQ ID NO: 189394 - DNA, 2739 bp, synthetic construct
  misc_feature 1..2739: note = Description of Artificial Sequence: Synthetic coding sequence
  source 1..2739: mol_type = other DNA
atgcccggcaagcggggcctgggctggtggtgggcccggctgcccctgtgcctgttgctttccctctacggcccttggatgccctcctcattaggtaaaccaaaaggccatcctcatatgaacagtatcagaatcgatggcgacatcactcttggcgggctgttccctgtccatggccggggatccgaaggtaagccttgcggcgagcttaagaaagagaaaggaattcatcggctagaggctatgttattcgccctggaccgaatcaacaacgaccccgacctcctccctaatatcacactgggggcccgaatcctggatacttgctctcgggacacccacgctttggagcagtctctaaccttcgtgcaagcgctgatcgaaaaagacgggaccgaggtacgctgcgggtctggtgggccgccaataattactaaaccagaaagggtggtcggtgtgattggggcctctggaagctcagtttcaatcatggtggcgaacatcctcagactctttaaaatcccccagatttcatacgcgagtactgcaccggacctgtctgataacagccgatacgactttttcagccgtgttgtgccatctgacacttaccaagcccaggccatggttgatattgtgagggccctgaaatggaactatgtttccacggtagcttcagagggttcatacggtgagagtggagtcgaggcctttatacagaagagccgggaggatggcggggtgtgcatcgcccaatccgtgaaaattccgagagagcctaaagctggcgagtttgacaaaattatccggagactgctggagacaagtaatgccagggccgtcatcatttttgcgaatgaagacgatatcaggcgcgtgttagaggccgctaggcgcgctaatcagacagggcacttcttctggatgggctctgattcatgggggtccaaaatcgctcccgtactgcatctggaagaagtggctgagggcgcagtgaccatcctcccgaaacgcatgtccgtacgtggttttgaccggtacttttcgagtcgcacccttgataacaaccgacgcaacatatggttcgccgagttctgggaagacaacttccattgcaagctgtccaggcatgccctcaagaaagggagccatgtgaagaagtgcacaaacagagagaggataggacaggattccgcatatgagcaggagggaaaggttcagttcgtgatcgacgctgtgtatgccatggggcacgcacttcacgcaatgcatcgagatctctgccccggtagggtggggctgtgcccgcggatggacccagttgacggtacccagctgctgaagtatatcaggaacgtgaacttctcagggatcgcaggaaatccagtgactttcaatgaaaatggcgatgcacctggccggtacgacatttaccagtatcagttgagaaatgacagtgccgagtacaaagtaattggctcgtggaccgatcacctacacctccggatagagcggatgcactggcctgggagtggccagcaattgcctcgatcgatctgctcactgccctgccagcctggcgagaggaagaaaacagtgaaagggatgccatgctgctggcactgcgagccatgtactggataccagtaccaggtagacaggtacacttgcaaaacttgtccctacgatatgcggccaactgaaaacagaactggctgcaggcccatcccaattatcaagttagagtggggcagcccctgggctgtcttgcctcttttcctggccgtggtgggcatcgccgcaaccttgtttgttgtcatcactttcgtacgttacaatgacacccccattgtaaaggctagtggacgcgagctttcttatgttctcttagcagggatctttctgtgctacgccacgacattcctcatgatcgcagagcccgacttggggacctgctcactaaggaggatctttttgggcctaggcatgtctatttcatatgctgcactgctgaccaagacaaaccgcatctaccgtatcttcgagcaaggtaaacgcagcgtaagcgcacctcgattcataagtcccgctagtcaattggctattaccttctccctcatctcgctgcagctcctggggatttgtgtttggttcgtggtggacccatcccactcagtggtcgactttcaggaccagcggacactggatccgagattcgcacgaggagtgctcaagtgcgatatttctgacctgtcgttgatttgcctgctaggctactctatgctcctgatggttacctgcactgtatatgcaataaaaacaaggggtgtgccggagacctttaacgaggccaagccaatcggctttacaatgtatacaacttgcatcgtgtggcttgcctttattcctatttttttcggcacctcacagtccgcagataaactctacatccagaccaccacgttgaccgtgtccgtcagcttgtctgccagcgtctcactaggcatgctttacatgcctaaggtgtacattattcttttccatcccgagcagaacgttcctaagcggaagcgaagtctcaaagctgtggtgacagcagccacgatgtcaaacaaattcactcagaaaggtaattttcggccaaatggggaggcaaaatcagagctgtgcgaaaacctagaagccccagcactggcgaccaaacagacttatgtgacctacaccaatcacgccatctag

SEQ ID NO: 189395 - DNA, 2319 bp, synthetic construct
  misc_feature 1..2319: note = Description of Artificial Sequence: Synthetic coding sequence
  source 1..2319: mol_type = other DNA
atggtgcagaccctgcccaagctgttcccccacgacggcgccaagagaaaaaagcgaacgctgagaacctcagggccatgcttcgggggcgggggccagatcccacagataagctatgccagcacggccccagatttgtctgacaatagtcgatatgatttttttagtagagtggtccccagcgatacgtatcaggctcaggctatggtcgatattgtgagggccctgaagtggaactacgtctcaaccgtggccagcgagggctcatatggggaatccggggtcgaagcctttattcagaagtcgcgggaagatggaggggtgtgcatcgctcaaagcgtgaaaatcccccgggagcctaaggcgggggaattcgataagattatcaggcgacttctcgaaaccagcaacgctcgggctgttattattttcgctaacgaagacgacatacgccgtgtcttggaggccgcccggcgggccaatcaaacaggccattttttctggatggggtccgactcctggggaagcaagattgcacctgtcctccacctcgaggaggtcgctgagggggccgtgacaatacttcccaaacggatgtcggtgcgcggttttgatcgatacttcagctctaggacactcgataacaaccgccgaaatatttggtttgccgaattctgggaggacaactttcactgcaagctctctcgtcacgcactcaaaaaggggagccatgtgaaaaaatgcactaaccgcgagagaataggtcaggactctgcctatgaacaagagggcaaggtccaattcgtaatcgatgccgtttatgcgatgggtcacgcccttcatgctatgcacagagacctctgccctggccgcgtgggcctgtgccctcggatggacccagtggacggcacacagctgttgaaatatataaggaatgtcaatttctccgggattgccggaaaccccgtgactttcaatgaaaatggcgatgcacccggcaggtatgatatctatcaatatcagctgagaaacgatagcgctgagtataaagtcataggcagctggactgaccatctccatctgcggatcgaacggatgcactggcccggaagcgggcaacagctgccgcgctcaatctgctcattgccctgtcagcccggcgagaggaaaaaaacggtcaagggaatgccatgttgttggcactgtgagccttgcaccgggtatcagtaccaggtggatcggtacacatgtaaaacttgcccgtatgacatgcgtcccacagaaaatcggaccgggtgcaggcccattcccataatcaaactcgaatgggggagcccttgggccgttctgccgctttttttggcagtcgtcggcattgcagctaccctatttgtcgtcattacattcgtcagatacaatgatactccgatagtgaaagcaagtgggagggaactatcttacgtgcttctcgctggaatctttctctgttatgctaccacatttctgatgattgccgagcctgatttggggacgtgctccctccgaagaatcttccttggtctgggcatgagcatctcatatgcagcactcctaaccaaaaccaatcggatataccggatcttcgagcagggaaagcggtctgtctccgcgcctagattcattagtcctgccagtcagctcgccatcacttttagtcttatctccctgcaattgttgggaatctgcgtttggttcgtggtcgacccgagtcactctgttgtcgattttcaagaccagcgaacattggacccccgcttcgccagaggagtgctcaagtgcgacatcagcgacctaagcctaatctgcttgctgggctactccatgttgctcatggtgacgtgtaccgtctatgctattaagacacgaggtgtgcctgagaccttcaacgaagccaaaccaatcgggtttacaatgtataccacatgcatcgtgtggcttgcctttatcccaattttctttggcacctcacagtccgctgataagctctatatccaaactaccactcttacggtatcagtctcacttagcgcaagcgtcagcttaggcatgctgtacatgcccaaagtgtatataattctctttcaccccgagcaaaatgttccaaaacgcaaaagatcgctaaaggccgtggtgaccgccgcaacaatgtccaataagtttactcagaagggcaactttcgcccaaatggagaggctaagagcgaactgtgtgagaatctagaggcgcctgctctcgctaccaagcagacctatgttacctacaccaaccacgcgatctag

SEQ ID NO: 189396 - DNA, 2340 bp, synthetic construct
  misc_feature 1..2340: note = Description of Artificial Sequence: Synthetic coding sequence
  source 1..2340: mol_type = other DNA
atggccgtgcccctgggcgccccctgctgggccagcgccctgcccgcgtgggcgccgccaggcttgccccacaggagtctcttaaccaggctcctgagccaacacgtgaagcctgctaagattcctcagatctcttacgcaagtactgcccctgacctaagcgataactctaggtacgactttttcagtcgtgtggtaccgtcagacacgtatcaagcccaagcaatggtggatattgtgagagcactgaaatggaactatgtgagcactgttgcgtctgaggggagctacggcgaatcaggggtcgaagcctttatccaaaagtcacgcgaggacggcggtgtgtgcatagctcaatccgtcaaaatcccacgggaacccaaggctggggagtttgacaaaataatccgcagactgttggaaacgtccaacgcacgggctgtgataatctttgcaaacgaagacgatatccggagagtgcttgaagcagcaaggcgtgcgaaccaaacaggccacttcttctggatggggagtgacagttgggggtctaaaatcgctcctgtgctgcacctggaagaggtcgctgagggggccgtgacaatacttcctaagagaatgtcagtgcgaggcttcgatcgctattttagttccagaaccttggataacaacagacggaacatctggttcgcagagttttgggaggacaactttcactgcaagttatctagacacgccctgaagaagggctcccatgtgaaaaaatgcaccaacagggagagaattggtcaggactcggcatacgaacaggagggcaaagtccagttcgtaatagatgctgtgtatgccatgggacatgccctgcatgcaatgcatcgggacctgtgtcccggacgcgtgggcctctgcccaaggatggatcctgtagatggcacccagctccttaaatacattcgtaatgtgaacttctcaggtatcgctggaaatcctgtcacatttaacgagaatggcgacgccccggggcgctacgacatttaccagtaccagttacgaaatgattccgcagagtataaggtcatcggtagctggaccgatcatcttcatcttcggatcgagcggatgcattggcctggctcaggccaacagttgcccaggtccatttgttccttaccttgccaacctggggaacgaaaaaaaaccgtaaaagggatgccatgttgttggcattgtgaaccgtgcactggataccagtatcaggtcgatcgctatacttgtaaaacttgcccgtatgacatgcgcccaactgagaatcgaaccggatgcaggccaataccgatcattaaacttgaatggggaagcccatgggccgtgctgcctctctttctggctgttgtggggatcgctgcaactttattcgtggttatcacctttgtacgatataacgatacccctatcgttaaggcctctggacgggaactgagctatgtgctgctggctggtattttcttgtgttatgccacgacattcctgatgatcgcggaacccgacttaggcacctgtagcctcagacgcatctttctagggctcggcatgtcaatctcttacgcagcgctgctaaccaagacaaatcgaatttaccgcatatttgaacaggggaaaaggagtgttagtgcgccacgcttcattagccctgcaagtcaacttgctatcactttctctctgatttccctgcaactgttggggatttgcgtttggttcgtagtggacccaagtcatagtgtggtggacttccaggaccaacgtactttagatcctagattcgcaagaggggtcctgaagtgcgacatctctgatctctcactcatttgcctcctcggttatagtatgctgcttatggtcacatgcacagtgtatgcaatcaaaacccgcggtgtccccgagacatttaatgaggccaagcccatcgggttcacgatgtacactacctgcatcgtctggctcgctttcatcccaatcttttttgggacctcacagtctgccgataagctgtacatccagacgacgactctgaccgtctccgtttctttaagtgcctctgtgtctctgggtatgctgtatatgccaaaggtgtacataattctctttcacccggaacaaaatgttcccaaacggaaaaggagcctcaaagctgtcgttacagcggctacaatgtctaataaatttacccaaaagggtaacttcaggccgaacggcgaggctaagtccgagctctgcgaaaatttggaagcgccagccctggctaccaaacaaacttatgtgacttatacgaaccacgctatctag

SEQ ID NO: 189397 - DNA, 2739 bp, synthetic construct
  misc_feature 1..2739: note = Description of Artificial Sequence: Synthetic coding sequence
  source 1..2739: mol_type = other DNA
atgcccggcaagcggggcctgggctggtggtgggcccggctgcccctgtgtttgctgctgtccctctacgggccgtggatgccgtcctctctcgggaagccaaaggggcacccacatatgaacagcatccgaatcgatggcgatatcacactcggcggcctgtttccggtgcatggccgtgggtccgaaggcaagccgtgcggagaactaaagaaagaaaaaggtattcatcggctggaggcaatgcttttcgctctagacaggattaataatgatcccgaccttttgcctaacataaccctgggcgcgcgcatcctcgacacatgcagtcgggacacccacgccctggagcagtccctgacttttgtgcaggcactgatcgaaaaagacggcaccgaggttagatgtggctcaggaggccctccaataataaccaaacccgagagagttgtaggcgtcatcggcgcttccggctcgagtgtgagcatcatggtggccaatattctgaggctgttcaagattcctcagatcagttacgcttctacagcgcctgatctcagtgacaacagcagatacgacttcttctcccgcgtggttccatctgacacctaccaggcccaagccatggtcgacatcgtccgggcgcttaagtggaattatgtaagcacagtcgcttcagaaggatcttacggtgaatcaggcgttgaggcctttatccaaaagtctcgggaagacggcggggtttgtattgcacaatccgtgaagataccacgggagcctaaggcaggggaattcgacaagataataaggcgcctactggagactagtaatgcaagagccgtgatcatctttgccaacgaggacgatattcgcagggtgcttgaagccgcgagacgagctaatcagacagggcatttcttctggatggggagcgacagctggggaagcaagattgcccccgttctgcacctggaggaagtggccgagggagccgtaaccattctgccgaaacgaatgtccgtccggggctttgataggtatttttcctctagaacattagacaacaaccgccgcaatatctggttcgcggaattctgggaggataacttccattgtaagttatcccggcacgccctgaaaaaggggtcgcacgtgaaaaagtgcacaaatagggaacgaatcgggcaagattctgcctacgaacaggagggaaaggtccagttcgtgatcgacgctgtctatgctatgggccacgccctacatgccatgcacagagacctgtgtccagggcgcgtgggcctgtgtcctagaatggatcctgtcgatgggacacaattattaaagtacatccgaaatgtcaattttagcggaatagccgggaatccggtgactttcaatgagaacggcgatgcacccggaagatatgacatctaccagtatcagctacgcaacgatagcgctgagtataaggtgattgggagctggactgatcacctccacttgagaatagagagaatgcactggccgggttccgggcagcagctgccccgcagcatttgttccctgccttgccaaccaggcgagagaaagaagactgttaagggtatgccttgttgctggcattgcgaaccctgtacaggatatcagtatcaggtcgacagatacacgtgtaagacttgcccttacgacatgaggcctaccgagaatcgcactggctgcagacccatccccattattaaactagagtggggctctccatgggcagtgcttccgctttttctcgccgtggtcggtattgctgccactctgttcgtggtgatcacatttgtgaggtacaacgataccccaatcgtgaaggccagtggcagagagctgagctatgtacttctcgcgggcatcttcctgtgctatgcgaccacattcctcatgattgcggagccagacctaggtacttgtagtcttagaaggatcttcctgggcctcggtatgtcaatcagttacgcggctctacttactaagaccaatcgcatttacagaatcttcgaacaaggtaagaggtctgttagcgctccgaggtttatatctccagcttctcagctggctatcactttttccctcatcagcttacaactccttggcatatgcgtgtggttcgttgttgatccttctcacagcgttgtggactttcaggatcagcgcacactggatcctcgcttcgcccggggcgttctaaagtgcgatatctccgacctgtcccttatctgcctgttagggtatagcatgttgctcatggtcacatgcaccgtgtacgctattaaaacacggggggtccccgaaacctttaacgaagcgaagcctatcggtttcactatgtatactacttgcatagtgtggctcgctttcattcctatattcttcggtacttcgcagtcagccgacaaactttacatccagacaactacgctaaccgtgtccgtctccctgagtgctagtgtgagtttaggaatgctgtacatgccaaaggtttacatcattctgtttcacccagagcagaatgtgcctaagcggaagcgcagccttaaagcggtcgtgactgccgccaccatgagcaataagttcactcagaagggcaattttcggcccaacggagaagccaagtccgagctgtgcgagaatctggaggcacctgccctggccacgaagcagacatatgtcacctacacgaatcatgcgatttag

SEQ ID NO: 189398 - DNA, 2232 bp, synthetic construct
  misc_feature 1..2232: note = Description of Artificial Sequence: Synthetic coding sequence
  source 1..2232: mol_type = other DNA
atgagctgcaagatcccccagatcagctacgccagcaccgcccccgatctgtccgacaatagccgatatgacttcttttcaagggtggtcccgtcagatacttatcaggcccaggcaatggtcgacatcgtgagggccctaaaatggaactatgtgagcacagtggcatctgagggttcttacggcgagtccggagtcgaagctttcatacagaaatcacgggaggacggaggcgtgtgtatagcccaatcagtgaagatccccagggaaccaaaggcaggagaattcgataaaatcatcagacgcctgctggagaccagcaatgctcgggccgtaattatcttcgcgaatgaagacgacatacgccgtgtcctcgaagccgctaggagggccaaccagaccggccatttcttttggatgggatccgactcctggggcagcaaaatcgcacccgtgcttcatctcgaggaggtagctgagggggcagtgacaattcttcccaagcgaatgtctgtgcgggggtttgatagatacttctcttcccgcacgttagataataaccggcggaacatatggttcgctgagttttgggaggataactttcactgcaaactctcccgccatgcgttgaaaaagggttcgcacgtgaagaaatgtactaatagggaaaggattggacaggactccgcgtatgagcaggagggcaaggtgcaattcgtgatcgacgctgtctacgccatggggcacgccctgcacgctatgcatcgagatctatgtcccggaagagtgggcctgtgccccaggatggacccagttgatgggactcagcttctaaaatatatccgtaacgtcaacttttcaggaatagccggaaatccagttacgtttaatgaaaatggtgacgccccagggcgctacgacatataccagtatcaactgagaaatgacagcgcggagtacaaagtaatcgggtcctggaccgaccatctccacttgcgaatcgagagaatgcactggccgggaagcggtcagcagctgcccagatcaatctgctccctgccttgtcagcctggggagcggaagaagaccgtcaaaggcatgccatgctgctggcactgcgagccgtgcaccggataccagtaccaagttgaccgatacacatgcaagacgtgtccgtacgacatgagacccacagagaaccgaactggttgcagacccattcccatcatcaaattggaatgggggagcccttgggctgtgcttcccttatttctcgccgttgtcggcatcgctgcaaccctcttcgtggtgattacatttgtaaggtataacgataccccaattgttaaggcatcagggagggagttgtcttacgtgttactggccggaatctttctgtgctacgctacgacattccttatgatagccgaacccgatctgggaacctgtagtcttaggagaatcttcttgggactcggaatgagcatttcttacgccgctctgctgactaagactaacagaatatatcggatttttgaacagggcaaacggagtgtgagcgctcctagatttatcagcccagcaagtcagctggccataaccttttccctaataagcctgcagcttcttgggatctgcgtctggttcgtggtggacccaagccattccgtggttgacttccaggaccagcgaacattggacccgcggtttgcccggggggtgctgaaatgcgatatcagcgacctctccctgatctgtctcctagggtactccatgctgctcatggtaacgtgcactgtctatgcaattaagacccgtggtgtccctgaaacattcaatgaagcgaagcctataggattcacgatgtatacaacatgcatcgtgtggctggccttcatccccattttctttggaacaagtcaaagtgctgataagctctacattcaaaccacgaccctgaccgtgagtgtgagcctatctgcctctgtttccctgggaatgctgtacatgcccaaagtgtacatcatccttttccacccagagcaaaacgtgccaaagagaaagcgcagtctgaaagccgtggtgaccgccgccaccatgtctaataagtttacacagaaaggcaattttcgcccaaacggcgaagcaaaaagcgagctgtgtgaaaacttagaagcaccggcccttgccactaagcagacttacgtcacatatacaaatcacgccatttag

SEQ ID NO: 189399 - DNA, 1776 bp, synthetic construct
  misc_feature 1..1776: note = Description of Artificial Sequence: Synthetic coding sequence
  source 1..1776: mol_type = other DNA
atgggcagcgacagctggggcagcaagatcgcccccgtgctgcacctggaggaggtcgccgagggcgccgtgaccatcctgcctaaaagaatgagcgtgaggggctttgacaggtatttcagcagccgaactctcgataacaaccgcagaaacatctggttcgcagagttttgggaagataacttccactgtaaactgagtcgccatgcccttaaaaaagggagccacgtcaaaaaatgcaccaacagggaaaggatagggcaggactccgcctatgagcaagaagggaaagtgcagttcgtgatagacgcggtgtacgccatgggacatgctctgcacgccatgcatcgagacttgtgccccggtcgggtcggcctgtgccctcgcatggaccctgtggacggcacgcagctgctcaaatacatccgtaatgttaacttctcaggtattgcaggtaatcccgtcactttcaacgagaatggagacgcgcccgggagatatgacatctaccagtaccagttgaggaacgacagcgctgagtataaggtcatcggcagttggactgatcatctgcatttgcggatcgagagaatgcactggccaggttcgggccagcaactacccagatccatttgtagcttgccatgtcaacccggcgagcgcaagaagaccgttaagggcatgccatgctgctggcactgtgagccatgtactggctatcagtatcaagtcgatagatacacgtgtaagacatgtccttacgatatgcgccccacggaaaacagaactggctgccggcccatcccgatcatcaaactcgaatggggctccccttgggcagttctcccactttttctggctgttgtgggcattgcagctaccctctttgtagtgatcacctttgtaaggtataacgacacacctatagttaaggcgtccggcagagagctgtcatatgtgctacttgccgggatattcctttgttatgccacaacattcctgatgatcgccgaacctgacctgggcacctgttcattgcggcgaatctttctgggcctaggtatgtccatctcttatgcagcattgctcacaaagacaaatcgcatataccggatcttcgaacagggcaaaaggtctgtctctgctcccaggttcatctcacccgcctctcagttggcgattaccttctctctgatatccctgcaactcttgggaatctgtgtctggtttgtcgtggacccttcccactctgtagtcgatttccaggaccagcgaaccctggaccctcgatttgcacgcggagtcctgaagtgcgacatcagcgacctgtctctgatctgtctgcttggatactccatgctcctgatggtgacatgtacggtctacgcaatcaagactaggggagttccagagaccttcaatgaggccaagcctatcggctttactatgtatactacatgcattgtttggctggcatttatccccatattctttggcactagccagagcgccgataaactctatatacaaacaactacgctgacagtgtctgtctcattgagcgcctctgtttccctgggcatgctgtacatgcctaaggtatatataatcctgtttcaccctgagcagaatgtgccaaagaggaagaggagtctgaaggccgtggtaaccgccgccaccatgtccaacaaattcacacaaaagggcaatttccggccgaacggtgaggccaagtctgaattgtgcgagaaccttgaggcccctggcagcagctag

SEQ ID NO: 189400 - DNA, 2364 bp, synthetic construct
  misc_feature 1..2364: note = Description of Artificial Sequence: Synthetic coding sequence
  source 1..2364: mol_type = other DNA
atggagcccgccggcgagcggttccccgagcagcggcaggtgctgattcttttgctgctgctcgaagtgacactcgccggctgggagccacgacgttacagtgtgatggaggaaacggagcgagggtcttttgtggctaacttggcaaatgacctgggcctgggggtgggagagcttgctgaacgcggcgcacgcgtggtctcagaggacaacgagcagggtctgcagctggatctccaaacaggtcagcttatcctcaatgagaagctggaccgggagaaactctgtggccctaccgagccctgcataatgcatttccaggttcttctgaaaaagcctctggaggtgttccgcgcagaactgttggtgactgatatcaatgaccatagccctgaatttccggagcgggagatgacattgaaaattcctgagacctcatccttaggaacagtgtttccactgaaaaaggctcgagacttggacgttggcagcaataatgtgcagaattataacatttccccaaactctcatttccacgtgtcaactcgtacacggggggatggcagaaagtaccctgagcttgtgcttgacactgagctagatcgcgaagaacaggctgagttgcgactgaccctaactgcagtggatggcgggtcaccaccccgcagcggaacagtccagatactcattctggtacttgacgcaaatgataatgctcctgaatttgttcaagcactgtacgaggtgcaagtgccagaaaacagtccagtcgggagcctcgtggtgaaagtttccgcacgcgatttagacaccggaacgaacggagagatctcatattcgctgtattatagcagccaggagatcgataaacccttcgaactctcctccctcagtggagagatacgcctgatcaagaagttggatttcgaaaccatgtcttcatacgatctagatatagaggcaagcgatggggggggtctcagcggtaagtgcagcgttagtgtgaaggtactcgatgtaaatgataattttcctgagctcagcatctcctcactgacatcccctatccccgaaaacagccccgagacagaagtcgccctatttcggatccgggacagggacagcggtgagaatgggaagatgatctgttcgatccaggatgatgtcccctttaagttgaagccctcagtggagaacttctatcggcttgttacagaaggcgcattggaccgagaaaccagagcagaatataacataactatcaccatcaccgacttgggcactccacggcttaaaaccgagcagtctatcactgtcttagtatctgatgttaatgacaatgcacccgcattcacgcaaacctcgtatacactattcgtccgtgaaaacaattcacccgccctgcacattggctcggtcagcgccaccgatcgggactcaggtactaatgctcaggtaacttattctctgcttccaccgcgtgatcctcacctgcctctaacctccctggtgagcatcaacactgataacggccacctgttcgcactccagtcgcttgattatgaggctttgcaggccttcgaatttcgagtcggcgccactgataggggattccctgcccttagctccgaggctctggtgcgtgtactggtgctggacgcaaacgacaatagcccttttgtgctgtaccctctacagaatggatccgctccatgcaccgaactcgtcccgcgagcagctgagcccggctacctggtgacgaaggtggtcgccgtggatggagactcaggacaaaacgcttggctgagctaccagctgcttaaggctaccgaacccgggctgtttggtgtctgggctcacaacggggaggtgaggaccgccagactcctcagcgaaagggatgtggcaaaacaccgacttgtggtgctggtgaaggacaacggggaacctccccgcagcgcgactgccactctgcaggttctcctggttgacggtttttctcaaccttatctccccctgccagaggccgcccccgcccaggctcaggctgatagccttaccgtctatttggtcgtggctctggcatccgtatctagtttgtttttgttttctgtgttcctgtttgttgctgtgaggttgtgtcggagaagtcgggccgcgtccgtagggcgttgtagcgtcccggaggggcccttccctggtcatctggtcgacgtctccggcaccggcacactgagccagtcttaccagtacgaagtgtgtctcacgggtggtagcgagagtaacgattttaagtttctgaagcccatttttccaaacattgtgtcccaagactcccgaaggaaatccgaatttttagaatag

SEQ ID NO: 189401 - DNA, 3276 bp, synthetic construct
  misc_feature 1..3276: note = Description of Artificial Sequence: Synthetic coding sequence
  source 1..3276: mol_type = other DNA
atgcagctggacggcctgcaggccctgtgctggggcagcctgttcaggacccagctggttcccgtatacgtcgcagttttacctagcccacagccctgcatcccccccacgtgtaccgctttcactgagttctcgggcccactggccaaacatcattcgttccaacctttccaagtggccgcccccgccggtccccgtagccctcctcaaccattccaccttccctcagtttcccaagttcatgccacacacctgctgtgcccggtgagagtgctcggacccccctatccacccagtctagaattgttgaccagcattcattcaccagctgttctaccagcccctcagattcctcagatttcatacgcctctacagcccctgagctctcagattctacacgatacgacttctttagccgtgtggtgccgcccgactcataccaggctcaggctatggtagatatcgttagggccctgggatggaattacgttagcacactggccagtgagggtaactacggagagtccggtgtggaagcatttgtacagatcagccgcgaggctggagagctgggggcacctaggcatcagggagtgtacatcgtgtgggcgcggggacctcagctcggtcagaagcagaaggacggtggaccaagaagcatgctgggaagaggttgtctggcgggagcaccgtgcggtcgggacctgtttgtattagatgattctgcccttcctcaagcttggcgccgcgtacaagcccgcctccacccatgtagacccttctcacaacccacacagagctcagccgccgtggccagatggagtataaagatcccccgggagccaaagcctggagaattctctaaggtgatcagaaggctgatggagaccccaaatgcccgcggtataatcatctttgccaacgaggatgacatcagccctgccccaacgcgccgtgtgcttgaggctgctaggcaggctaaccttaccggtcatttcctttgggtgggctccgattcatggggcgctaagaccagccctatcctgtccctcgaggacgtggccgtaggcgccataaccatcctgcccaagcgcgcttccatagatggtttcgaccagtactttatgacccgcagcctcgaaaacaacagacgaaacatatggttcgccgaattttgggaggaaaattttaattgcaagctaacttcatctgggactcagagcgacgactctactagaaagtgtacaggagagtcttgccctggatggaccggagaagagcgaataggccgtgactccacgtatgaacaagaagggaaggtgcagttcgtgatagacgccgtgtacgctatagcccatgctctgcactcgatgcaccaagctctgtgccccggccataccgggctctgtcctgccatggagcctaccgatggtcgaatgttattgcaatatatccgatgtcccctccagtggcttaatcggatcccattatgtgagtggccgcgtagggtgaggcccttcttctgtcaatggacgctcggcctgctgtctagctgtggttatgtgaacaacgctgccgtaaacgttgcggtgcaggccttcttggctacactgttaagcagcctgtcctctatctaccccggagtggagctgttgggccatgtgttcaacctgcttcggcgcctgcacacggtcttctgttccgggtgttccttgtttccaccaaccgttcacaaaggctccgccggtacccctgtaatgtttaatgagaatggagatgctcccggacgttacgatattttccagtatcaagccactaatgggagtgcatcctccggaggatatcaggccgttgggcagtgggccgagacactgcgtttggatgtttccgtgcagactgagcctcaagtcggtatgggacccgggtcgaggaggcagactccacagccggtcttttgtgccagccaggtagaggcattgcagtggagcggcgatcctcatgaagtgccgagctctttatgttcgctcccatgcggacccggggagagaaagaagatggtgaaaggggtgccctgctgttggcactgtgaagcctgcgacggatacaggttccaggttgacgaattcacgtgtgaggcttgtccaggcgatatgcgcccaacacccaaccatactggatgcagacccacaccagtcgttcggttatcttggagctctccgtgggccgccccaccactgctgctcgcagtcctgggaatcgtggccactacgacagtagtggctaccttcgttcggtacaacaatactccgatcgtcagagcttcaggcagagaattatcctacgtgcttctcaccggcatcttcctgatttacgctatcactttcctcatggtcgctgagccaggcgcagccgtgtgtgctgcccgccggctgttcctcggtctggggacaacactgtcctacagcgctcttctgaccaaaaccaaccgcatttacaggatattcgaacagggaaaacgttctgtaaccccccctccgtttatcagtcccaccagccaactggtgatcacattttcgcttacttcactgcaaatcaacgccgtgttccgtgtgacactcttctatttcggtagtttgcaatggcattacctgtcaagcttgcaagcactgccttcaggcgacctgtccgtgcagcacctttcagcctctgtatctctgggcatgctgtactccaaaagtaaaacacccgtcgacctcgaggtgggaagcgagccttgggggtacttgggcgacggcgtgctgcaggccgaacactggggagagggaagaggggactggccacatgtaaaggttatggtggtcgtgtatcagagctcactggtttactacatgaagcaggctcaggccggaagggtgaaaaccgaactcctgaaggtcgctcaccaccaggttgctaagtccgtacctgaagaaagccagattgtggtccttcatttggtgacagcaggttatgttgatatggccatccgaactaccagggcctcattacatcttatgcccttgactcttgtcccaggagccgccgccgaggtgaacgaaacccaagttgctgctcgcttaggcccggggtcaactgtcgggacctaccaggtggtggtggtactgatgagaagcttgcagatcgataaaacgaccaaccagctcagcctggagacttgcttttcaggcatccaggggttccttgccagtgtaaacagcctggtgatggataaatag

SEQ ID NO: 189402 - DNA, 2634 bp, synthetic construct
  misc_feature 1..2634: note = Description of Artificial Sequence: Synthetic coding sequence
  source 1..2634: mol_type = other DNA
atggcccggccccggcgggcccgggagcccctgctggtggccctgttgccactggcctggctggctcaggccgggctggctagagcagccggcagtgtcagactcgcgggaggcctgaccctgggagggcttttcccggtgcacgctagaggcgcggccggccgggcctgtgggcagttgaagaaggaacagggtgtccatcggttagaggcaatgctgtatgcacttgaccgggtcaacgctgacccggaactcctgcctggggtccggctgggagccaggttgctggatacctgtagtagggatacctatgctctcgagcaagcacttagcttcgtgcaggcattaatccggggaaggggagacggagatgaagtgggcgtgcgctgtcctggtggagtccctcccctgaggccagcaccacccgagagagtggttgctgtcgttggtgcgtctgcttccagtgtgtctatcatggttgctaatgtactccgcctgttcgccattccccagatctcgtatgccagcacagcccctgaactcagcgactcaactaggtatgatttcttctcacgggtggtaccaccagactcttaccaggcccaagccatggtggatatcgtccgagctttgggttggaattacgtcagtactctggcctcggaggggaactatggcgagagcggtgtggaggcgtttgtccagatttctagggaagctgggggcgtttgcatcgctcagtcaatcaaaatacccagggagcctaaacccggcgagttcagtaaggtgattcgcagattaatggagacccctaacgcgcgcgggattatcatattcgccaatgaggacgacattcgcagggtgctcgaagccgcacgccaggcgaacctcacagggcactttttgtgggtagggtcagacagctggggagccaagacctctccaatccttagtctggaggacgttgctgttggcgcaatcaccatcttacccaagcgtgcctcgatagatgggttcgatcagtacttcatgactagaagtctggagaataataggcgtaacatttggttcgcagagttttgggaagaaaactttaattgtaaattgacaagctcaggaacacagagcgacgactcaacgaggaagtgcacgggggaggaaagaattggtcgagattcaacatatgagcaagaagggaaagtgcagttcgtgattgatgccgtgtacgccatagcgcacgctctccacagcatgcaccaggctctgtgcccaggacatacagggttgtgccccgcgatggagcccaccgatggccgtatgttgctgcagtacattagggcggtccgctttaatggtagcgcaggtacgcctgttatgtttaacgagaacggcgacgcccctggcagatatgacatcttccaataccaggctacaaacggttctgccagttctggaggctaccaggcggtggggcaatgggccgaaaccctgcgactggacgttgaggccctgcagtggtctggagatccccacgaggtgccttcctccttatgttcactaccctgcggacctggcgagcgcaaaaagatggttaagggagttccttgctgctggcactgcgaagcctgcgatggttacaggtttcaggtggatgagttcacttgtgaagcctgtcctggcgatatgagaccaacacccaatcacacaggctgccggccgacgcccgttgtgcggctgagctggtccagtccctgggccgcccctccgctcctcctagcagtgcttggcattgtggctacaactactgttgtcgccacttttgttcggtacaataataccccgatcgtgagggcctctggaagggaactgagctacgtactgctgaccggcatattcctgatttatgctatcacctttctgatggtggccgagcctggcgcggccgtgtgcgccgctcgtagattgttcctgggtctgggcaccacattatcatatagtgcactcctgaccaaaaccaaccgtatctatcgcatctttgagcagggcaagcgctccgtcactccgcctcctttcatatccccaacatcacaattggttattacctttagcctgacttcattgcaggtggtcggaatgatcgcatggttgggtgcacgccctccccactcagtgattgattacgaggagcaaaggactgttgatccagagcaggctcggggcgtcctgaaatgtgatatgtccgacctttcactgatcggctgtctgggatattctctgctgctcatggtgacctgcactgtctacgccattaaagctcgtggggttcccgagacgtttaatgaggccaagccaattggctttaccatgtatactacgtgcatcatttggctcgctttcgtaccaatttttttcggcactgctcagtcagcagaaaagatatacatacaaacaaccaccctcacagtgtccctctctctgtctgcctccgtttctctcgggatgttatacgtgcctaagacctacgtaatcctcttccatcccgaacagaatgtacagaagcgaaagaggtcgctgaaggcgacttccaccgtggcagccccaccaaaaggcgaggatgccgaggcccataagtag

SEQ ID NO: 189403 - DNA, 2748 bp, synthetic construct
  misc_feature 1..2748: note = Description of Artificial Sequence: Synthetic coding sequence
  source 1..2748: mol_type = other DNA
atggtgcagctgcggaagctgctgcgggtgctgaccctgatgaagttcccttgttgtgtcctggaagtgctactctgcgctcttgcagcagccgctcgcgggcaggaaatgtacgcccctcattccatccggattgagggagacgtgacattgggtggactcttccctgtccacgccaagggaccatcaggggtaccatgcggtgacattaaacgggagaatggcatccataggctagaggccatgctatacgctctcgatcagatcaactctgatccaaacctgctgcctaacgtgaccctgggagcccgcatcctcgacacctgcagtagagatacgtatgcgcttgagcagagcttaacatttgtgcaggccttgattcagaaggacacctcagatgtgcgatgcaccaacggtgaaccccccgtctttgtgaagccggaaaaggtggtcggcgtgatcggggccagtggctcctcagtgtccataatggtcgcaaatatcctcagactcttccagatccctcagattagctacgcctcaaccgccccagaactgtctgatgatcgcaggtatgatttctttagtcgcgtggtccctcccgatagcttccaagcacaagctatggttgatatcgtgaaagctcttggttggaattatgtgagtactctcgcatctgagggcagctatggagagaagggggttgaatccttcacccagattagtaaagaggctggtggcttgtgcatcgcccagtctgtgcggattccgcaggaaaggaaggaccggactatcgacttcgatcgaatcattaagcagttgttagacacccccaacagtagagccgtggtgatcttcgccaatgatgaggacatcaagcagattctcgctgcggctaaaagagccgatcaggtcggccatttcctttgggttggttcagatagctgggggtcaaagatcaatccattgcatcagcatgaggatatcgctgaaggagcgatcaccattcagccaaaacgggctaccgtggagggctttgacgcctactttacctcacggacccttgaaaataatagacgaaacgtctggttcgcagagtattgggaggagaattttaattgcaagcttaccattagcggcagtaagaaggaggacactgatcggaagtgcactgggcaggaacgtataggtaaggacagtaactatgaacaagagggaaaggtacagttcgtaattgatgctgtttacgctatggcccatgccttgcaccacatgaataaggacctgtgtgcggattataggggagtgtgtccggagatggagcaagcgggaggaaaaaagctcttgaagtacatacgaaatgtgaacttcaacggttcagcaggcactccggtgatgttcaataaaaacggggacgctcccgggcgctatgatatctttcagtaccagaccaccaacacctccaatccaggctatcgactgattggacagtggactgatgagctgcaactgaatatcgaagacatgcaatggggtaaaggcgtaagagaaatacctgcatcagtctgcacgttgccttgtaagcccgggcagcgcaagaaaacccagaagggaaccccctgttgctggacatgcgaaccatgtgacggctaccagtatcagttcgacgagatgacatgtcagcactgtccctacgatcagcggccgaatgaaaataggaccggatgtcaagatattcccattatcaagctggagtggcacagtccatgggccgtcatacctgtcttcctcgccatgcttggaattattgcaaccatcttcgtcatggccacctttattagatacaacgacaccccaattgtgcgcgcctcaggacgcgaactttcatatgtcttgctgacgggtattttcctttgctatataattactttcttaatgattgccaaaccagacgtggctgtgtgcagtttccggcgcgtgtttctcggcctcggcatgtgcatatcctatgctgctctgctcacaaagaccaacaggatttacagaatcttcgaacagggcaagaaatcagttacagcgcccaggctaattagcccaacttcacaactcgccatcacttcatcccttataagtgtgcaactgttaggcgtctttatctggttcggcgtcgaccctccaaacattatcattgactacgatgagcataaaacaatgaatcctgagcaagcccgcggagtcctaaagtgcgacataacggatctgcagatcatctgttcattgggatactccattctgctgatggtcacttgtacagtctacgccatcaagacacggggagtgcccgaaaactttaatgaagcaaaacctatcggcttcacaatgtataccacctgtattgtctggcttgcttttatccccatcttctttggtaccgctcagtcagccgaaaagctgtacatccaaactaccaccctcaccatctcgatgaatctcagcgcctccgtagcattagggatgttgtatatgcccaaagtctatatcattatttttcacccagagcttaatgtccaaaagcggaaacggtcattcaaggctgttgtcactgcagccactatgtcatctcgtctctcacataagcctagcgaccgccccaacggcgaagcaaaaaccgagctgtgcgagaatgttgatcccaattcgcctgctgccaagaagaaatatgtgtcatataataacttggttatatag

SEQ ID NO: 189404 - DNA, 2721 bp, synthetic construct
  misc_feature 1..2721: note = Description of Artificial Sequence: Synthetic coding sequence
  source 1..2721: mol_type = other DNA
atggtgcagctgcggaagctgctgcgggtgctgaccctgatgaagtttccctgctgcgtgctggaggttctcctgtgcgcgctggctgccgccgcaaggggccaggagatgtatgctccacactccatccgaatcgaaggagacgttacactcggaggcctcttcccagttcatgcaaagggaccgagcggcgtgccctgcggggacattaaacgcgagaacggaatccataggctggaggccatgctgtatgcactggaccagataaatagtgatcctaatctgctccccaacgttacccttggcgctcgaattttggacacgtgcagtagggatacttacgcactggagcaatcccttacctttgtccaagccttaattcagaaggacacttcggatgtcaggtgcaccaacggagaaccccccgtgttcgttaagcctgaaaaagtggtcggggtgattggtgctagcggaagctccgtgtccattatggtggcaaatatcctcagactctttcagataccacagatctcctatgcctcaacagcccccgagctgagcgacgacagaaggtacgactttttctcaagggtggtgcctcctgactcatttcaggcacaggctatggtggatattgtgaaagccctcggctggaactacgttagtaccttagcctctgaggggagctacggcgaaaagggagtggaatcttttactcaaatctctaaggaggcaggaggactttgcattgcgcagtcagtgcgtatccctcaagaaaggaaagataggactattgacttcgatcgtattatcaagcagctgctggacacgcctaattccagagctgttgtcatctttgctaatgacgaagacatcaaacagatcctagccgcggccaagcgggccgaccaagtcggccattttctctgggtggggtcggatagttgggggagtaagatcaaccctctgcaccagcacgaagacattgcagaaggagctatcaccatccagcccaaaagagccacagtggagggtttcgacgcctacttcacgtctagaactttggagaataacaggaggaatgtgtggttcgccgaatattgggaggagaatttcaactgcaagctcacaatctccggctcaaagaaagaggatacagaccgtaagtgtaccggacaagagcgaatagggaaggattctaactatgagcaggagggcaaggtgcagtttgtcatcgacgctgtctacgccatggctcatgctctgcatcatatgaataaagatctttgtgcagactacaggggagtctgtcctgagatggaacaagcgggtggaaaaaagctacttaagtatattcgaaacgtgaattttaacggctctgccggcacgcccgtcatgttcaataaaaacggcgatgctcctggcagatacgatatctttcagtaccagacaaccaacacgtccaatcccgggtatcgcctgatcggccagtggacagacgagctgcagctgaatattgaggacatgcagtggggcaagggggtccgagaaatccctgcgagtgtgtgtacccttccttgcaaaccagggcaacggaagaaaacccaaaaaggaacaccttgttgttggacctgtgagccctgtgacggctatcagtaccagttcgatgaaatgacctgccagcattgcccctacgatcagcgacctaatgagaaccgtaccgggtgccaggatatccctattataaagctggaatggcactcgccctgggctgtcatccccgtctttttggcaatgctgggaataatcgcgaccattttcgtgatggcaacctttatccgatacaacgacacacctattgtgagggcctcaggtagagagctgtcctatgtgctcctgaccgggattttcttatgttatatcatcaccttcctgatgatagcaaaacccgatgttgccgtttgcagtttccgcagggtgttcttagggcttgggatgtgtattagctacgcggctctcctgactaagaccaatagaatctaccgtattttcgagcagggcaaaaagtccgttactgcgccccgacttatttccccaacatctcagttggctattacttctagtctgatctccgtccagcttttgggcgtgtttatctggtttggtgtggaccctccgaacattattatcgactacgatgagcacaaaactatgaaccctgagcaagcaaggggtgtactcaaatgcgacatcacagatctgcaaatcatttgctcacttggatacagcattctactgatggtgacgtgcaccgtctacgccattaaaaccagaggggtcccagagaacttcaacgaggcaaaaccaattggctttactatgtatacaacttgtattgtttggcttgcttttattcccatttttttcggcacagcacagtcagccgagaagctttatatccagactaccactctcacgatttccatgaacctgtctgcttctgtggctctgggaatgttgtatatgccaaaggtctacatcatcatctttcatcctgaactgaacgtgcagaagagaaagcgttcatttaaggccgttgtgacggcagcaaccatgtcaagtcgattgtcacacaagccgtccgatcggcctaacggcgaggcgaaaactgaactatgtgagaacgtcgaccctaacagtgaaaagtgcaactgttattag

SEQ ID NO: 189405 - DNA, 2769 bp, synthetic construct
  misc_feature 1..2769: note = Description of Artificial Sequence: Synthetic coding sequence
  source 1..2769: mol_type = other DNA
atggtgcagctgcggaagctgctgcgggtgctgaccctgatgaagtttccttgttgtgtcctggaggtactgctgtgcgccctggccgccgccgcgaggggtcaggagatgtacgcccctcactcaatccgcattgagggtgatgtaactttgggcggactatttcccgtccacgctaaaggcccatcaggcgtcccttgcggagacataaagagggaaaacgggatacacaggctggaggccatgctctacgcactggaccagatcaactctgatcccaatctcctgccaaatgtgacactaggagcccggatccttgacacctgtagtcgtgacacttacgctctcgagcagtctcttactttcgttcaagctttaatacagaaggatacttctgatgtcaggtgcactaacggggagcccccggtttttgttaaacctgagaaggtcgtaggagtgatcggggcatcgggtagcagcgtatccatcatggtagccaatatcctgaggctgtttcaaattccgcagatatcatatgcctctactgcccctgagctaagcgacgatagaaggtacgatttcttctcacgagtggttccccctgactccttccaggcccaggcgatggttgatatagtaaaagccctggggtggaactatgtgagtacgctcgctagcgaggggtcatacggagaaaagggggtggaatctttcactcagattagcaaggaggcagggggcctctgcatcgcccaaagtgtccgcattcctcaggaacgcaaggacagaacgatcgattttgataggattatcaagcagcttctggatacaccgaactcacgagcagtagtaatctttgccaacgatgaagatatcaagcagatcctggccgctgcaaaacgagcggaccaagtcgggcactttctatgggtcgggagtgattcttgggggagcaagattaacccccttcatcagcatgaagatatcgccgagggcgccattaccatccaacccaagagagccaccgtcgagggcttcgatgcttattttaccagcaggaccctcgaaaataaccggcggaacgtctggtttgcagaatactgggaagagaacttcaactgcaaactcacaatcagtggttctaagaaagaagacactgatcgaaaatgcaccggacaggagcgcattggtaaggactctaactacgagcaggaaggaaaggtgcaattcgtgatcgacgcagtctatgccatggctcatgcacttcaccacatgaacaaagacttatgtgccgactatagaggggtgtgtccagagatggagcaggcgggcggaaagaaactcctgaaatacatcaggaacgtcaatttcaacggctccgctggcacacccgtgatgtttaataaaaacggcgatgctcccggtcgctacgacatcttccagtaccagacaacaaataccagtaacccaggataccgcctgatcggccagtggacagatgagttgcaactgaacatcgaggatatgcagtggggtaagggggtccgcgagatccccgccagcgtctgcacactgccctgcaagccagggcagcggaagaagacccagaagggcacgccttgttgctggacatgtgaaccttgcgacgggtatcaatatcagttcgatgaaatgacttgtcaacactgtccttacgatcaaaggccaaacgaaaataggactggctgtcaggacatcccaatcataaagctggaatggcattccccctgggccgtaattccggttttcttggccatgctgggcatcattgccaccatttttgtgatggcaacctttatcaggtacaacgatacacccattgtcagggcctccggcagagaactgtcatacgtcctgttgacagggatattcttgtgttacattattacatttttgatgatcgcgaagcctgatgtggccgtgtgctcgttcagaagggtgtttttaggactggggatgtgtataagctatgccgcactgctgaccaaaaccaatcggatatacagaatcttcgaacagggaaagaaaagcgtgactgcccctcggctgatcagccccacctctcagctcgcgatcactagctctcttatttcagttcagctcctaggagtctttatctggttcggggtggaccccccaaatatcattattgattacgacgagcataagactatgaacccagagcaagctcggggagtgttgaaatgtgacattacagatttgcagataatttgctccctgggctacagcattctcttaatggtgacctgcacagtctacgcaatcaagactcgcggcgtacctgaaaatttcaacgaggccaagcccatcggtttcacaatgtataccacttgtattgtttggctggcctttattccgatcttcttcgggacagctcagagtgcagaaaaactctacatccagacaactaccttgacgatctccatgaatctttcagcatctgtcgcccttggaatgttatatatgccaaaggtttatataatcatcttccaccccgagctgaatgtgcagaagaggaagcggagctttaaggcagtggtcactgctgctaccatgagtagcaggctatcccacaagccctccgatcgacctaacggcgaggcgaagactgagctgtgcgagaatgtggatccaaataattgtatcccaccagtgagaaagtcagtgcaaaaaagcgtcacctggtatactatccctccaacggtttag

SEQ ID NO: 189406 - DNA, 2736 bp, synthetic construct
  misc_feature 1..2736: note = Description of Artificial Sequence: Synthetic coding sequence
  source 1..2736: mol_type = other DNA
atggtgcagctgcggaagctgctgcgggtgctgaccctgatgaagttcccctgttgcgtgcttgaggtgttgttatgtgcactggcggctgctgctcgcggtcaagagatgtatgcgccacactcaatcaggatcgagggagacgtgacactcgggggtctgttccccgttcacgctaaagggccctctggagtgccttgtggcgatatcaaacgcgaaaatgggatccatcgccttgaggccatgctctacgcacttgatcaaatcaacagtgaccctaacctgctaccaaacgtgaccctgggggcacgaattctggacacatgctctagagacacctacgccttagaacagtctctgacatttgtgcaggccttaattcaaaaggatactagtgacgtgaggtgcaccaacggagaaccccctgtatttgtcaaaccagagaaggtggttggggtgatcggggcttcaggctcaagcgtgagcatcatggtggccaacatcctgaggcttttccagattccccagatctcatacgcatcaacggctcccgaactatctgatgataggagatacgatttcttctcgagggttgtcccccccgattctttccaggcccaggctatggtcgacatagtgaaggctctgggatggaactacgtctcgacattggcctcggagggctcctatggcgagaaaggcgtagagagtttcacccaaatttccaaggaggccggtgggctgtgtatcgcccagagtgtccgcatcccgcaggagaggaaagacaggacgattgatttcgatagaattattaaacagctcctggacacaccaaacagcagagccgtcgtcatctttgccaacgacgaagacatcaagcagatactggccgccgccaaaagagccgatcaggttgggcatttcctttgggtcgggagcgattcttggggatcaaaaatcaatcccctacatcagcatgaagacattgccgagggtgccattactatccagcccaaacgggcaaccgtggagggctttgacgcatatttcacctcccgtactctcgagaacaaccgccgaaatgtgtggtttgctgagtactgggaagagaacttcaactgcaagttaaccatctcggggtcaaaaaaagaggacactgatcggaagtgtaccggccaggagcgtatcggaaaggatagcaattatgaacaagagggtaaagtgcaatttgtgattgatgccgtgtacgctatggctcatgccttgcaccatatgaacaaagacctctgtgccgattatcggggcgtttgccccgagatggagcaggccggcggcaaaaagctgctgaagtacattagaaatgtcaactttaacgggtccgccggcacaccagtgatgttcaataagaatggcgacgcacccggtcgctacgacatattccaatatcagacaacaaatactagtaacccagggtacagactaatcggacaatggacagatgaactccagcttaatatcgaagacatgcagtggggcaaaggggttagggaaatacctgcatccgtctgtaccctgccctgtaaacctggccaacgcaaaaagacccagaaaggtactccttgttgttggacctgcgagccatgtgatggatatcagtaccaatttgacgagatgacctgtcagcattgcccctatgatcaacgcccaaacgaaaaccgcactgggtgtcaagatatacctattataaagttggagtggcattctccatgggctgtgatccccgtgttcctcgcgatgctcgggataatcgctacaatttttgtgatggccactttcattcgttataacgatactcctatagtgcgcgcctccggtcgagaactgagttacgtcctgctgactggaatcttcctttgttacattatcacattcctgatgatcgccaaaccagatgtcgcagtttgcagttttaggagggttttcctgggattaggaatgtgtatctcctatgcagcacttctgaccaagactaatcggatctaccgtatctttgagcaaggcaaaaagtcggtaactgccccacgtctgatttcccctacctcacaacttgcaattactagtagcctgatttcagtgcagctcttgggggtctttatttggtttggcgtcgacccacctaatatcatcatcgattacgacgagcacaagaccatgaaccccgaacaggcaagaggcgtcttgaaatgcgatatcacagacctgcagattatttgctctctcggctatagtatacttctgatggttacctgtactgtgtatgccattaaaaccagaggcgttcctgaaaattttaacgaggcaaagccaattggatttacgatgtacacaacttgtatagtgtggctggctttcatccccattttttttggaactgctcagtcggcagaaaagctctacatccaaaccaccaccttgactattagtatgaacctgtccgcgagtgtggcgctgggaatgctttacatgcccaaagtttacatcattatttttcaccccgaactgaatgtgcaaaaaagaaagcgaagcttcaaagctgtcgtaacggctgccacaatgtcctctcggctgtcccacaagcccagcgatcgtccaaacggcgaagcaaagacagagctctgcgagaatgttgatccgaatatcaccagtgaagatttgagccttcataaggaagattag

SEQ ID NO: 189407 - DNA, 2475 bp, synthetic construct
  misc_feature 1..2475: note = Description of Artificial Sequence: Synthetic coding sequence
  source 1..2475: mol_type = other DNA
atggtgcagctgcggaagctgctgcgggtgctgaccctgatgaagttcccttgttgcgtgctggaggtcctactgtgcgccttagccgctgcggctagaggtcaggagatgtacgctccccattctattcgtatcgagggggacgtgacactcggtgggttatttcccgtgcatgccaagggtccgagcggagttccgtgtggcgatattaaacgtgagaacggtattcataggctggaagcaatgttgtatgccctggatcaaatcaactcagatccaaatcttttacctaacgtcacactaggggcccgcatcctcgacacatgctcacgagacacctatgccttagaacagagtctaacctttgtgcaggccctaattcagaaagacacttccgatgttcgctgtaccaatggcgaaccgcccgttttcgtgaaaccagagaaagttgttggagtcattggagcctcgggatctagcgtgtctattatggtggctaatattctgagacttttccagataccacagatctcctacgctagtaccgcccctgaactgtctgacgatagacgttatgattttttctcaagagtggtgccacccgactccttccaggcacaggcaatggtcgacatcgtaaaagctctcgggtggaattatgtatccacgttagcttcagaaggttcctatggggagaagggtgtagaaagcttcacgcagatttccaaggaagccggcggcctctgtatagcccagtcggtgcggattccccaggaacggaaagatagaaccatagactttgaccgcatcatcaagcaactgctggatactcccaattcccgcgcagtggtgattttcgccaacgacgaggacattaagcagattcttgccgccgcaaagcgcgctgatcaagtgggtcacttcctgtgggtgggaagtgacagttggggatcaaagattaaccctttacaccagcacgaggacatcgccgaaggcgccataaccattcaacctaaacgcgccacagtagagggcttcgatgcctacttcacgtctagaacattggagaataatagacgcaatgtctggtttgccgagtactgggaggaaaattttaattgtaaactgaccatatccggatctaagaaggaggacaccgaccggaagtgtaccgggcaggagagaatcggaaaggacagcaattatgaacaggaagggaaggtacaatttgttatagatgccgtgtatgcgatggcacacgccctccatcatatgaataaggacctgtgcgcagattacaggggcgtttgccccgagatggagcaggcaggcgggaagaaactgcttaaatatattaggaacgtgaatttcaatggagatgccgggactcctgttatgttcaataagaatggggatgctccaggtcggtacgacatctttcagtaccagaccaccaacaccagtaaccctggttatcggctgatcgggcaatggaccgatgagctccagctgaatatagaggacatgcagtggggtaaaggcgtacgcgagatccctgcctctgtgtgcaccctcccatgcaaacccggacagcgaaaaaagacccagaaggggaccccctgttgctggacctgtgaaccctgcgacggataccaatatcagtttgatgaaatgacttgtcagcattgtccatacgaccagaggcctaatgagaataggacgggttgccaggatatccctatcataaagctggagtggcattcaccatgggctgtaatcccagtcttcctagcaatgctaggaatcatcgccactatcttcgttatggctacttttatccgatataatgacaccccgatcgtgcgagcctccggcagagaactctcgtatgtgctgctaaccggaatattcctctgctacataattacgttcctgatgatcgccaaaccagatgttgcagtatgcagctttcgtagagtcttccttggccttggcatgtgtatatcttacgcagcattactgacgaagaccaacaggatttatagaatcttcgagcaggggaagaagtccgttacagctccacggttgatcagccctacctcacagctggcaattacttcttccttgattagcgtgcaactcttgggagttttcatatggtttggggtggaccctcccaatatcatcatcgactacgatgagcataaaacaatgaaccctgagcaggcacgcggggtgttgaagtgtgacatcaccgatctccagataatctgcagtctgggctactcaattctcctcatggtaacatgtacggtctatgcaattaagaccaggggcgttccggaaaacttcaacgaggccaaacccatcggctttaccatgtatacaacatgcattgtgtggctcgctttcatcccaatctttttcggaaccgcacagtccgccgaaaaagttattctctgctgtatcagctag

SEQ ID NO: 189408 - DNA, 2775 bp, synthetic construct
  misc_feature 1..2775: note = Description of Artificial Sequence: Synthetic coding sequence
  source 1..2775: mol_type = other DNA
atggtgcagctgcggaagctgctgcgggtgctgaccctgatgaagtttccttgttgtgttcttgaagtgctactctgcgcgcttgccgctgcggcacgcggccaggagatgtatgcaccccatagtataagaatcgaaggagatgtcaccttaggaggcctctttcccgttcatgcaaagggcccttctggcgtcccctgcggggacattaagcgcgaaaacgggatccaccgactggaggctatgctttatgctttggaccagatcaattctgacccaaatttgctacccaatgtgacgctgggcgctcgaattttggatacgtgctctagagatacgtatgcgctagagcagagcctgacttttgtgcaggcgttaattcaaaaagacacttccgatgtcaggtgcacaaacggagagccgcctgtgtttgtcaaacccgagaaggtggtcggcgtgattggagccagcggctccagcgtgtccataatggtagctaacattctcagactgtttcagatccctcaaattagctacgccagcacagcaccagaacttagtgatgatcgtcgatacgatttcttctctagggttgtgccccccgattcgttccaagcccaggccatggtggacattgtcaaagcccttggatggaattacgtctccactctagctagcgagggaagctatggagagaaaggggttgagagttttacgcagataagcaaagaggccggggggctctgtattgctcagtcagtgcggataccacaagagcgcaaagaccggaccattgacttcgaccgaattatcaagcagcttctagacacaccaaatagccgggccgtggttattttcgccaatgacgaggatatcaaacagattctagcagcagccaagagggccgaccaggtcggccatttcctctgggtgggctcagacagctgggggagcaagatcaaccccctccaccaacacgaggacatcgccgagggagccataacaatccaaccaaagcgggctacggtcgagggtttcgatgcttatttcacctctcgcactttagagaacaataggcgcaacgtctggtttgccgaatattgggaagagaattttaattgtaaactgactatctccggcagtaaaaaggaggatacggatagaaaatgtaccggacaagagcgtataggcaaagactccaattatgaacaggaagggaaggtccaatttgtcatagatgccgtctacgctatggctcacgccctgcatcacatgaacaaggatttatgcgctgactaccgcggcgtgtgcccagagatggagcaggctggaggtaaaaagttgctgaaatacattcgtaatgtgaattttaacggatctgccggcacgccggtgatgttcaacaagaacggggatgcgcccgggcgatatgatatttttcagtatcagactacaaatacttccaacccagggtaccgactgataggtcaatggaccgacgaattacagttgaatatcgaggacatgcaatggggcaaaggggttcgagagattccagcttctgtgtgcactctgccatgcaaacccgggcagcgcaaaaagacccagaaaggaaccccttgttgttggacttgtgagccctgtgatggttaccagtaccagttcgacgagatgacatgccagcattgtccatacgaccagcgtcccaacgagaataggactggctgccaggatatcccaatcatcaagctggagtggcattccccctgggccgtgataccagtcttcctggctatgctgggaattatcgctaccatattcgtgatggctactttcatacgttacaacgacacccccatagtaagagctagcggccgagagctttcgtacgtgttactgactggcattttcctgtgctatataatcaccttcctcatgattgcaaagccagacgtggctgtgtgttcctttcgccgtgtattcctgggacttgggatgtgcatcagctatgccgcactcttgacaaaaacaaacaggatctaccggattttcgagcagggcaagaaatcggtgaccgcgcccagactgatctctcccacttctcaacttgccatcacgtctagcctcattagcgttcagctgctgggtgtgttcatctggtttggtgtcgacccaccaaacattatcatcgattacgacgagcataagaccatgaaccccgagcaggccaggggagtgctcaaatgcgacattaccgatttgcaaatcatatgctccctgggatacagcattctcctgatggtgacatgcacagtttacgcaatcaagacacgtggagtgccagagaatttcaacgaggctaagccaattggcttcacaatgtatactacgtgtatcgtgtggctggccttcattccgattttttttggcacggcacagtctgcagaaaagctgtacatccagaccactactcttactatctccatgaacctgagcgccagtgtcgctcttgggatgctctacatgccaaaggtgtatataatcatctttcatcccgagctgaacgtgcagaaacgtaagagatcgttcaaagccgtggtcactgctgccactatgtcaagtagactgtcccataagccctcggaccggccaaacggtgaggctaagaccgagctttgcgaaaacgttgatccaaacatctttttttttgggtgcacagtggagctgggcctccactttaaactcacatttagcagaaaccagagcaatctgtag

SEQ ID NO: 189409 - DNA, 2727 bp, synthetic construct
  misc_feature 1..2727: note = Description of Artificial Sequence: Synthetic coding sequence
  source 1..2727: mol_type = other DNA
atggtgtgcgagggcaagcggagcgccagctgcccctgcttcttcctgctgactgctaagttctattggatcctcacaatgatgcagagaacccactcccaagagtacgcacacagcatcagggtggacggcgacatcattcttggcggtttgttccccgtacatgctaagggagagcgcggggtgccatgcggcgagctcaagaaagagaaaggaatccaccgcctggaagcgatgctctatgcgatcgaccagattaataaggaccccgatctcctaagcaacatcaccctgggagtcagaatcttagatacctgctcacgcgacacttacgctctcgaacaaagcctgaccttcgtgcaggcgttgatcgaaaaggatgcttccgatgtcaagtgcgcaaatggcgaccccccaatcttcacaaaacctgacaaaatcagtggggtgataggagcagccgcctcgagcgtatctataatggtagccaacatcctgagactgttcaagataccccagattagttacgcttcaaccgcccccgaactgagcgataatacccgctacgacttcttcagtagggttgtgcctcctgacagctaccaggcccaggcgatggttgacattgtcactgcattgggttggaattatgttagcacattagcctcagaggggaactatggggaatcgggcgtcgaggctttcacacagatcagccgcgagattggaggcgtctgtattgcacaaagccagaagatccccagggagcccagacctggcgagtttgaaaagataattaaacggctgctcgagactcctaatgccagggccgtgatcatgttcgccaacgaggacgacattaggagaatcctggaagccgccaagaaactgaatcaatccggtcacttcttatggattgggtccgactcatggggcagtaagatcgcacctgtgtaccagcaggaggaaattgcggaaggtgctgtaactatcctgccgaagagggcctccattgacggtttcgatcgatattttagatcgcggaccctggccaataaccggcggaatgtgtggtttgccgagttctgggaagagaattttggctgcaaactcggttctcacggcaagcgtaacagccacattaagaagtgtactggcttggagcgcatcgcgcgagattctagctatgagcaggaaggcaaagttcagtttgtcatcgatgctgtgtactctatggcctatgcattgcacaacatgcataaggacctgtgcccaggctatatcgggctgtgcccgcggatgagtaccatcgacggcaaagagctgctcggatacattcgagcggtcaacttcaatggctccgctggtacccccgtcaccttcaatgagaacggtgatgcaccagggcgatatgatatttttcagtaccagataactaacaagagcaccgaatataaggttattggtcactggactaaccagctgcatttgaaggtagaggacatgcagtgggcacaccgggagcacacacaccctgccagtgtttgctcacttccttgtaaacctggagagcggaagaagaccgtcaagggcgtgccatgttgctggcattgcgaacggtgtgagggctacaactaccaggtcgacgagctgtcgtgtgagctgtgcccattagaccagcgacctaacatgaaccgcacagggtgtcaactgattcccataatcaagctggagtggcactccccatgggccgtggtgcccgtgttcgttgcaatcctgggtatcattgccaccacttttgtcatcgtgactttcgttaggtataatgacacaccaatcgttagggcatctggtcgcgaactctcatatgtgctgctcaccggtatcttcttatgctactccattactttccttatgattgccgcacctgatactattatctgctcctttcgaagagttttcctcggcctcggcatgtgtttttcctacgctgccctgctgacaaagactaatcggattcataggatctttgagcagggcaaaaaatccgtcaccgcccccaaattcatcagtccggccagtcaactggtcattacgttctctcttatcagtgtgcagcttttgggggtattcgtttggttcgtggtggatcccccacacattataattgattacggtgaacaacgaactttggaccccgagaaggccaggggggtgttgaagtgtgacatttccgacttgtctctgatttgctccttagggtactccatcttgctcatggtcacctgtacggtttacgctattaaaacccggggagtgcccgaaactttcaatgaagccaagccgatcggattcaccatgtacactacgtgtataatatggttagcattcatccctatctttttcggcactgcacagtcagctgaaaagatgtatatccagacgacaactctgacggtaagcatgtcactctccgcttccgtttctctcgggatgctttacatgcctaaagtctatataataatcttccacccagagcaaaatgtccagaagcggaaacgttccttcaaggcagtagtgaccgctgcaacgatgcagtcaaaattgatccagaagggaaacgaccgccccaatggtgaagttaagtctgaactttgtgagtccctggagacaaacacatcctccaccaagactacctacatctcttatagtaaccactctatttag

SEQ ID NO: 189410 - DNA, 2727 bp, synthetic construct
  misc_feature 1..2727: note = Description of Artificial Sequence: Synthetic coding sequence
  source 1..2727: mol_type = other DNA
atggtgtgcgagggcaagcggagcgccagctgcccctgcttcttcctgcttacagctaagttttattggatcctcaccatgatgcaacgaactcacagccaggagtatgcgcatagcatccgcgttgacggcgatatcattctgggcggtttattccccgtgcacgccaagggagagaggggggtgccatgcggggaactgaaaaaagagaagggaatacaccggttagaggctatgttatacgcaatcgaccaaatcaacaaggaccctgacctcctcagcaatataacactaggcgtccgaatcttagatacttgttcccgtgatacctacgcactcgagcagagcctgacatttgtgcaggccttgatcgaaaaggacgcgtcagacgtgaagtgtgcaaatggggacccacccattttcaccaaaccagacaaaatatccggggtgatcggcgccgctgcttctagtgtctccatcatggtcgcgaacattctgaggctgtttaaaatcccccagatctcatatgcatctacagcccccgaactgtccgacaacacaagatatgacttcttctctagagtcgtgcctcctgactcctatcaggcccaggcaatggtggacatcgtcaccgccctcggctggaattatgtgtccacattggccagcgaaggcaactatggagagtcaggcgtggaagcatttacacaaattagccgggagattggaggagtgtgcatagcacaaagccaaaagatcccaagagagcccagacccggcgaatttgaaaagataatcaaacgcctgctcgagacacctaacgcccgggctgtcataatgtttgcaaatgaggacgacattcggcgcatccttgaggcggctaagaaactgaatcagagcggacattttctctggataggaagcgacagttggggctcaaaaatcgccccagtctaccagcaagaggaaatagccgagggcgcagttacaatcctgccaaaacgcgcctcaattgatggttttgaccgctatttccgctcaaggacactggccaacaaccgtcgaaatgtctggtttgctgaattttgggaggagaatttcggctgcaagctaggcagtcatggaaaacgtaactcacatatcaagaagtgcactggactggaacgcatcgccagagactcaagctacgagcaggaggggaaagttcagtttgtgatagatgccgtatactccatggcttacgcgctgcataatatgcacaaagatctgtgtccaggttatattggtctgtgtccaagaatgtctacgatcgacgggaaagaactgctggggtacattcgcgccgtgaatttcaacgggtccgcaggtacccctgtcactttcaatgaaaatggagacgccccaggtaggtatgatattttccagtaccagataaccaataagagcaccgagtataaggtaatcggacactggaccaatcagttgcatctgaaagtggaagatatgcagtgggcccacagagaacatactcacccagcttctgtgtgtagcttaccctgcaagccaggagagaggaagaaaactgtgaaaggtgttccttgctgttggcattgcgaacggtgcgagggctacaactaccaggttgacgaacttagctgtgaattgtgcccattagaccaaaggccgaacatgaacaggaccggatgccagctgatacccattatcaagctagaatggcattctccatgggcagtcgtgcccgtgttcgtggccatccttgggatcatcgctactacatttgttattgtcaccttcgtccggtacaacgacacacccatcgtgagggccagtggcagggagctcagctatgtactgctgactggcattttcctttgctactctatcacgtttttgatgatcgccgcaccagatacaataatttgttcttttaggagggttttcttaggattaggaatgtgcttctcgtacgcggcactcctgacaaagacaaataggatacatcggatttttgagcaaggcaaaaagtcagttaccgcaccaaagtttatttccccggcttcgcagctggtaatcacctttagcttaatttccgttcagcttctcggggtctttgtctggtttgtcgtcgaccctccccacatcataattgattacggcgaacagagaacgctggatcccgagaaggcacgcggagtactgaaatgcgacatctctgacctctctcttatctgcagtcttgggtatagtatcctcctcatggttacgtgcacagtctatgctatcaagacccggggcgtcccagaaacatttaacgaagcaaaacccatcggattcacaatgtataccacctgcattatctggctagccttcattcctattttcttcggaaccgcacagtccgcagaaaagatgtatattcagaccacaacattgacggtttcaatgtcactttccgcttccgtgtccctgggtatgctatacatgccaaaagtctacatcatcatctttcacccagagcagaacgtgcaaaaaagaaagcggtcctttaaggccgtggtgaccgcagcgaccatgcagagcaaactcatccaaaaggggaatgaccgaccaaacggtgaggtgaaaagcgagctgtgtgagtcattggagacaaactcaaagtcaagtgtggaattccctatggtgaagagtggcagtacctcatag

SEQ ID NO: 189411 - DNA, 1506 bp, synthetic construct
  misc_feature 1..1506: note = Description of Artificial Sequence: Synthetic coding sequence
  source 1..1506: mol_type = other DNA
atggtgtgcgagggcaagcggagcgccagctgcccctgcttcttcttactgacagctaagttctactggatcctcaccatgatgcaacgtacccactcccaggagtacgcccactctatacgggtagatggtgatattattctcggaggtctttttcccgtccatgcgaagggtgagcggggcgttccgtgtggagagctgaagaaggaaaagggtattcataggctcgaggccatgctgtatgccatcgatcagatcaacaaagatcccgatctcctgtccaacatcacactcggagtgaggatcctggacacctgctcacgggacacctacgccttagagcagagtctgacctttgtgcaagctctgatcgagaaggacgcatcagacgttaagtgcgctaacggtgacccccccatctttacaaagccagacaagatcagcggagtgataggggccgccgcgtcttcagtgagcatcatggttgccaacatcctgcgactgttcaaaattcctcagataagctacgcttcaacagcccccgagctgagcgacaatacccgctatgacttcttttctcgagttgtcccccctgacagctaccaggcccaagccatggtcgatatcgtaacagctctagggtggaattatgtctcaactctagcttcagagggcaactacggggagtccggggtggaagcatttacgcaaatttctcgcgagattggaggggtgtgcatagctcagagccagaagatccccagggaacccagacccggagagttcgagaagatcattaaaagactgctcgagaccccgaatgcccgagccgtaatcatgtttgccaatgaagatgatataagaagaattctcgaagcggccaagaagcttaaccagtcaggccatttcctgtggatcgggtctgattcttggggtagtaagatcgccccagtgtatcagcaggaagaaattgctgagggcgccgtgaccattctccctaaaagagccagtatcgacggatttgatcgatattttcggtctcgcaccctagcgaataatcggagaaatgtttggtttgctgagttttgggaggagaacttcgggtgcaagttgggatcacacgggaaacgtaacagtcatatcaaaaaatgtactggattagagcggatcgcacgcgacagctcctacgagcaggaggggaaggtgcagtttgtgattgatgctgtgtactctatggcctacgctctccataacatgcacaaagatctgtgccctggatacataggtctgtgtccacgcatgtcaaccattgatggaaaagaacttttgggctatatccgcgcagttaatttcaacggatgtagacgcggaatccagatgagcctgccttggccaactttatttactccctccttctcatcttcctgggcggtcctcgccctcctgtccctgctgatgaaaacagaaatgttacttgatgtgatgatttcatccagcatcaaatag

SEQ ID NO: 189412 - DNA, 63 bp, synthetic construct
  misc_feature 1..63: note = Description of Artificial Sequence: Synthetic coding sequence
  source 1..63: mol_type = other DNA
atggtgtgcgagggcaagcggagcgccagctgcccctgcttcttcctgctgaccgccaagtag

SEQ ID NO: 189413 - DNA, 2727 bp, synthetic construct
  misc_feature 1..2727: note = Description of Artificial Sequence: Synthetic coding sequence
  source 1..2727: mol_type = other DNA
atggtgtgcgagggcaagcggagcgccagctgcccctgcttcttcttgcttacagccaaattctattggatattgaccatgatgcaaagaacccatagccaggaatatgcgcattccatcagggttgacggggacataatcctgggcggacttttccccgtgcatgctaagggggagcgcggcgtgccctgtggcgagctgaaaaaggaaaagggcatccatagattggaggctatgctgtacgctattgatcagataaacaaggaccctgatctgctgtccaatatcacccttggcgttaggattctcgatacctgctcccgtgacacatacgctttagagcagtccttaacttttgtccaagcactcattgaaaaggacgccagtgacgtgaaatgtgcaaacggcgatcccccaatcttcacgaagcctgacaagatttcaggagtgattggggccgccgcctcttcagtgtccatcatggtggcaaatattttgcggctgttcaagataccccagatttcctatgccagcaccgcaccagagctttcggacaatacacggtacgacttcttctcccgggtggtacctccggactcatatcaggcgcaagcgatggtggacatcgtcaccgccctcggctggaattacgtgtcgacacttgcctccgagggcaactacggggagagcggagtggaagcatttactcaaatatctcgggagatcggaggggtctgtattgcccagtcgcaaaagattccaagagagccccggcctggggagtttgaaaagattattaaacggctcctggaaactcctaacgcccgtgctgtgataatgttcgcaaatgaggatgacattcggaggatcttagaggccgctaagaagcttaaccagtctggccacttcctgtggattggatcagattcatggggaagtaagatcgcccccgtttatcagcaagaggagatcgcggagggagccgtgactatcctgcctaagcgagcgagtattgacggattcgatcgctattttaggagtaggaccttggccaacaaccgacgaaatgtctggttcgcagaattctgggaagagaacttcgggtgtaagctaggtagccacggtaagaggaatagccacatcaagaaatgtacaggattggaaagaatagccagagactctagttatgaacaggaaggcaaggtccaatttgtgattgatgcagtgtactccatggcgtatgccctgcataacatgcataaggacctctgtccaggctacattgggctgtgtcctcgcatgtcgacaatcgatggcaaagaactcttagggtatattcgggcagttaacttcaacggatccgccgggacaccagtgacatttaatgaaaatggcgatgcacctggcagatacgatatttttcagtaccaaattacgaataaaagcacagagtataaagtcatcgggcattggacaaaccaactccacctcaaagtcgaagacatgcagtgggcacatcgcgagcacacccatcccgcaagtgtgtgttccttgccatgcaaacccggcgagcgcaaaaagaccgtcaaaggggtgccttgctgctggcattgcgagcgctgcgaaggatataattaccaagtggacgagctgtcttgcgaactctgtcctctggatcaaaggccaaatatgaaccgcaccggttgtcagctgattcctatcatcaagctggaatggcactcaccttgggccgtggttcccgtgtttgtcgcgattctgggcattattgccacgacctttgtgatcgtgacgtttgtccggtataacgatactcccatagtccgggcatcaggtcgggagctttcttatgtcttactgacgggtatctttttgtgttactcaattacattccttatgattgcagctccggacacaatcatctgtagctttaggagggtgtttctcggtctggggatgtgcttcagttacgcggccctgctgaccaagacaaacaggatccatcgaatctttgaacaaggcaaaaagtctgtgaccgcgcctaaatttataagccccgcctcacaactggtgattacatttagcctaatttctgtgcagctactgggagtcttcgtgtggttcgtggtggatcctccccacataattatcgactacggtgagcagaggaccttagatcctgagaaggctaggggagtcctgaagtgcgatatcagtgacctgagtctgatctgctctctgggctacagcattctcctgatggtgacgtgcaccgtctacgccataaaaaccaggggggtgcccgaaacctttaacgaagctaaaccaattggattcacgatgtacacgacctgcatcatctggctggccttcatcccaattttctttggcactgctcaaagtgccgaaaaaatgtacatccagactacaacacttacagtgtccatgtcactgagcgcctcggtatctcttgggatgctctacatgcccaaagtttatatcattattttccatccggagcagaatgtgcagaaaaggaagcggagcttcaaggccgttgtgacagccgccaccatgcagtctaaacttattcagaagggcaacgaccggcctaatggagaagtgaagagtgagctgtgcgagtctctggagaccaacacttccagtactaagaccacttacatttcgtattcaaatcactcaatctag

SEQ ID NO: 189414 - DNA, 885 bp, synthetic construct
  misc_feature 1..885: note = Description of Artificial Sequence: Synthetic coding sequence
  source 1..885: mol_type = other DNA
atggtgtgcgagggcaagcggagcgccagctgcccctgcttcttcctgcttaccgctaagttttactggatccttacaatgatgcagcgcacacatagtcaggagtatgctcactctattcgtgttgacggggatattatcctcggggggttattcccagtgcacgcaaaaggggaacggggcgtgccatgcggggagctcaagaaggaaaaggggatccaccggcttgaggcaatgctgtatgccattgaccagattaacaaggacccagatcttttaagtaacatcactctgggcgtacgcattctcgatacctgttcacgcgatacctacgctctggagcagagccttaccttcgtacaggcactcatcgaaaaggacgcatctgacgtcaagtgcgccaacggagatccgccgattttcacaaagcctgataaaatctctggcgtaattggcgccgcagcctcgtccgtgtctatcatggttgctaatatcctgcgcctattcaaaattcctcagatatcctatgcgtcaaccgcaccagagttatcggacaacacccgatacgatttttttagtagagtggtacctcctgactcgtatcaagctcaggccatggttgatattgtaacggccttggggtggaattacgtttcaactctagcaagcgaaggaaattacggagaatcgggggtggaagcatttacgcagataagtagggaaattgggggtgtctgtatcgctcagtcccagaagattcccagggagccaaggcccggagaatttgagaagatcatcaagcgcctcttggagacgccaaacgcccgagctgtgattatgttcgcaaacgaagacgacattcggaggatcctcgaggccgcatag

SEQ ID NO: 189415 - DNA, 1122 bp, synthetic construct
  misc_feature 1..1122: note = Description of Artificial Sequence: Synthetic coding sequence
  source 1..1122: mol_type = other DNA
atgaccaccagcgccagcagccacctgaacaagggcatcaagcaggtttatatgtccctgccccagggcgagaaagtgcaggctatgtacatttggattgacggcactggggaaggcctacgatgtaagaccaggactcttgactctgagcccaagtgtgtcgaagaactgccagagtggaatttcgatggctcctcaacattgcagtctgagggctctaactccgacatgtacttagtgccagccgcaatgttcagagatccgtttcgtaaggatcccaataagctggtcctttgcgaggtgtttaaatacaacagaagacccgctgaaacaaatcttcggcacacatgtaaaagaataatggacatggtcagcaaccagcatccttggtttggcatggaacaggaatatactttaatgggtacggacggacacccctttggatggccttctaatggattccccgggccccaaggaccctactactgcggggtcggggccgacagggcttacggtagggatattgttgaagctcactaccgtgcctgtctctacgccggtgtgaaaattgcagggactaacgccgaggtgatgccagcacaatgggaattccagattggaccttgcgaggggatttccatgggcgatcatctgtgggttgcccggttcattttgcaccgcgtctgtgaggattttggcgtgatcgctacttttgatccaaagcctattccggggaattggaatggagccggctgccacacgaacttttctactaaggctatgcgcgaggaaaacggtctcaaatacatagaagaggcgattgagaagctctcgaaacggcaccagtatcacatccgcgcctacgaccctaaaggggggcttgacaatgcccgaaggctgactggcttccatgagacgtcaaatattaatgacttctccgccggcgtagccaatagaagtgccagcatcagaatccccagaacggttgggcaggagaagaaaggatactttgaggaccgtcggcctagtgcgaactgcgaccccttcagtgtaaccgaagcgttgataagaacctgtctgttgaatgaaaccggcgatgagccatttcagtacaaaaattag

SEQ ID NO: 189416 - DNA, 1122 bp, synthetic construct
  misc_feature 1..1122: note = Description of Artificial Sequence: Synthetic coding sequence
  source 1..1122: mol_type = other DNA
atgaccaccagcgccagcagccacctgaacaagggcatcaagcaggtttacatgtcactgcctcagggagaaaaagttcaagccatgtacatttggatcgacggaactggtgaaggattgcggtgtaaaactcgaactctggatagcgagccaaagtgtgtggaagagttacccgagtggaatttcgatggcagctccacactccagtcagagggatctaacagcgatatgtatcttgtccctgcagccatgtttcgcgatcccttccgtaaagatcctaataagctggttctgtgtgaagtgtttaaatacaaccggaggccagcggaaaccaacttgcgccacacatgtaagaggattatggatatggtgagcaaccagcacccttggtttggaatggagcaggagtacacgctgatgggtacagacggacatccatttggttggccaagtaatggcttccccggccctcagggcccctactactgtggcgttggtgcagacagagcatatggccgagacattgtagaggcacattaccgggcctgcttgtacgctggggtgaagattgccgggaccaacgcagaggttatgcccgcccagtgggagtttcagatcggtccctgcgaagggattagtatgggcgatcacttatgggtggcacgcttcattctgcaccgcgtatgtgaggactttggtgtaatcgctacgtttgacccaaaacctattcccggcaattggaatggtgcaggttgccacacaaacttttctacgaaggctatgcgtgaagagaacgggcttaaatatatagaggaagcgatcgagaagctgtcaaagcggcatcagtaccatatccgagcttacgaccccaagggcggcttagataatgcgcggcgcttgacaggattccatgagacctcgaacataaacgatttttctgccggagtcgctaatagatctgcttccatccgtattcctagaactgtcggtcaggaaaaaaagggctatttcgaggatcgtcgaccctccgcaaattgcgatcccttcagcgtgaccgaagctttgattagaacttgtttgcttaacgagacgggcgacgaaccattccagtacaagaattag

SEQ ID NO: 189417 - DNA, 1122 bp, synthetic construct
  misc_feature 1..1122: note = Description of Artificial Sequence: Synthetic coding sequence
  source 1..1122: mol_type = other DNA
atgaccaccagcgccagcagccacctgaacaagggcatcaagcaggtgtacatgtcgttgccccagggagaaaaggtacaagccatgtatatatggattgatgggacaggcgagggccttcgctgcaaaacaaggacactggacagcgagccaaaatgcgtggaagaattgccggagtggaatttcgatgggagctctaccctgcagtccgagggatccaactctgatatgtacttagttcccgccgccatgtttcgggatccgttccggaaagatcccaataaactggtcctgtgtgaggtgttcaagtataatcgtaggcccgcggaaaccaacctccgacatacctgcaagcgcattatggatatggtgagtaatcaacatccctggttcggaatggaacaagagtacaccttgatgggtactgatggtcaccctttcggatggccaagcaatggtttcccaggccctcagggtccctattactgtggcgttggggcagatcgggcgtacggtcgtgatattgttgaggcacattatagagcatgcctctacgctggtgtcaaaatcgctggtacaaacgcagaggtaatgccagctcagtgggaattccagattggcccatgtgagggaatatctatgggagaccatctttgggtcgccagatttatccttcaccgggtttgcgaggactttggcgtcattgccaccttcgatccgaagccaatccccggaaactggaatggggctggctgtcatacgaattttagcacaaaagcaatgagggaagagaacgggctgaagtacatcgaagaggccatagagaaattaagcaagagacaccagtatcacattagagcctatgatcccaaggggggactcgataacgctaggcgcctcactggcttccacgagacttctaatattaacgacttttcagctggggtcgcgaaccgcagcgcctccattcgtattccaagaacggtcggacaagaaaagaaaggatattttgaggaccgaaggccttcagctaattgcgatcctttttctgtaacagaggccctgatccgcacctgtcttttgaacgagacaggcgacgagcctttccagtacaagaattag

SEQ ID NO: 189418 - DNA, 1122 bp, synthetic construct
  misc_feature 1..1122: note = Description of Artificial Sequence: Synthetic coding sequence
  source 1..1122: mol_type = other DNA
atgaccaccagcgccagcagccacctgaacaagggcatcaagcaggtctatatgtctctccctcagggcgaaaaagtacaggcaatgtacatttggatagacggcactggagaaggactgaggtgcaagacccgtacactcgacagtgaacccaaatgtgtggaagagctgccggaatggaatttcgatgggtcttccaccctgcaatcagagggctcaaatagcgacatgtatctggttccggccgccatgttcagagatcctttcagaaaagatcccaacaaactggttctttgtgaagtgtttaagtacaatcggcggccagccgagaccaatctgaggcatacgtgcaaaagaatcatggatatggtgtccaaccagcatccctggtttggcatggaacaggagtacactcttatgggtacagacggacacccctttgggtggccgtcaaatggtttcccgggaccccagggaccttactattgcggggtgggagcagaccgcgcttacggtagggatatagtagaggctcactatcgagcttgtttgtatgccggagtgaagatcgccgggaccaatgccgaggttatgccggcgcagtgggaattccagattggtccgtgcgaggggatttctatgggcgaccacctctgggtggcacgattcatcctccacagggtgtgtgaggatttcggggttatcgccaccttcgatcctaaaccaatcccgggaaactggaatggcgccggttgtcacacgaatttcagtaccaaagcgatgcgagaagaaaatggtttgaagtacatcgaggaagctatcgaaaagctctcgaagcggcatcagtatcacatccgagcttacgaccctaaaggaggcctcgataatgctcggagactcacaggtttccacgaaacctccaacataaacgactttagtgccggggtggctaatcggtctgcttccatccggattccaagaaccgtgggccaggagaagaagggctatttcgaggacaggcggccctccgcaaactgcgaccccttctccgtcaccgaggccttgatcaggacttgccttttgaacgaaacaggcgatgagccctttcagtacaagaactag

SEQ ID NO: 189419 - DNA, 702 bp, synthetic construct
  misc_feature 1..702: note = Description of Artificial Sequence: Synthetic coding sequence
  source 1..702: mol_type = other DNA
atgaccaccagcgccagcagccacctgaacaagggcatcaagcaggtttatatgtcgctgccacagggggagaaagttcaggctatgtatatttggatcgacgggaccggcgaaggcttacgttgtaagacacgcacactggactccgagccaaagtgcgtggaagagttacctgagtggaacttcgatggatcatcaactctgcagagtgagggaagcaacagtgatatgtacctcgtgcccgctgccatgttcagggatcctttcaggaaggatcccaacaagctggtgctctgtgaggtgttcaagtataacagaagaccggcagagacaaacttgaggcatacctgtaagagaatcatggatatggtctctaaccaacatccttggtttggtatggagcaggaatacaccttgatgggcaccgatggacacccttttggttggccatctaacggtttccagggaccccgagtgcatatcactgtggtgtgggaacagacagagccaatggctggtacctcctggaggcctatcacgggcccagcatgcatgcttgaatcacggctgagaggactaatgccgagatcatgccttccatcaggaaatttcagacttgacctcgtcaaagagtccgcctgggaaataatctcaggctggcctgtctctagctgtattgtctgcgtgaagacgctcgaatag

SEQ ID NO: 189420 - DNA, 678 bp, synthetic construct
  misc_feature 1..678: note = Description of Artificial Sequence: Synthetic coding sequence
  source 1..678: mol_type = other DNA
atggaccagcaggccatctacgccgagctgaacctgcccaccgactctgggcccgaatcttcaagtccaagctcacttcctcgggatgtctgccagggctcaccatggcaccagttcgctttgaagctcagctgtgccggcattattctgttggtgctcgtggtaacaggactgagcgtgagtgtgacgtcacttatacagaagtcctcaattgagaagtgcagtgttgacattcagcagagtaggaacaagactactgagcgacccggcctcctaaactgccctatttattggcagcagctccgcgagaaatgtctgctgttctcccataccgtcaacccgtggaacaacagtctcgccgactgttccaccaaggagagcagcctgttgctgatcagagataaggatgagctgatccatacacaaaatctgatccgtgataaggccattctcttttggataggactcaatttttcgctgagtgagaaaaactggaagtggatcaacggctcatttctcaacagcaatgacctggagataaggggggacgccaaagaaaactcttgtattagcattagtcagacctccgtctattcagagtactgttcaaccgagataaggtggatctgccaaaaggagctgactccagtgaggaacaaagtgtacccggattcctag

SEQ ID NO: 189421 - DNA, 825 bp, synthetic construct
  misc_feature 1..825: note = Description of Artificial Sequence: Synthetic coding sequence
  source 1..825: mol_type = other DNA
atgggcaccgacagccgggccgccaaggccctgctggcccgggcccggacactccacttacaaaccggcaacttgctcaactggggtcgcctgagaaagaagtgtccatccactcacagtgaggaactgcatgactgtattcagaaaacactgaatgagtggtcttctcagataaaccccgatctcgtgcgtgaatttcccgatgttcttgaatgcacagtgtcccacgccgttgagaagattaacccagatgagcgggaggagatgaaagtgtcagccaagcttttcattgtagaatccaactcaagtagctccactcgaagcgccgttgatatggcctgtagcgtcctgggagtggcccaactggactctgttattatcgcctcaccaccgattgaggatggtgttaatctgtccctggagcacctgcagccatattgggaagagcttgagaacctcgtgcagtccaagaagatcgtggctatcgggacctccgacttggacaagacgcagttggagcaactctaccagtgggctcaggtgaagcctaattctaatcaggtgaatctcgcgagctgttgcgttatgcctccggacttgacagccttcgcaaaacaattcgatatccagctcctgacccacaatgatcctaaagagctcctaagcgaggcaagtttccaggaagccctccaagagtctatcccagatatccaggctcatgagtgggttccactctggctgctgcgatactccgtgatagtgaagtcacgtggcattattaagtccaagggctatatactccaggctaagcgccgggggtcctag

SEQ ID NO: 189422 - DNA, 1341 bp, synthetic construct
  misc_feature 1..1341: note = Description of Artificial Sequence: Synthetic coding sequence
  source 1..1341: mol_type = other DNA
atggccgcccggaagggccggcggcggacctgcgagaccggcgagcccatggaggccgaaagcggtgatacctcatctgaaggtcctgcgcaagtttacctgcctggcaggggccctcctctgagagagggcgaggagctggtgatggatgaggaggcctacgtgctgtatcaccgcgcccaaaccggcgccccctgtttatcctttgatatcgtgagagatcacttaggggacaatcggaccgagctgccgcttacgctgtatctctgcgccggaacacaggcagaaagcgcccaaagtaataggctcatgatgctccggatgcacaatcttcacggcaccaagccacctccctcagaggggtcggatgaggaagaggaggaggaggacgaggaggatgaagaggagagaaagccgcagctggagttggctatggtgccccactacggtggcattaaccgtgtgcgagtctcttggctcggggaggaaccagtggcaggcgtgtggagtgaaaagggtcaggtcgaggtgttcgcgttgagacggctcctgcaggtggtggaagagcctcaggcccttgctgctttcctccgcgacgagcaggcccaaatgaagcctattttttcttttgctgggcacatgggcgaaggctttgctttagactggtctccaagggtaacagggcggctccttaccggcgattgccagaagaacatccacctctggactccgactgatggtggttcttggcatgtcgatcagaggccattcgttggccacacacggtccgtggaggaccttcagtggagccctaccgaaaacacagtatttgcttcctgctccgccgatgcgagtattaggatatgggatatccgagccgcccccagtaaagcctgcatgctgactacggctacagcccatgacggtgatgtcaatgtcattagctggtctcggcgcgaaccattcctgctgtccggaggcgacgatggggcccttaagatttgggacctccgccagttcaagtccggctccccagtggccacctttaagcagcatgttgccccggtcacatccgtggaatggcaccctcaggattctggcgtttttgccgcctccggggccgatcatcagataacccagtgggacctcgctgtcgagagagatccagaggccggggacgttgaggcggacccaggcctagctgatcttccacaacagctgctgtttgtacaccagggggagaccgagcttaaagagttgcactggcacccccaatgtcctggtttgctcgtgagcactgccctgtcagggtttactatctttcggaccatctctgtatag

SEQ ID NO: 189423 - DNA, 1572 bp, synthetic construct
  misc_feature 1..1572: note = Description of Artificial Sequence: Synthetic coding sequence
  source 1..1572: mol_type = other DNA
atgcagcgggccgccgccctggtgcggcggggctgcggcccccggaccccgtctagttgggggcggagccaatcatccgccgccgccgaggcaagtgccgtgctgaaagtgaggcctgagaggtccagaagggaacgcatcctgactctggagagcatgaacccccaggttaaggccgtggagtatgccgtcagagggcccatcgtgttgaaggccggcgagatcgagctggaactgcagaggggcattaagaagccgttcaccgaggtgatcagggctaatattggtgacgctcaggcaatgggacagcagccaatcacatttctgcgtcaggtgatggccctgtgcacatatccaaatctgctggattcaccttcgtttccggaagatgctaagaagcgcgcacgaaggatattgcaggcatgtggtgggaattctctcggatcctattctgcttcacagggggttaactgtatacgtgaagacgtggcagcatacattacacgcagagacggcggagtaccagctgaccctgacaatatttatctgacaaccggtgcaagcgacgggatttctactatcctgaagatactggtgtcaggcggcggcaagtccagaaccggagtgatgatccctattccccagtacccattgtactctgctgtgattagtgaactggatgccatacaggtaaattactatctagacgaggaaaattgttgggccctgaacgtgaatgaactgcgaagagcagtgcaggaggcgaaagatcattgcgaccccaaagttctttgtattattaatccaggaaaccctacaggacaagtgcagtcaagaaagtgcattgaggatgttatccacttcgcctgggaagagaaactgtttttgttggctgacgaggtgtatcaggataacgtatactcaccagattgtagatttcacagttttaaaaaagttctgtacgaaatgggaccagagtacagtagtaacgttgaactggccagctttcactccacttccaagggatatatgggcgaatgcgggtaccgtggggggtacatggaagtgattaatctgcaccccgagatcaaagggcaattggtgaagctactgtccgtcaggctgtgccctcccgtgtctggccaggccgccatggatattgtggtgaaccctcctgtagctggcgaagagtccttcgaacagttcagccgagaaaaggagtcagtgttgggcaatctggcgaaaaaggccaagctcaccgaggatctgttcaaccaggtaccaggaatacactgcaaccccctacagggagctatgtatgcgtttccccgaatttttatccccgcaaaggctgtggaggccgcccaggcacatcaaatggccccagatatgttctattgtatgaaacttctggaagagacgggcatatgtgtggtgcccggctcaggattcggccagagggagggcacataccatttccgaatgaccattttaccaccggtcgagaagctgaaaactgttctccagaaagtcaaagatttccacattaactttctcgagaaatacgcttag

SEQ ID NO: 189424 - DNA, 1272 bp, synthetic construct
  misc_feature 1..1272: note = Description of Artificial Sequence: Synthetic coding sequence
  source 1..1272: mol_type = other DNA
atgggccagcagcccatcaccttcctgcggcaggtgatggccctgtgtacctacccaaatcttctagattcaccaagctttcccgaagatgcgaaaaagagagctaggaggatcctccaggcttgcggcggcaatagccttggctcatacagcgcttctcaaggagtgaattgtatcagagaggatgtggccgcgtatattacacgccgagacggaggcgtacctgccgatcctgataacatctacctaacgactggagcctccgatgggatatcgactatcctgaagatcctggtctctggaggcggcaaaagtcgcaccggagtgatgatcccgattccacaataccccctttacagcgctgtgatcagtgaactcgacgctattcaggtcaattattatcttgatgaagaaaactgttgggcgcttaatgtaaacgaactgcggcgcgctgtgcaggaagctaaggaccactgcgacccaaaggtcttgtgcattatcaaccccgggaatcccacggggcaagtgcagtcccggaaatgcatcgaggatgtaatacactttgcatgggaggagaagctctttctgctcgccgacgaagtctaccaggacaacgtatatagtcctgactgtcgcttccatagctttaagaaggtgctgtatgaaatgggcccggagtatagctccaatgtggaactcgctagctttcactcaacctcaaagggatacatgggcgagtgtggctataggggaggatatatggaagtgattaatcttcaccccgagataaagggccagcttgtgaagttgctgtctgtgagactgtgtccccctgtaagcggccaagccgccatggatattgtggtcaaccctcctgtggctggagaggagtccttcgagcaattctcacgtgagaaggagtcagtgctgggaaacttagcaaagaaggctaagctgactgaggacctatttaaccaggtgcccggtatccattgtaacccattacagggagctatgtacgccttcccgcgcatcttcattccagccaaagcagtggaagccgcccaggcccaccagatggcacccgacatgttttattgcatgaaactgctggaggagaccggcatttgcgtagtacccggcagcggcttcggacagagggagggcacctaccatttcagaatgactatattaccccctgtcgagaagttgaagaccgttctccagaaagtcaaggactttcacatcaacttcctcgaaaaatatgcttag

SEQ ID NO: 189425 - DNA, 1242 bp, synthetic construct
  misc_feature 1..1242: note = Description of Artificial Sequence: Synthetic coding sequence
  source 1..1242: mol_type = other DNA
atggccccccccagcgtgttcgccgaggtgccccaggcccagcccgtgcttgtgttcaagctgacagccgattttcgcgaggatcccgacccgagaaaagtcaatttgggagtcggggcctaccggaccgacgactgccatccttgggtgctgccagtggtgaaaaaggttgagcagaagatagccaatgacaactcgctcaatcacgaatacctgccgattcttggcttggccgagtttagaagctgtgcttccagacttgcccttggcgatgatagtcccgcccttaaggagaagagggtcggcggcgttcagagtctgggcgggacaggtgccctccgcattggggcagactttctggcaaggtggtacaacggaacgaacaataagaatacccctgtgtatgtctcatccccaacatgggagaaccataacgcagtgttctcagcagcgggattcaaagacatacggtcatataggtactgggatgcagagaaacgcggtctggacttacaaggattcctcaacgacttagagaatgctcctgagttttctatagtggtgctgcatgcgtgcgcccacaatccgaccgggattgaccccactcccgaacagtggaaacagatcgcctcagttatgaaacacaggttcctttttcctttttttgattccgcctaccaggggtttgcctctggcaacctggaacgcgatgcctgggctattcgttatttcgtctccgaagggtttgagtttttctgcgctcagtctttcagtaaaaattttgggttgtataatgaacgcgtaggcaacctgacggtggtcggcaaagagccggaaagtatcctgcaagtgttatcccaaatggaaaagatagtcaggatcacttggtctaacccacccgcccagggagcgagaatcgtggcctctaccttatctaatccggaactgtttgaagaatggaccgggaatgttaaaacgatggctgatcgcattctcaccatgagatcggagctgagggctcggctggaagcactgaaaactccaggaacttggaaccatataaccgaccagattggaatgttttcctttaccggcctgaatccaaagcaagtggagtatttagtgaatgagaagcatatctatctcttgccgagcggccggatcaatgtgtcaggcttgaccactaaaaacctcgattacgtcgccacgagcattcatgaagccgtcacaaaaattcagtag

SEQ ID NO: 189426 - DNA, 1101 bp, synthetic construct
  misc_feature 1..1101: note = Description of Artificial Sequence: Synthetic coding sequence
  source 1..1101: mol_type = other DNA
atggccccccccagcgtgttcgccgaggtgccccaggcccagcccgtactggtctttaagctgactgcggactttagggaagatcctgatcctagaaaagtcaacctcggggtcggcgcctatagaaccgatgattcccccgccctaaaggaaaagcgggtgggaggggtgcagtcactcggaggcacgggagctttaaggattggagcagattttttagcgcgttggtacaacgggacaaacaataagaacaccccggtgtacgtctcatcaccaacatgggaaaatcacaacgctgtgttcagtgccgcaggcttcaaggatatacgaagttacagatactgggatgccgaaaaacgcggtctcgacctccagggctttctcaatgacctggaaaatgcccccgagttcagcattgtagtcttgcacgcctgtgcacataacccgacaggcatcgatccgacgcctgaacaatggaagcagattgcctcagtgatgaaacatcgttttctgttcccatttttcgattccgcataccagggtttcgcgagcgggaacttggagcgggatgcttgggccatacggtacttcgttagcgagggtttcgagttcttctgcgcccagtctttctcaaagaactttggactctacaatgagagagtcggaaatctgaccgtagttgggaaggaacccgaatccatcttgcaggttctgagtcagatggaaaaaattgtcagaatcacttggagtaaccctcccgcccagggagcccgcatagttgcctctactctgtcgaatcccgaattgtttgaggaatggacgggcaacgttaagacgatggccgatcgcatactcacaatgcgcagtgaactgagggcccggctggaggccctcaagaccccaggcacgtggaatcacatcactgaccagattgggatgtttagttttacaggcctaaaccctaaacaggtagaatatctcgtgaatgagaagcacatctacttattgccctccggaaggataaacgtctctgggctcaccactaagaatctggattatgtcgctacctctatccatgaagccgtgacgaaaatccaatag

SEQ ID NO: 189427 - DNA, 1179 bp, synthetic construct
  misc_feature 1..1179: note = Description of Artificial Sequence: Synthetic coding sequence
  source 1..1179: mol_type = other DNA
atgcaggtgtggagcccctggaagggcgccatgtgcccccggccccacaaaccagcctaccggaccgacgattgccacccatgggtattgcctgtggtgaaaaaagttgagcagaaaatcgccaatgataactcacttaatcacgagtatctcccgatactggggcttgccgaatttcggtcctgcgcctcaagactcgccctcggtgatgactctcccgcactcaaggaaaaacgtgtaggcggcgttcagagccttggcggcacaggagctctcaggataggagccgactttctcgcacgctggtacaatggcacgaacaacaaaaacacgcccgtgtacgttagtagtccgacatgggagaaccacaatgcagtgttcagtgccgcaggatttaaagatatccggagctacagatattgggacgcggagaaacgcgggctggatctgcagggcttcctgaacgacctggagaatgcgccagaattctccatcgtggttcttcatgcatgcgcacacaaccccaccggcattgatcccacccccgaacagtggaaacagatcgcctctgtgatgaagcaccggttcttatttcctttctttgacagtgcttaccagggatttgcgtcaggcaacctggaaagagacgcgtgggctatccgttactttgtttctgaaggatttgaattcttctgcgcccagtcgttcagcaaaaacttcggactttataatgaacgggtgggaaacctgaccgtagtgggaaaggagcccgaatcgattctgcaggtcctgtctcagatggaaaaaattgtaagaattacctggtccaaccccccagcccaaggcgcccgtatcgtagccagcactctctctaatcccgagcttttcgaagaatggactggtaatgtgaaaactatggctgatcgaattttgactatgaggtccgaattacgcgcgagattagaggccttgaagacgcccggaacctggaaccatataaccgaccaaatcggcatgttctcttttacaggactcaacccaaaacaggtcgagtatcttgtgaacgaaaagcacatctacctgctcccaagcgggagaattaacgtcagcggcctcaccaccaagaacctggattatgtggctacatccattcatgaggccgtcactaagatccagtag

SEQ ID NO: 189428 - DNA, 1293 bp, synthetic construct
  misc_feature 1..1293: note = Description of Artificial Sequence: Synthetic coding sequence
  source 1..1293: mol_type = other DNA
atggccctgctgcacagcggccgggtgctgcccggcatcgccgccgccttccatccagggctagctgccgccgctagtgccagagctagttcgtggtggacacacgtggaaatgggtccacccgatcccattctcggcgttactgaggcattcaaaagagacacgaacagcaagaagatgaacctaggggtcggcgcctatagagatgacaatggaaaaccttacgtactcccatctgttaggaaggctgaagcccagattgccgccaaaaacctggacaaggaatacctgcccatagggggcctcgctgaattttgcaaggcctccgcggagctcgcattgggcgagaattctgaagtcctcaagtctggccgatttgttactgttcagaccattagtgggaccggcgccctgcgaataggcgcctccttcttacagagattttttaagtttagtagagacgttttcctcccgaagcccacatggggtaatcatacccccattttcagggatgctggaatgcagttgcaagggtatcggtactacgaccccaagacctgcgggtttgattttactggggccgtggaggatatcagcaagatacctgagcagagcgtcctgcttctgcacgcatgtgcacataatccaacaggcgtggaccctcgaccagagcaatggaaggagatcgctaccgtcgtcaaaaaacggaatctgttcgcattttttgatatggcataccaagggtttgcatcaggtgacggcgataaggatgcatgggctgtccggcacttcatcgagcaggggatcaatgtgtgtctgtgccagtcctatgcaaaaaacatgggcctctatggtgagcgcgttggcgcgttcaccatggtttgcaaagatgccgacgaggccaagcgcgtcgaatcgcagctcaagattcttattagacccatgtactcgaacccccctctcaatggagcccgcattgccgccgctattcttaatactcctgaccttcgcaagcagtggctgcaggaagtcaaagttatggctgacaggattattgggatgagaacccagttggtatccaacctcaaaaaagaaggctctactcacaattggcagcacatcacggaccagatcggaatgttctgttttaccgggctgaagcccgagcaggtcgaaagactgatcaaagagttcagcatttacatgaccaaggatggcagaatcagtgttgccggagtgacttccagcaatgtggggtatctcgcccatgctatccaccaagtgacgaaatag

SEQ ID NO: 189429 - DNA, 570 bp, synthetic construct
  misc_feature 1..570: note = Description of Artificial Sequence: Synthetic coding sequence
  source 1..570: mol_type = other DNA
atggccctgctgcacagcggccgggtgctgcccggcatcgccgccgcgtttcaccccgggctcgcagcggcagcctcagccagagcctcatcctggtggacgcacgttgagatgggcccacccgatcctattctaggggtgacagaggctttcaaacgggataccaattccaagaagatgaatctcggagtaggtgcctatcgggatgataatggcaaaccttatgtgctcccatccgtgcggaaggccgaagctcaaattgccgccaaaaacctagacaaggagtacttgcctataggcggattagctgagttttgtaaggattttctgagctcagctgagatgtctttctgccccaatcagcccggcgagacaacacacccatcaagcggcatgctcgcgtgtagttataaggttatcggaatcatgaccccacggctggccgtgctcacatcccaggccttatggaggatcttccagaagtaccagagccgagtgttctttttttgtatgcctgcccccaccattccacgtgagtggacacgggtgcgcaattcagggagaaagtag

SEQ ID NO: 189430 - DNA, 1164 bp, synthetic construct
  misc_feature 1..1164: note = Description of Artificial Sequence: Synthetic coding sequence
  source 1..1164: mol_type = other DNA
atggccctgctgcacagcggccgggtgctgcccggcatcgccgccgcgttccacccaggcctggcggctgctgcctcagctagagcctcctcgtggtggacccatgtggagatggggccccctgaccctattctgggtgtcacggaagcatttaagcgcgatacaaactccaaaaaaatgaatctgggcgtcggggcctacagagacgacaacgggaagccctatgtgctcccatccgtcaggaagttcgtgacggtccagacaatctcaggcacaggggcattgcgcatcggcgcgtcgtttcttcagaggttcttcaagtttagccgcgacgttttcctgccaaagccaacatggggaaaccacacaccaatctttcgcgacgccggcatgcaactccaaggatatcgttattatgacccgaaaacctgtggcttcgacttcaccggtgccgtggaagacatttcaaagatccctgagcagtcagtgctcctcctacacgcctgtgcacacaacccaacgggcgtggacccccgcccggagcaatggaaagaaatcgccactgttgtgaagaaacgaaatctatttgcatttttcgacatggcttatcagggcttcgctagtggtgatggggataaagacgcatgggccgtccggcacttcatcgaacagggcatcaacgtatgcctgtgtcagagctatgccaagaatatggggctgtatggcgagagggtcggtgccttcactatggtgtgcaaggacgccgatgaggccaagcgcgtggagagccagctgaagatattgatcagaccaatgtactccaatccccccttgaacggggctaggatcgcggctgccattcttaatacgcctgacctgaggaaacaatggttacaggaagtcaaggtgatggcggacagaataatcggcatgcgtacccaattggtgtctaatctgaaaaaagaaggaagtacgcacaattggcagcacataactgaccagatcggcatgttctgcttcactggccttaagccagagcaggtggagcggttgatcaaagaattcagtatttatatgactaaagacggaagaatttccgttgccggcgtaacatcatctaacgtcggctacctggcacacgccatccaccaggtaaccaagtag

SEQ ID NO: 189431 - DNA, 1491 bp, synthetic construct
  misc_feature 1..1491: note = Description of Artificial Sequence: Synthetic coding sequence
  source 1..1491: mol_type = other DNA
atggccagcagcaccggcgaccggagccaggccgtgcggcacggcttacgtgcaaaggtgctgacgctcgatgggatgaacccccgggtccgcagagtagaatacgccgttcggggtcccattgtgcagagggccctggagttggaacaggagctgcgtcagggggtgaaaaaacctttcactgaagttattcgtgctaacattggcgatgcacaggctatgggtcaaagaccaatcacgttcttgcgccaggttctggccctttgcgttaatcctgacctactaagttccccaaattttccagatgatgccaaaaagcgtgctgagaggatcctccaggcctgcggggggcacagccttggagcatattccgtgtcatcggggattcaattaattagggaggatgtagcccggtacatcgaaaggcgggacgggggcatccccgccgaccccaataatgttttcctgtctacaggtgcctcagatgccatcgtgactgtgttaaaattgttggtcgccggggagggccacaccagaaccggtgtgttgattcccatcccgcaatatccgttgtactccgccactcttgccgagctgggcgcagtgcaagtggactactacttagacgaggagcgcgcctgggctcttgatgtagcggagctgcatcgggcgctggggcaagcacgggaccattgccgcccccgagccttatgtgtgataaatccagggaaccccacgggccaggtacaaactcgcgaatgtatcgaagccgttatcagatttgcttttgaagagagactattcttgctggccgacgaggtgtatcaagataacgtctacgccgcaggctcccaatttcatagctttaaaaaggtgttaatggagatgggccccccttacgccgggcagcaggaacttgcaagctttcacagcaccagcaaaggctatatgggggagtgtggtttccgtggaggatatgtggaggtcgttaatatggatgcggcagtgcagcaacagatgctaaaactgatgtcagtgaggctttgtccccctgtgcctggacaagccctgctcgatcttgtcgtgagtccccccgctcctactgacccgtccttcgcccagttccaggcagagaaacaagccgttctggcagaactggccgcaaaagctaaactgacagaacaggtgttcaatgaagcccccggaattagttgcaacccagtacagggagcaatgtatagcttcccccgcgtgcaattgcccccccgcgctgtcgagcgggctcaggaattgggattggccccagacatgttcttttgcctacgtttactcgaagagaccggcatctgtgtggtgcctggatccgggttcgggcagagagaaggcacctatcacttccggatgaccatactaccaccactggaaaaactccgtcttttactggaaaagctgagtcgctttcacgctaaattcactctggaatactcatag

SEQ ID NO: 189432 - DNA, 1491 bp, synthetic construct
  misc_feature 1..1491: note = Description of Artificial Sequence: Synthetic coding sequence
  source 1..1491: mol_type = other DNA
atggccagcagcaccggcgaccggagccaggccgtgcggcacggcctaagagcaaaagtccttacgctggacgggatgaaccctagggtgagaagagtggagtacgccgttcggggaccaattgtccagcgggcgctggagctcgaacaggagctgcggcaaggggtgaagaagcctttcactgaggtgatccgcgctaacataggcgacgctcaagcaatgggccagcgaccaattaccttcctccgacaagttttagcactgtgcgttaaccctgaccttctgagcagtcccaacttccccgatgacgctaagaaacgggctgagcgcatcttgcaggcctgtggggggcactctctgggtgcgtactccgtgtccagcggcatccagctaattagggaggatgtggcccgctatattgaaaggcgggacggcggcattccagccgaccccaataacgtcttcttgtccaccggcgcttctgatgcaattgtgacagtgctgaagttattggtcgcaggagagggccatactcggaccggcgtcctgatccccatcccacagtacccactttactccgccactttggccgaactcggagccgttcaagtggattattatctggatgaagagcgggcgtgggctctggacgtggcggagcttcacagagccctggggcaggctagggatcattgtcgcccccgagcactttgcgtaataaaccctgggaatccaactggccaggtgcagacacgggaatgtattgaagctgtcattcggttcgcctttgaagagcgcctctttcttctggctgacgaggtctaccaggataacgtttatgctgccggctcacagttccacagcttcaaaaaggtgctgatggaaatgggcccaccgtacgcgggccagcaggagctcgcatcctttcactcaacatctaaaggttatatgggagagtgcggtttcaggggaggctatgttgaggtggtcaatatggacgcagcagtgcagcagcagatgctgaagttaatgtccgtgcgtctttgtccaccagtccccggccaagccctgctggatctggtggtcagtccaccggcaccaactgatccatcattcgctcagttccaggcagagaaacaggctgtcctcgccgagctggctgcgaaggccaagctgactgagcaagtgtttaacgaggcaccagggatctcttgtaacccagttcagggcgccatgtactcctttccaagagttcagctcccccctcgggcagtcgaacgggcacaggagctgggtctcgctccagacatgtttttctgtttacgtctgctggaagagaccggcatctgcgttgtgccagggagcggctttgggcaacgtgagggaacttatcactttcggatgaccattcttccccctctcgaaaagctaagattgctgttagagaagttgtcccgtttccatgccaagtttacactagaatactcgtag

SEQ ID NO: 189433 - DNA, 2010 bp, synthetic construct
  misc_feature 1..2010: note = Description of Artificial Sequence: Synthetic coding sequence
  source 1..2010: mol_type = other DNA
atgatgcggctgcggggcagcggcatgctgcgggacctgctgctgcgctcacctgctggggtcagcgctacccttagaagggcacagccactggtgaccctttgcaggaggccccgcggtggtggtagacctgcagcagggccagctgcagccgccaggctgcatccatggtggggcgggggtggatggccagccgaaccacttgctagagggttatcgagctctccttcagagatactgcaggagcttgggaaagggagtacccacccccagccgggcgtctcaccaccagctgctcccgcagcccccggtcctaaagatgggccaggagagactgacgcctttggcaacagcgaaggcaaagagctggtagcgtctggcgaaaacaagatcaagcagggcttattaccatctcttgaggatcttttgttctatactattgcagaaggtcaagaaaagattcccgtgcataagtttattacagcccttaaatcaacaggtctgaggacgagcgacccaagactgaaggagtgtatggatatgctgcgactcaccctccagactacttctgacggtgtcatgctcgataaggatcttttcaagaaatgcgtgcaatcaaacatcgtgcttctaacccaggcctttcggaggaagtttgtcattcccgatttcatgtcgtttacgtcacatattgatgagctgtatgagagcgctaagaagcagagcggcggtaaagtggctgactatataccccagctcgctaaattttcacccgacttgtggggagttagcgtctgcaccgttgacggacaaagacactccacaggtgataccaaagtgcccttttgtctgcaatcctgcgttaaaccacttaagtacgcaatcgccgtaaacgacctcgggactgagtatgtgcatagatatgttggaaaagagcccagcgggctgcgctttaacaagctattcctgaatgaagatgataagccccacaatccaatggtgaatgcaggcgcaattgtcgtaacttcactcattaagcagggagttaataacgcagaaaagtttgattacgtgatgcagttccttaacaaaatggcgggcaacgagtatgtgggcttcagcaacgctacgttccagtccgaacgggagtctggggaccgcaacttcgccatcggatactatctaaaagagaagaagtgctttccagaggggacagatatggtgggcatattggacttctattttcaactttgctccatagaggtgacatgtgagagtgcttccgttatggcggcaaccctggccaatgggggcttctgtcctattacaggagagcgcgttctgtcccctgaagctgttcggaatacactctcactgatgcatagttgtggaatgtacgacttctcgggtcagtttgccttccacgttggcctgccagccaaatcaggagtggccggaggcattctacttgtcgttccaaacgtgatggggatgatgtgctggtcaccacctctcgataaaatgggcaactcagtgaagggcatccacttttgccacgacctagtctcgttgtgcaatttccataattacgataacttgcgccactttgccaagaagctagaccccaggcgggaaggcggagaccagagggtcaaaagcgtgatcaacctgttattcgctgcttatactggagatgtctcagccctgagacgattcgccctgtccgcaatggatatggagcagcgggactatgacagcaggactgcacttcatgttgctgctgctgaaggtcacgtcgaagtcgtcaaattcctactagaggcttgtaaggttaacccattccctaaggaccgctggaacaacacaccaatggacgaggccctccattttggtcatcatgacgtgttcaagatacttcaagagtaccaggtccagtataccccccaaggtgacagcgataacggaaaggagaaccagactgtgcataagaaccttgatggtctgctctag

SEQ ID NO: 189434 - DNA, 1797 bp, synthetic construct
  misc_feature 1..1797: note = Description of Artificial Sequence: Synthetic coding sequence
  source 1..1797: mol_type = other DNA
atgatgcggctgcggggcagcggcatgctgcgggacctgctgctgcgctccccagcaggagtatctgccaccctcaggagagctcagccgctagtcactctctgcagaaggcccaggggagggggaaggccggctgcgggtcctgctgctgctgccagactgcacccctggtggggaggtgggggatggccggccgaacccttagccaggggactgagtagctcaccctcagagattctccaagagctgggcaagggatcaacgcacccacaacctggagtctctcctcccgccgcccctgccgctcccggtcccaaggacgggccgggcgaaaccgatgccttcggcaactccgaaggtaaagaattggtagcctcaggtgagaataagattaagcagggattactgcccagcttggaggacttgctattctacacaatcgcagaagggcaggagaaaatcccggtccataagtttatcactgctctcaagagtactggactgcggaccagtgaccctcgacttaaggagtgcatggacatgctgaggttgactctgcaaaccacttccgacggagtaatgctggacaaagacctgttcaagaaatgcgtacagagcaatatcgttcttttaacccaggctttcagacgaaagttcgtgattccagattttatgagtttcacctcccacatagatgagctgtatgagtccgccaagaaacagtcaggtggaaaagtcgcggactacattcctcaattagctaagttctcaccagatctctggggtgtcagcgtctgtacagttgacgggcagcggcatagtactggagacaccaaagtaccattctgcctgcagagctgtgtgaaaccactgaaatacgcaattgctgtgaacgacttgggcactgaatacgtacacaggtacgtggggaaagaaccctctggcctgaggtttaataaattgtttctcaatgaagacgataagcctcataacccgatggtgaacgctggagcaattgtggtgacctctcttattaagcagggcgttaacaacgcggaaaaatttgattatgttatgcagttcctgaacaagatggcaggcaacgaatacgtgggattcagtaatgccaccttccagagtgagcgagagagtggcgataggaacttcgcaatcggctattacttgaaggaaaaaaagtgcttcccggaggggacagacatggttggcattctggacttctacttccagctgtgttctatagaagtgacctgtgagtccgcatcagtgatggctgctacattggccaacggggggttctgccccatcaccggggagagagtgctgtcacccgaggccgtgagaaacacactgtctcttatgcatagttgcggtatgtacgacttcagcggacagtttgcttttcacgtcggcttgccagctaaaagcggagtagcaggaggaattcttcttgtagtcccaaatgtgatgggtatgatgtgctggtcgcctcctttagacaagatgggaaatagcgtgaaggggattcacttttgccatgatcttgtgagcctgtgtaattttcacaactacgacaatctgcgccactttgctaagaagctggaccctcggcgcgagggaggcgaccaacggcattcatttggcccacttgactatgaatcactccaacaggagcttgccttaaaagagaccgtatggaaaaaagtaagcccagagtctaacgaagacatctctaccaccgtcgtgtacagaatggaatccctgggagagaaatcttag

SEQ ID NO: 189435 - DNA, 525 bp, synthetic construct
  misc_feature 1..525: note = Description of Artificial Sequence: Synthetic coding sequence
  source 1..525: mol_type = other DNA
atgggcatgatgtgctggagcccccccctggacaagatgggcaactctgtaaaggggatccacttctgccacgatttagtttcgctatgcaactttcataactacgacaatttacggcactttgcaaaaaagctcgaccctcggagagagggcggagatcaacgcgtcaagtctgttatcaacctgttgtttgctgcctatacaggggacgtcagtgcacttaggcggttcgcactgtccgcaatggatatggaacagcgcgattatgactctcgcactgccctgcacgtggcagctgcggaggggcatgtggaagttgtcaagttcctgctggaggcctgtaaggtgaatccatttcccaaggatagatggaacaatacccctatggacgaggcactccacttcggccaccatgacgtcttcaagatcctgcaggagtatcaggtgcagtatacccctcaaggcgattcagacaacggtaaggagaaccagaccgtccataagaaccttgatggcctcctgtag

SEQ ID NO: 189436 - DNA, 1809 bp, synthetic construct
  misc_feature 1..1809: note = Description of Artificial Sequence: Synthetic coding sequence
  source 1..1809: mol_type = other DNA
atgcggagcatgaaggccctgcagaaggccctgagccgggccggctcacactgcggcagaggcggttggggacatcccagtagatcgccgctgctgggaggtggagtgcgtcaccatctgtccgaagcggccgcccagggaagagaaaccccccattctcatcagccccagcatcaggatcacgatagttctgagtctggaatgttatctcggttgggggatctgcttttttatacgatcgctgaaggccaagagaggataccaatacacaaattcaccactgccctgaaagccactggacttcagaccagcgacccccgtctgcgagactgcatgtctgaaatgcacagagtggtccaggagagttcatctggcggtctcctagacagagatctctttagaaagtgtgtctcgagtaacattgttctgctcacacaggcatttcgcaaaaaattcgtcatcccggattttgaagaattcaccgggcatgtcgatcgtatcttcgaagatgtgaaagagctcaccgggggcaaagttgctgcctacatccctcagctggctaaaagtaacccggacctgtggggcgtctccctttgcacagtggacgggcagagacattccgtcggccataccaagatccccttctgtctgcaatcttgcgttaagccactcacttacgccatatcaatatctactcttggcaccgattacgtgcacaaattcgtgggcaaagagccatccggcctgcgctataacaagctctcgctcaatgaggagggaattccacataacccaatggttaacgcaggagccattgtcgtgtctagcctgatcaagatggactgcaataaggccgagaaattcgatttcgtgctgcagtatttgaataaaatggcgggaaacgaatacatgggcttttccaacgctacctttcagtctgagaaggagaccggggatcgcaactatgctatcggttactaccttaaggagaaaaaatgctttccaaagggtgtcgacatgatggcagccctggatctctactttcagctgtgttcagtagaggtcacctgtgagtccggctctgtcatggccgcaacactagccaatggaggcatttgtccgatcactggcgagtctgtgctatcagcagaggcggttcgaaacacactttcccttatgcacagctgtggcatgtacgatttctcaggacagtttgcattccacgtcggcttgcccgccaagtcagcagtgagtggcgctattctgcttgtggtgcccaatgtcatgggaatgatgtgcctgagccctcctctcgacaaattgggcaacagccaccggggcacgagcttctgccaaaagttggttagcctcttcaacttccataactacgataacctgagacattgcgccagaaaattggatcctcgtcgcgagggcgcagaaattcggaataaaacagtcgtgaatctcctgttcgcagcgtattcgggggacgtgtcagctttgaggcggtttgcgctcagcgccatggacatggagcagaaagactatgattctcgaacggctctccacgtggcagctgccgaaggacacattgaagtcgttaagtttcttattgaggcctgcaaggttaacccgttcgcaaaagatcgatggggcaatatccctcttgacgatgctgtgcagttcaaccatctcgaagtggtgaagttgcttcaggattaccaggacagttataccctgtccgaaacacaggccgaagcagcggcagaagcgctctctaaggagaacctggaaagcatggtgtag

SEQ ID NO: 189437 - DNA, 534 bp, synthetic construct
  misc_feature 1..534: note = Description of Artificial Sequence: Synthetic coding sequence
  source 1..534: mol_type = other DNA
atgcggagcatgaaggccctgcagaaggccctgagccgggccggctctcactgtggccgagggggctggggccatccatcccgatcacccctgctcggtggcggggttaggcaccatctgtctgaggccgctgctcagggccgcgaaactcctcactctcaccagccgcagcaccaggaccacgactcatccgagtccggaatgctgtctcgcctaggcgacctgttgttctatacaattgctgagggccaggagaggatcccaattcacaaattcaccactgcactcaaagcaaccggcctgcagacatccgatccccgcctcagggactgtatgtctgagatgcaccgggtggtccaggagagcagtagtggtggattgttggaccgagacctatttcgcaagtggcagccaacgtcgttgagctggccatcacagacgcagacttgtggggtttctccatgcgccttatggatggtcaacgggacactgtgggccacgcagcgatcgccctcagcctgcagtccagtctag

SEQ ID NO: 189438 - DNA, 2049 bp, synthetic construct
  misc_feature 1..2049: note = Description of Artificial Sequence: Synthetic coding sequence
  source 1..2049: mol_type = other DNA
atgtgcggcatcttcgcctacatgaactaccgggtgccccggacccggaaagaaatcttcgagactctgattaaaggcttgcaaagactcgagtaccggggttatgatagcgccggcgtggcgatcgatggcaacaatcatgaagtgaaggagagacatattcagcttgtaaaaaaacgcgggaaggtcaaagctctcgatgaggaactctacaaacaagattcaatggatctcaaggtcgagttcgaaacacacttcggcattgcacatacccggtgggctactcacggagtgccctctgcagtcaattcccaccctcagcgcagtgataagggtaatgagtttgtggtcattcacaatggcattataacaaattacaaggacttgcggaagttcttagaatctaaagggtacgaattcgagtcagagacagatacagaaaccatcgcaaaacttataaagtatgttttcgataaccgcgagaccgaagatattacgtttagtacactagttgagcgcgtcattcagcagctggagggcgcatttgccctggtctttaagagtgttcattatccgggcgaagccgttgctactcgacgcggctcacccctcctcattggggtccggtcaaaatataagctgagtaccgaacaaatccccatcctctaccgcacatgcacgctggagaatgttaagaatatctgtaagacccgcatgaaacgtcttgattcctcagcctgcttacatgccgttggagacaaagctgtcgaattcttcttcgcctcagacgcctccgccataattgaacacaccaacagagtgattttcttggaagacgatgatattgccgccgtggccgatggaaaactgtctattcatcgagtgaaacggagtgcctctgacgaccccagtagagccattcagaccctgcaaatggaattgcagcaaatcatgaaggggaacttcagcgcctttatgcagaaggagatattcgaacagcccgaaagcgtgttcaatacaatgagaggccgagtgaattttgaaaccaacactgtgctcttgggtggcctgaaggatcatctaaaggagatcaggcgatgtcgtcgattgattgtgatcggatgcggtacctcttaccatgctgcagtggctacccgccaggtgctggaggagctgactgagttgcccgtgatggtagaactggccagtgattttctcgacagaaacacacccgtgttcagggatgacgtgtgcttttttatctcccaaagcggagagacagcggacacactgcttgccctgaggtactgtaaggatcggggggcgttaactgtgggagtgaccaacacagtgggctcatccatttcccgggagactgattgcggcgtacatataaatgcgggacccgaaatcggagtggcctccactaaagcgtacacaagccagtttatctcactcgtgatgtttggtctgatgatgtccgaggacagaataagcctgcagaatcgcaggcaagagataatccgggggttgcgatcacttcctgagctgatcaaggaagtacttagcctggaggagaagatacacgatctggcattagaactttatacacagcggtcactgctcgttatggggaggggctacaattacgccacttgtctggagggggcccttaagattaaagagattacatacatgcatagcgaaggaattttagccggggagctgaaacatgggccacttgcccttatcgataaacagatgcctgtcatcatggttatcatgaaggatccttgttttgccaaatgtcagaatgcccttcagcaggtgaccgccagacagggtcggcccattatcttatgttctaaagacgacaccgagtctagtaagtttgcttacaaaaccattgaactaccccataccgtcgactgcctgcagggcatactctcagttatcccactgcaactgttgtccttccacctcgccgttctccggggatatgacgtggatttcccaagaaacctggccaaatctgtgacagtggagtag

SEQ ID NO: 189439 - DNA, 1086 bp, synthetic construct
  misc_feature 1..1086: note = Description of Artificial Sequence: Synthetic coding sequence
  source 1..1086: mol_type = other DNA
atggccggcggccggcaccggcgggtggtgggcaccctgcacctgttattattggtggctgctctgccctgggcctctcgcggcgtgagtccttccgcctcagcatggcccgaggagaaaaactatcaccagcctgctattctgaactcttcagccttacgccagatcgccgaaggcacatcaatctcagagatgtggcagaatgatttgcagcccctgctgattgagcgatatcctggtagtcccgggtcttatgccgctcgacagcatatcatgcagcgtattcagcgactgcaagctgactgggtactggagatcgacacatttttgagccaaacaccttatgggtacaggagtttctccaacatcatcagcacactgaatcctactgcgaaacgccatctcgtcctggcatgccactatgatagtaagtacttcagtcactggaacaacagggtttttgtcggcgctaccgattccgcagtaccctgtgcaatgatgttggaacttgctcgcgcactggacaaaaaattgctgagcctgaagacagtgtcagattccaaacctgatcttagtctgcagctcatattctttgatggcgaagaggctttcctgcattggtctccacaggatagcctgtacggaagtagacacctggctgccaagatggccagcactcctcacccccccggtgcaaggggaacaagccagctgcatgggatggacctccttgtcctgcttgacctaattggcgctcccaatcccacctttcccaatttctttccaaacagtgccaggtggttcgagcggctgcaagccatagagcacgagcttcatgagctgggattgcttaaggatcattccctggaaggccgctacttccagaactatagttatggaggtgtgatccaggatgaccacatccctttcctgcgaaggggtgtccccgttctccacctgatcccttcacctttccccgaggtatggcatactatggatgacaatgaagagaatctcgacgagtcaaccatcgataatctgaacaagatcctacaagtgttcgtgctggaatatctgcacctgtag

SEQ ID NO: 189440 - DNA, 939 bp, synthetic construct
  misc_feature 1..939: note = Description of Artificial Sequence: Synthetic coding sequence
  source 1..939: mol_type = other DNA
atggccggcggccggcaccggcgggtggtgggcaccctgcacctgctgctgctcgttgccgctttgccttgggcctcccgcggggtttcacctagcgcttctgcctggcctgaagaaaaacatataatgcagcgcatacaaaggttgcaagcagactgggtgctggaaatcgatacctttcttagtcagaccccgtacgggtacagatcgttctccaacattatctcgaccctgaacccaactgccaagcggcacctggtgttggcttgccactatgacagcaagtacttttcacactggaacaaccgggttttcgtgggcgcaactgactccgccgtgccatgcgccatgatgctggagttagctcgcgctctggacaaaaagcttctctcactgaaaactgtctccgactctaagccagatctgtcactgcagctgatcttttttgacggcgaagaggccttcctgcattggtcgccccaagactccctctacggtagcagacacctcgccgcaaagatggcatcaaccccccatcctccaggtgctcgtggtaccagtcagttgcatggcatggacctcttggtgctattggacctgattggggcaccaaacccaaccttccccaacttttttcctaactccgcccgctggttcgagcgcttacaggcaatcgagcacgaactgcatgaacttgggctgctgaaggatcactctctggagggtagatactttcagaattatagctatggtggggtgatccaggacgaccacatccctttcctacgcagaggcgtccctgtgcttcacctgattcccagcccgttccctgaagtttggcatactatggacgataatgaggagaacctcgacgagagcacaatcgacaatctcaacaagattcttcaggttttcgtgttagagtatctccatctctag

SEQ ID NO: 189441 - DNA, 2328 bp, synthetic construct
  misc_feature 1..2328: note = Description of Artificial Sequence: Synthetic coding sequence
  source 1..2328: mol_type = other DNA
atggccgccctggacagcctgagcctgttcaccagcctgggcctgtcagaacagaaggctcgggagacactgaagaattccgctctgagtgcccagttaagagaagcagccacccaggcccagcagacactgggctccacaattgataaggcgaccggcattctcctgtatgggttagcctctcgacttagagacacccgcaggttgtcttttctggtgtcctatattgctagtaaaaaaattcatactgagccccagctgtccgctgccctggaatacgtaagaagccatccacttgatcccatagatacagtcgattttgagcgcgagtgcggtgttggcgttatagttacacccgagcagattgaggaggcagtggaggctgcaataaatagacacaggcctcagttactcgtggagaggtatcacttcaacatggggctcctgatgggcgaagctcgggcagtgctaaagtgggctgatggcaaaatgatcaaaaacgaggtcgacatgcaggtactgcacctcttgggtccaaaattagaggctgacctggaaaaaaaattcaaggtggcgaaggcccggctcgaagaaactgaccggcggaccgccaaagacgttgtggaaaacggcgagacagcagatcaaaccctgtccctcatggaacagttacgtggagaagccctgaagttccataaaccgggggagaattacaagacaccagggtacgtggttacaccacacacaatgaatcttcttaaacagcatctggagatcacaggcggccaagtccgcacccgattcccacccgaacctaacggaattctgcacattggacacgctaaggccatcaatttcaactttggctatgcgaaagcgaataatgggatttgcttcctgcgatttgacgacactaaccctgagaaggaggaagctaagtttttcactgccatctgcgatatggtcgcatggctgggctacacaccatataaggtaacatatgcaagcgactacttcgatcagctttatgcctgggcagtagaactgattagacgtggtttggcctacgtgtgtcatcaacgcggcgaggagttaaaagggcataatactcttccatctccatggcgggacaggcccatggaggagtcactcctgctgttcgaggcaatgcgtaagggcaaattctccgaaggggaagccaccctgcgaatgaagcttgtaatggaagatggtaaaatggaccctgtcgcgtaccgagtgaagtacaccccccatcatcggaccggcgacaaatggtgcatctatccaacgtacgattatacacactgcctgtgcgactcgatcgagcacattacccattcactttgtacgaaagagttccaggccagacgttcttcatacttctggctctgcaatgcactggacgtctattgcccggtgcagtgggaatacggcaggctcaatttgcactacgctgtggtgtcgaaacggaagatcctgcagttggtcgccactggagctgtgagagactgggacgatcctaggctgtttaccttaaccgctctccgacggagaggttttccccccgaggccattaacaacttctgcgctagagtgggtgtgacagttgcccagaccaccatggaaccacatttgctggaagcatgcgtccgggatgtgctcaacgatacggcccctcgggcaatggccgtgctcgaatcccttcgcgttattataacgaacttcccggcggccaaaagcttggacatccaggttcccaacttccctgccgatgagactaaaggattccaccaggtgccattcgctccgatagtgttcatcgaacgaacagactttaaggaagagccagagccaggatttaagcgactcgcctggggacagcccgtcggcttgcgtcacaccggttacgtcattgagctccagcacgtggtgaaggggccatctggatgtgtagagtccttggaagtcacttgccgaagagcagatgcgggagagaaaccaaaggccttcatacactgggtgtcgcagcccttgatgtgcgaggtgcgactctacgaaaggctcttccaacataagaacccagaggaccctactgaagtgcctggcggattcctttcggacctaaacctcgcttctcttcacgtggtcgatgctgctctcgtggattgttccgtggcgcttgccaagccattcgacaaatttcaattcgaacgcctcgggtatttttcagtggacccagactctcatcagggtaagttggtgttcaacagaactgtaactctgaaagaagatcccggcaaagtgtag

SEQ ID NO: 189442 - DNA, 2295 bp, synthetic construct
  misc_feature 1..2295: note = Description of Artificial Sequence: Synthetic coding sequence
  source 1..2295: mol_type = other DNA
atggccgccctggacagcctgagcctgttcaccagcctgggcctgtcagaacagaaagcacgggaaaccctcaaaaattctgccctcagtgcacaactcagagaggcagcaacccaggcacagcagacactaggatctaccatagacaaagctactggaatccttctttatggcctagcctcgaggttaagagacaccaggcgcctgagttttttggtgtcatacatcgcaacagcactggaatatgtccgaagtcaccctctagaccccattgatactgtggacttcgagcgggagtgcggtgtgggcgtcattgttacaccagagcagattgaagaggccgtggaagcggcaataaaccggcacaggccacagctgctcgtggagcggtatcactttaacatgggcctgttaatgggtgaagcaagggccgtgctcaaatgggccgatggtaagatgattaaaaacgaagtggatatgcaagttcttcacctgctgggccctaaactggaagccgatctggagaaaaagttcaaggttgccaaggcccgacttgaggaaaccgaccgccgaacggccaaggacgttgttgagaatggggagactgcagaccagaccctcagcctgatggagcagctgcgcggagaagccctgaaatttcacaaacccggggagaattacaaaactcctggctacgtcgtcacgccccacacgatgaatctgcttaaacaacacctggagattacaggcgggcaagtgcggacaaggtttcctccagagcccaacggaatcctccacattggacatgccaaggctattaatttcaactttggttatgcaaaagccaataacggtatctgctttctgaggttcgacgacactaatccggaaaaggaggaagcaaagttcttcactgccatctgtgacatggtagcttggttgggctacaccccctataaagtaacctacgcctccgactacttcgaccagttgtatgcgtgggccgtggaactcatcaggcgcggactggcatacgtgtgccaccaacggggagaggagctgaaagggcataacacccttccctctccatggcgggatagaccaatggaagagagcttgcttctgttcgaggctatgcggaaagggaagtttagcgagggtgaagccacgctgcgaatgaagctggtaatggaggacggcaagatggatcccgtagcatacagggtaaagtacacgccccaccacagaaccggcgacaaatggtgtatttaccctacatacgactatacccattgcttgtgtgatagcattgagcacatcactcacagcctctgcaccaaggaattccaagcaaggcgttcgagctatttttggctgtgcaacgccctggatgtgtattgccccgtccaatgggaatacggtcgcctaaatctgcattacgcagtggtgtccaaacgaaagatcctgcagctggttgccacaggcgcagtaagggactgggatgatccgcgccttttcactcttacagccctcagaagacgcgggtttccgcctgaggctatcaataacttttgcgcccgcgttggggtaacagtggctcagactaccatggaacctcacctgctggaagcctgtgtgagggacgttctgaatgacaccgctccaagggccatggctgtcctggaatctctgagagtcattatcaccaatttccccgccgccaagtccctggacattcaggtacctaactttcctgcagacgagactaaggggtttcatcaggtacccttcgcccctatcgtttttattgagagaaccgactttaaggaagagccggaacccggcttcaaacgccttgcttgggggcagcccgtcgggcttagacacacagggtatgtgattgagcttcagcatgttgtgaaagggcctagtggctgcgtggaatccctggaggtgacttgccgccgggccgatgctggagagaaacctaaggcttttatccactgggtgagccagccgctgatgtgtgaagtgcggctatacgagcggctgtttcagcacaagaaccccgaggacccgacagaagtgccgggagggttcctatctgaccttaatctagccagtttgcatgtggttgacgctgctctcgtggactgctccgtggccctcgcaaagccattcgacaagtttcagtttgaacgcttaggctacttttccgtggacccagactcccaccagggtaagctagttttcaatcgaacagtcactttgaaagaggaccccggcaaagtatag

SEQ ID NO: 189443 - DNA, 849 bp, synthetic construct
  misc_feature 1..849: note = Description of Artificial Sequence: Synthetic coding sequence
  source 1..849: mol_type = other DNA
atgcccacctgccggctgggccccaagttcctgctggtgagcggcgtgagtgcaatggccgcccttgactcactgagcctcttcacatcattagggctgtccgaacagaaagcccgcgagaccctaaaaaattcagcactttcagctcagcttcgtgaggccgctacacaggcccagcagacactcggcagcacgatagacaaggccaccgggattttgctttatggactcgccagccgactgcgggacacccggaggctgtccttcctggttagttatatcgcaagcaagaaaatccacaccgagccgcaactctccgccgcccttgagtacgtgcgctctcatccccttgatcccatcgacacagtggattttgagagagaatgtggagtcggagtaattgttacacccgagcaaattgaagaggccgtggaagcagcaatcaaccgacacagacctcagctgttggtcgagcgctaccatttcaacatgggtctcctgatgggagaagctagagcggtcttgaagtgggcggacgggaaaatgatcaaaaatgaggtggacatgcaggtactgcacctcctcgggcccaagctggaggctgatctagagaaaaaattcaaggtggcaaaggcccgcctggaagaaacagatcgccgaacagcaaaagacgtggtggagaacggcgaaacagctgatcagacgttatctctaatggaacagctgcgtggcgaggccctaaagttccacaagccgggaacctatcccgtcccagcccgcacccagtggaatcctgcatattggacttgccagtctcatcaattccaactctggctgtgccaggtttag

SEQ ID NO: 189444 - DNA, 2874 bp, synthetic construct
  misc_feature 1..2874: note = Description of Artificial Sequence: Synthetic coding sequence
  source 1..2874: mol_type = other DNA
atgaacttcgccgagcgggagggcagcaagcggtactgcatccagaccaaacacgtggcaatactgtgcgctgttgtagtgggtgtgggattgatcgttggcctggccgtgggactaacacgctcatgcgatagtagcggagatgggggtccaggaacagcacccgctccatcacacctaccaagtagtacagcttcacctagcggaccccccgcgcaagatcaagatatctgtcctgcctccgaggatgagagtggtcagtggaagaatttccgcttacctgattttgtgaaccccgtgcactacgacctacatgttaagccactgcttgaggaagacacgtacaccggaaccgtgtccatctccattaatttgtccgccccaacacggtacctgtggctccatcttagggagactcggattacacggctgcccgaattaaagagaccttcaggtgaccaggtccaggtgcgccggtgttttgaatataagaagcaggagtacgtggtggtggaggcagaagaggaactgactccctcctctggtgacggcctgtacctgctaacaatggaattcgctggatggcttaacgggtctttagtgggattttacagaacaacctacaccgaaaacggccaggtaaagagtattgtagccactgaccacgagcctactgatgccaggaagtcgtttccctgctttgatgagcccaacaaaaaagctacttatacaatttctatcacccatccaaaggaatacggtgccttaagtaacatgcctgttgctaaggaggagtcagtggacgataaatggacaagaacaacctttgaaaagagcgtgcccatgtcaacctatctggtctgttttgctgttcatcagtttgacagcgttaaaagaatcagcaactccggaaagcccctgaccatatacgtgcagcccgaacaaaaacacacagcagagtacgcagccaatatcaccaaaagcgtattcgactatttcgaggaatattttgccatgaattactccttgcctaaactcgacaagatagccattcccgacttcggaaccggcgctatggagaattgggggcttatcacctaccgggaaacaaacttgctgtacgaccccaaagaaagtgcctcaagcaaccagcagcgggtggccaccgtcgtggctcacgagctcgtgcatcaatggttcggtaatatcgtgacaatggattggtgggaggacctctggctcaacgaaggctttgccagcttcttcgaatttcttggagtcaatcacgcggagacagattggcagatgcgtgatcagatgctgttggaagatgtgttaccggtacaggaagatgattctctgatgagtagtcatccaattattgtaacagtgaccacccccgacgagatcaccagcgtgtttgatggcatttcctactccaaaggttcaagtattctcaggatgctggaggattggattaagcctgagaactttcagaaaggctgccagatgtacttagagaagtatcagtttaagaatgcaaaaaccagcgacttttgggctgccctagaggaagccagtcggctgcctgtcaaggaagttatggatacatggacacgacagatgggctatccagtgctgaatgtcaacggggttaagaacatcacccagaaacgtttcctcttagacccccgggccaatccctcccagccaccaagcgatcttgggtatacctggaatattccagtgaagtggacggaggataacatcaccagctccgttttattcaaccgctctgaaaaggaaggcattacactcaacagctctaatcctagtggtaatgcatttcttaagataaatccagatcacatcggcttctatcgggtaaactacgaggtggcaacctgggacagtattgcaactgccctgtcattaaaccataaaacttttagcagtgcagacagagcctctctgatcgacgatgcatttgcgctggcacgggcccagctgcttgactacaaagtggcgctgaaccttactaagtatctgaaacgggaagaaaatttcttaccctggcagcgggtgatctcagccgtcacatacatcattagcatgttcgaagacgataaggaactctacccaatgattgaggagtattttcagggccaggttaaacctatcgcagactccctgggctggaacgacgccggtgaccacgtgactaagctcctgaggtcctcagtgctgggattcgcctgcaaaatgggcgatcgagaggctcttaataatgcgtcaagccttttcgagcaatggcttaatgggacggtcagcttgcccgtcaacctacgcctcctagtttatcggtatgggatgcagaacagcggcaacgagatctcatggaactatacactggagcagtaccagaagacatcccttgcccaggagaaagaaaagctgttatacgggctggcatctgtcaagaatgttacattgctttcacgctacctagacctgctgaaagatactaatctaatcaagacccaggacgtgttcactgtaatcagatatatctcttacaatagttacggcaagaacatggcatggaactggatccagctgaattgggactacctggtaaatcgctacacactcaacaaccgaaacttaggtaggatcgtaaccattgcggagccttttaacaccgaactccagttatggcagatggaaagctttttcgcaaagtatccacaagccggcgccggagagaagccacgcgagcaggtgctggagaccgtgaaaaacaatatcgagtggctgaagcagcaccgaaacacaatccgggaatggttcttcaacctattagaatcaggatag

SEQ ID NO: 189445 - DNA, 4539 bp, synthetic construct
  misc_feature 1..4539: note = Description of Artificial Sequence: Synthetic coding sequence
  source 1..4539: mol_type = other DNA
atggccaccctgagcctgaccgtgaacagcggcgacccccccctgggcgctttactggcagtagaacacgtcaaagatgacgtcagcatcagtgttgaggaggggaaagaaaacatcttacatgtgtccgagaacgtgattttcaccgatgtcaatagcattctgagatacctggcaagggtggccaccacagcgggcttgtatggctccaatctgatggaacacacggagatcgatcactggctggaatttagtgccacaaagctgtcctcttgcgattcttttacatccacgattaatgagctcaaccactgcctgtccctccggacctatctggtggggaacagtttgagcctggcagatctttgtgtttgggccacccttaaggggaacgctgcctggcaggagcagttaaagcagaaaaaggcgcctgtgcatgtgaaacgttggttcggcttccttgaggctcagcaggccttccaatcggtgggtactaagtgggatgtcagtaccactaaagccagggtagcccccgaaaaaaagcaggatgttggcaagttcgtggaactgcccggcgctgagatgggcaaggtgactgtgaggtttcccccagaggcttccggttatctacatattggtcacgccaaggccgccctgctgaaccagcattaccaggtgaacttcaaaggcaaactgataatgagatttgacgacacaaacccagaaaaagaaaaggaagattttgagaaagtgatcctggaggatgttgcgatgctgcacatcaagcctgaccagtttacctatacgtccgatcacttcgagaccatcatgaagtacgccgagaagctgattcaagagggcaaggcttatgtggatgatactccagcagaacagatgaaagctgagagggagcagagaattgacagtaagcaccgcaagaaccctattgagaagaacttacaaatgtgggaggagatgaagaaaggctcgcagttcggccagagctgttgtcttcgggctaagattgatatgagtagtaataacggctgtatgcgagacccaacgctgtacaggtgtaaaattcagccacatccccggacagggaacaaatacaatgtctatccaacctacgatttcgcctgtccgatcgtggacagtattgagggcgtcacgcacgcgctgcgcactaccgagtaccacgaccgcgatgaacagttctattggattattgaggcacttggcataagaaaaccctatatctgggagtatagtcgcttaaacttgaataatacggttcttagtaagaggaagcttacttggttcgtgaatgagggcctcgtagacggttgggacgatccgcgttttcccactgtgcgcggcgtgcttcggcggggcatgacagtggaggggctgaagcaattcatagcggctcagggaagcagccggtcagtggtgaatatggaatgggacaagatttgggccttcaacaagaaggttattgaccccgtggcccctcggtacgtggcactgctcaaaaaggaagtgatccctgtcaacgttccagaggctcaggaagagatgaaggaagtagctaaacaccctaaaaatccagaggtgggcctaaaaccggtttggtactcacccaaagtgttcattgaaggtgctgacgctgaaactttctccgagggtgaaatggttacattcattaactggggtaacctcaatataactaagatacataagaatgccgacgggaagattatttcactagacgctaaattgaacctggagaataaagactacaaaaagacaaccaaggtcacctggctggctgaaaccacgcacgccttgcccattcccgtgatttgcgtcacttacgagcacctcatcaccaagcctgtgctcggaaaggacgaggactttaaacagtatgttaataaaaattccaaacacgaagagttgatgctcggcgacccctgcttgaaggatctgaagaaaggagatattattcagctgcagcggcgcggtttttttatctgcgatcagccatatgagcccgtcagtccctactcatgtaaagaagccccgtgtgtcctgatctacatccctgacggccacactaaggagatgccgacatcaggcagcaaggagaagacaaaagtggaagccaccaagaatgaaacaagcgctcccttcaaagaaaggcccacgccgtcactaaataataactgcacgacttcggaggatagtctggtgctatacaatagagtcgccgttcagggtgatgtcgttagagagttgaaagctaagaaggcgcccaaggaggatgtcgatgctgctgtgaagcagctcttgtccctcaaagctgaatacaaagagaaaacgggccaagagtacaagcccggaaatcctccagccgagatcggacagaatatttcttcaaattcaagcgcatccatccttgaatccaaaagtctctatgacgaagtggctgcgcaaggcgaggtcgtgcggaaactcaaagctgagaaatcacccaaggctaagatcaatgaggcagtggaatgcttgctgtccctcaaggcgcagtacaaagaaaagactgggaaagagtacattcccggtcaaccgcctctgagccaatcatcagacagctcacctacaaggaactcagagcccgctgggctcgagacgccagaggccaaggttctgtttgacaaagttgcctctcagggagaagtggtgcgcaaactgaagacagaaaaagctcccaaagaccaggtggacatcgctgtgcaggaactcctgcagttgaaggcacaatacaagtctctgatcggggtagagtataaacccgtgtccgccaccggggcggaggataaggacaaaaaaaaaaaggagaaagagaacaaaagtgagaaacagaataagccccaaaaacaaaatgatggccagcggaaggatccctctaagaaccaaggtggaggcttatccagttccggggcgggggaggggcaaggtccaaagaaacagacgcggctcggacttgaagcaaaaaaggaggagaatctggcagattggtacagccaggtgataacaaaaagtgagatgattgaatatcacgatatctcagggtgttatatcttaaggccttgggcctacgccatttgggaggccataaaggatttctttgacgccgagatcaagaagctgggagtggagaattgttatttccccatgttcgtgtctcaaagcgcactcgaaaaagaaaagactcacgtagcagattttgctcccgaggtggcgtgggtgaccaggtccggcaagaccgagcttgctgaacccatagccatcagaccgacctcagagaccgtcatgtacccagcttatgcaaagtgggtgcaatcacaccgggacctgcctatcaaactgaatcagtggtgtaatgtggtgagatgggagtttaaacatccccagccattcttgaggacaagagagtttctttggcaagagggacactccgctttcgctaccatggaggaagctgccgaggaggtgctccagatacttgatctctacgcccaagtctacgaggaacttctggccatcccagtggttaaaggaagaaagacagaaaaggagaaatttgcaggaggtgactatactaccaccatagaggcatttatctcggcctcgggcagggctatccaaggggggacgtctcaccatctggggcaaaattttagcaagatgtttgagattgtcttcgaggaccccaaaatcccgggcgagaagcagttcgcctatcaaaacagttggggcctgaccacacgcacgatcggagttatgacaatggtgcatggcgacaatatgggccttgtgttgcctccacgcgtcgcttgcgtccaagtggtgataatcccttgtgggatcacaaacgctctgagcgaggaagacaaagaggcactgatcgccaagtgcaacgactataggcgacgtctgctctcagtaaatatcagagtccgggccgatctgagagacaactatagcccgggatggaaattcaaccactgggaactgaagggcgtcccaattagactcgaagtgggtccaagggacatgaagagttgccagtttgtggcagtcaggcgagacacaggtgaaaagcttaccgtcgctgaaaatgaagcagagacaaagctccaagccatcctggaggacatccaggtgaccctcttcacccgcgcaagcgaggatttaaaaacacacatggttgtggctaacaccatggaggatttccaaaaaattcttgacagcgggaaaatcgtccagatacctttttgtggagagatagattgcgaagactggatcaaaaagaccactgctcgggatcaggatctggagcctggcgcgccatctatgggtgctaagagtctttgtattcccttcaagcccctatgcgagctgcagcccggggccaagtgtgtgtgtggcaaaaatcccgcaaaatactatactctgtttgggcgctcctattag

SEQ ID NO: 189446 - DNA, 2964 bp, synthetic construct
  misc_feature 1..2964: note = Description of Artificial Sequence: Synthetic coding sequence
  source 1..2964: mol_type = other DNA
atggccaccctgagcctgaccgtgaacagcggcgacccccccctgggggctctcctcgctgtggagcatgtaaaggacgatgtcagcatctctgtggaggaaggaaaggagaacatcttgcatgtaagcgaaaatgtcattttcacggatgtaaactctattttacggtatctggctcgcgttgcaaccacggctgggctttatggaagcaacttgatggagcatacggagatcgaccattggttagagttttctgccaccaaacttagttcatgcgactccttcacctctactatcaacgagctgaatcattgcctatccctgcgcacgtatctggtcggcaatagtctgtctctggccgatctctgcgtctgggcaactttaaagggtaatgcagcctggcaggagcagctgaagcagaagaaggcccctgttcatgtgaaaagatggttcggcttcttagaagcacagcaagcatttcagtcggtcggcaccaaatgggacgtcagcacaaccaaggctcgcgtggcgccagaaaagaagcaggatgtgggcaagtttgtcgagctacccggcgccgaaatggggaaggtgactgtgagattccccccagaagccagcggttacctgcacataggccatgcaaaggctgctcttctcaaccaacactaccaagtaaatttcaaggggaagcttattatgagattcgatgatacgaatcctgaaaaggagaaggaagactttgagaaggtgattaagagcgtcgtgatgacgttgtgtcagaagtccattaaggtgaccggcttgcccaacacatttatggtgatcctggaggacgtcgcaatgctgcatattaagcccgaccagttcacgtacacttctgatcacttcgagaccattatgaaatatgccgaaaagctcatccaggaggggaaagcctatgtcgatgatacgcccgccgaacagatgaaggctgaacgagagcagagaatcgatagcaagcacagaaagaatcccattgagaagaatcttcagatgtgggaagagatgaagaaaggttctcagttcggtcagtcctgttgtctgcgcgcaaaaattgacatgtccagcaacaatgggtgcatgcgggaccccaccctgtacaggtgcaagatacaaccccatcccagaaccggaaataagtataatgtttatcccacatatgatttcgcctgccccattgtcgactctatcgaaggcgtgacgcatgcacttcgcactacggagtatcatgatagggatgagcaattctactggatcattgaagctctgggaattcggaagccctatatctgggagtattctaggctgaacttgaataatacagtcctctctaagcggaagctgacctggttcgtaaatgaaggacttgtggatggctgggatgatccaagattcccgaccgtgcggggagtccttcgccgagggatgaccgtggagggtttgaagcagtttatagccgcccagggctcctcacggagcgtggtgaacatggaatgggacaagatatgggccttcaataaaaaagtgatcgacccggtcgctccccggtacgtagccctgctgaaaaaggaagtgatcccggtgaatgtaccggaagcccaggaggagatgaaggaggtcgccaaacacccgaagaatcccgaagtggggctcaagcccgtttggtattcacctaaggtgttcattgaaggagctgacgctgagacattctctgagggggaaatggtgacctttattaactggggtaacctgaatataactaagatccataaaaatgccgacggcaagattatttcactggatgctaagctgaatttagagaataaggactataagaagactacgaaggtcacctggctggccgagacaactcacgccctgccaatacccgtgatttgtgtgacctatgaacatctgataacgaagcccgtgctggggaaggacgaagacttcaaacaatacgtgaataaaaacagcaaacatgaggaactaatgcttggcgacccctgcctcaaagacctcaagaaaggcgatattattcagctgcagaggcgtggctttttcatatgcgatcagccatacgaaccggtgagcccttacagttgtaaagaggcgccctgtgttctcatttacatcccagacggccataccaaagagatgcccacttccggatcaaaagaaaagacaaaggtggaggcaacgaaaaatgaaacatccgccccatttaaggagagaccaacacctagtctgaataacaactgcaccacctcagaggattccctagtcctgtacaaccgtgttgctgtccagggcgatgttgtaagggagctgaaagccaaaaaggcaccaaaagaggacgtggacgccgcagtgaagcagctcttgtcattgaaagctgaatataaagagaaaaccgggcaggagtacaagcccggcaaccctcctgctgaaattggccagaacatcagcagcaattcatcggcctccatcctcgagtctaagtctctgtatgacgaggtggcagctcagggtgaggttgttcgcaaactgaaggcagaaaaatctcccaaagcgaagattaacgaggcggtggaatgtctgctgtctcttaaggcccaatacaaggagaagactgggaaggagtacattccaggccagccccctttgtcgcagtcaagcgactctagccctactcggaatagcgaaccagcagggttggagaccccagaggccaaagtcctgttcgataaggttgcttctcagggggaagtggtgcgaaaactgaagaccgagaaagcccctaaggaccaagttgacatagccgtacaggaactcctgcaacttaaggcccagtacaaatccctgatcggcgtcgagtacaagccagtttccgcaactggagctgaagacaaggataaatag

SEQ ID NO: 189447 - DNA, 2928 bp, synthetic construct
  misc_feature 1..2928: note = Description of Artificial Sequence: Synthetic coding sequence
  source 1..2928: mol_type = other DNA
atggccaccctgagcctgaccgtgaacagcggcgacccccccctgggggcccttctggccgtggagcatgttaaagacgatgtgtccatttcggtggaggaaggcaaagagaatatcctccacgtgagtgaaaatgtaatcttcactgacgtcaattccatccttcggtaccttgctcgagttgccacaacagctgggctgtatggttcaaatctgatggagcacacagaaattgaccattggttggaattcagtgcgaccaaactgtcctcgtgcgattctttcacgtctacgatcaatgagttaaaccactgcctgtccctgaggacctaccttgtcgggaactccctgtccctagccgacctgtgcgtttgggctaccttaaagggaaacgctgcttggcaggaacagttgaagcagaagaaggccccagtccatgtcaaaagatggttcggttttttggaagcacagcaggcgtttcaatccgttggaaccaagtgggacgtcagcaccacaaaagctcgcgtggctccggagaagaagcaggacgtgggcaagttcgtggagttacccggtgccgagatggggaaagtgacagtccggtttcctccggaggcttccggctatctacacattggacacgcaaaggccgcattgctcaatcagcactatcaggtcaattttaagggcaagttaatcatgcgatttgacgatacaaacccagaaaaggaaaaggaggacttcgaaaaggtgatcttagaagacgtggctatgctccatatcaagccagatcagtttacttacacttcagatcattttgagactatcatgaaatatgcggagaaacttatccaagagggaaaggcctatgtcgacgacaccccggcagagcagatgaaagctgagcgtgagcaaaggattgactccaaacacagaaagaatcctattgaaaagaacctgcaaatgtgggaagaaatgaagaaagggagtcagttcgggcagtcttgctgcttacgggcgaaaatagacatgtcttcaaacaatggctgtatgcgcgaccctactctgtaccggtgcaaaattcagccccacccaagaaccggcaataagtataacgtgtatcccacatacgattttgcttgccccattgtggattcaatcgaaggggtcacacatgccttgagaacgacggagtatcacgacagagacgagcagttttactggatcatcgaagctctgggaatccgcaagccgtacatctgggaatactcccgcctgaacctgaacaatactgttttatcgaagagaaagctgacttggttcgtgaacgaaggtctggttgatggatgggacgaccccagatttccaaccgtccgaggagtcttacgccgtgggatgactgtcgagggtctgaagcagtttatcgccgcccagggatctagccggtctgtggtcaatatggagtgggataagatctgggcctttaacaaaaagctccgggcactgtgcaagaaagtcatcgatcccgtggctcctcgctatgtggcactcctgaagaaggaagtcatacctgtcaacgtgcctgaggcacaggaagagatgaaggaagtcgctaagcacccaaaaaacccagaagtgggcctgaagcccgtgtggtattcgcctaaagtgtttatcgaaggagccgatgctgaaactttctctgagggcgagatggtgacttttatcaactggggcaacttgaacattaccaagatccataagaatgctgacgggaaaataatctcactggatgcgaaactgaacctggaaaataaggactataaaaagaccactaaggtgacatggttagctgaaacaacacacgctttgcctatacccgtgatttgcgtgacctatgaacatctgataacaaagcctgtcctgggaaaagacgaggatttcaaacagtacgtgaacaaaaactctaaacatgaggaacttatgctcggcgacccgtgcttgaaagatttgaagaagggggatattattcagctacagagacgggggttttttatttgcgaccagccatatgagccagtctcaccgtatagttgtaaggaggccccttgtgttctcatttacatccctgatggtcacactaaagagatgccaacttcaggttccaaggagaagaccaaggtcgaggcaacaaagaatgagaccagcgcccccttcaaggagaggcccaccccatccctaaacaataattgtacgacatccgaggactcactcgtactgtataaccgcgtggctgtccagggcgatgttgtgcgggagctgaaggctaagaaggcccccaaggaagacgtggacgccgccgtaaagcagctcttgtccctgaaggctgagtacaaggagaagacaggtcaggaatacaaaccgggaaacccacctgcagaaattggacagaatataagctctaatagttccgcaagtatcttggaaagcaaatccctctacgacgaagtggcggcacaaggcgaggtggtgagaaaactgaaagcggaaaagtctcctaaagccaagatcaacgaagccgtcgaatgcttactgtcgcttaaggcccagtataaagaaaaaacggggaaagagtacatcccgggacagccaccactgtcccaatcttctgactcttcaccgaccaggaattcagagcccgctgggctggaaaccccagaagctaaagtgttgttcgataaggttgcttcccaaggcgaggtcgttcggaaactaaaaactgaaaaggctcccaaggatcaagttgatatagctgttcaagagctgctccagttaaaagcccagtacaagagtcttattggggtggagtataagccagtgagcgctacaggcgcagaggataaggacaaaaaaaagaaggaaaaatag

SEQ ID NO: 189448 - DNA, 1572 bp, synthetic construct
  misc_feature 1..1572: note = Description of Artificial Sequence: Synthetic coding sequence
  source 1..1572: mol_type = other DNA
atggccgccctgctgcggcggctgctgcagcgggagcggcccagcgctgcctcaggccggcccgtcgggaggagagaagctaatctggggactgacgcaggcgttgccgtccgtgtgcggttcgcacctagcccaacagggttcctccacttgggcggacttaggaccgctctttacaattacatatttgcaaagaagtaccaaggctccttcatactgaggctggaagacaccgaccagacccgggttgtccctggcgccgccgagaacatcgaggacatgctcgagtgggcaggcatccctcccgatgaatctcctcgccggggaggccctgccggcccttaccaacagagccagcgtctggagttgtacgctcaggccacagaggcgctgctgaaaacaggagccgcttacccatgtttttgttccccccagcggctcgagctgctgaaaaaagaggccctgaggaaccatcaaacgcctcggtatgacaaccgctgtcgaaatatgagtcaggaacaggtggcacagaaactagccaaggatcccaaacctgcgatcagatttcgactggagcaagttgtacctgccttccaggacctggtctacgggtggaatcgccacgaggttgcttccgtcgagggggatcctgttataatgaaaagcgatggtttccctacataccatcttgcgtgcgttgttgacgatcatcacatgggcatcagccatgtgctgcgcggctccgaatggctggtgtccaccgcaaagcacctccttctgtatcaggcgctcggttggcagcccccgcactttgcccacctgcccttgctactgaatcgggacggcagcaaactgtccaaacggcaaggagatgtgttcctcgaacattttgctgccgacggattcctgccagattccttattggatatcattaccaattgtggatcaggatttgccgagaaccagatggggcgtaccctcccagagcttatcacacagtttaacctcacccaagtgacctgtcattctgccttgctggatctggaaaagctgccagaatttaatcgcctccatcttcaacgtctcgtctccaacgagagccagaggaggcagttagttggtaagcttcaggttctggtcgaggaagccttcggatgccaactgcaaaatcgggatgtcctcaaccctgtgtatgtggagaggatactgctgctccgccaaggtcacatctgccgcctgcaggatctagtctcaccggtgtatagttatctgtggacacggcccgcagttggcagagcccagctggatgccatcagtgagaaagtggatgtgatcgccaagcgcgttttgggcctgcttgagcgctcctccatgtcactcactcaagatatgctgaatggtgagctcaagaagctatccgaaggcctcgagggtacaaaatatagcaatgtgatgaaacttctccggatggctctatcgggtcagcagcagggtcctccagtcgccgaaatgatgctggctttaggcccaaaagaggtgagggaaaggatccagaaggtagtgagcagctag

SEQ ID NO: 189449 - DNA, 1572 bp, synthetic construct
  misc_feature 1..1572: note = Description of Artificial Sequence: Synthetic coding sequence
  source 1..1572: mol_type = other DNA
atggccgccctgctgcggcggctgctgcagcgggagcggcccagcgccgcaagtggccgtccagtgggaaggagagaggcaaatctggggaccgacgctggggttgccgtgagggtacgcttcgcaccctcccccaccggattcctgcacctaggtggcctgagaacagccctttataactatatattcgccaagaagtaccagggaagtttcattctcagactggaggatactgatcagacccgcgtagttcccggagcagccgaaaacatcgaggacatgttagagtgggcgggcattcctccagacgaatctcccaggcgcgggggccccgcggggccctatcagcagagtcagcggttggaattgtacgctcaagctacggaggccctgctgaagaccggtgccgcctacccctgcttttgctctcctcaacgcctggagctgcttaagaaagaagccctgcgcaaccaccagactccccgatacgacaaccgctgtaggaatatgtcccaggaacaggtggctcagaagctggccaaggatcctaagccagccatccgtttccgcctggaacaggtggtgcccgcctttcaggacttggtttacggctggaatcggcatgaagttgcttcagtggagggggatcccgtcatcatgaaaagcgacggttttcccacctatcacctggcttgtgtggtcgacgaccaccatatgggcataagtcacgtgctccggggaagtgaatggctggtgtcaacagccaaacacctgctgctctatcaggcactcgggtggcaacctcctcacttcgcccatcttcccttactcttaaaccgagacggaagcaagttgagtaagcgacagggcgatgttttcttggaacattttgcagcagacggtttcctccctgactctctgcttgatatcattactaactgcggcagcggatttgcagagaaccagatgggcaggactctgccggagttaatcacccagttcaacctgacccaggtaacgtgccacagtgctctcctggacctggaaaagctaccagagttcaacagacttcatttgcagagattagtgtctaatgaatcacaaagaaggcaactagtgggcaaactgcaagtgctggtggaggaggctttcggttgccaactacaaaatcgtgatgtcctgaaccccgtctatgtcgaacggattctccttctccgccagggacacatctgtcgtcttcaagatttagtgagcccagtgtactcctacttatggacccgccctgccgtgggaagagctcagctggacgctatctctgagaaggtggatgtgattgccaaacgagttctcggactactggaacgcagttctatgtccctgacccaggatatgctgaacggggaactgaagaaattgagcgaagggctagaaggtaccaaatactccaatgtgatgaaactgctacggatggctctctccggacagcagcaggggcccccggttgctgagatgatgctggcactgggcccaaaggaagtcagagagcgaattcagaaagtggtttccagttag

SEQ ID NO: 189450 - DNA, 321 bp, synthetic construct
  misc_feature 1..321: note = Description of Artificial Sequence: Synthetic coding sequence
  source 1..321: mol_type = other DNA
atggcccaggagttcgtgaactgcaagatccagcccggcaaggtggtggtattcatcaaaccaacttgcccatactgtagacgagcacaggaaatcttaagccagctgccaatcaagcagggtctgcttgagtttgtagacatcacagccactaatcataccaatgagatccaagactatttgcagcagctcaccggagcaaggactgtgcccagggtgtttattgggaaggactgtatcggaggctgtagcgacctcgtgagtttgcagcagtctggcgagctgcttactaggctgaaacagatcggggctctccagtag

SEQ ID NO: 189451 - DNA, 321 bp, synthetic construct
  misc_feature 1..321: note = Description of Artificial Sequence: Synthetic coding sequence
  source 1..321: mol_type = other DNA
atggcccaggagttcgtgaactgcaagatccagcccggcaaggtggtcgtgtttatcaagccaacttgtccctactgccggcgggcacaagagatcctatcccagctcccaattaaacaggggttactagagtttgtagacattactgctacaaatcataccaacgaaatccaagattaccttcagcagctgaccggcgctcggacggtgcctagagtgttcatagggaaggactgcatcggcggctgttcagacttagtaagcctgcagcagtccggagagctgctcaccagattgaaacaaattggtgcactgcaatag

SEQ ID NO: 189452 - DNA, 321 bp, synthetic construct
  misc_feature 1..321: note = Description of Artificial Sequence: Synthetic coding sequence
  source 1..321: mol_type = other DNA
atggcccaggagttcgtgaactgcaagatccagcccggcaaggtggtagtctttatcaagccaacttgcccctactgccgaagggctcaggagattctgagtcagctgccaatcaagcagggcttactggaatttgttgacattacagccacgaaccatacaaacgagattcaggactatctccagcaattaaccggagcaagaacagtaccccgggtattcattggcaaagactgtattggtggttgttcagacctcgtctccctccagcagagcggagagctgctgactcgcttgaaacagatcggcgccctacagtag

SEQ ID NO: 189453 - DNA, 321 bp, synthetic construct
  misc_feature 1..321: note = Description of Artificial Sequence: Synthetic coding sequence
  source 1..321: mol_type = other DNA
atggcccaggagttcgtgaactgcaagatccagcccggcaaggtggtggttttcatcaaacctacctgtccttactgtaggcgggcacaagaaattctgtcgcagctacccatcaagcagggactgctcgaattcgttgacatcaccgcaactaaccacactaatgaaatccaggactaccttcaacaattgacgggagcccgcaccgtgcctcgagtgtttatcggcaaagattgtattgggggctgctccgacctcgtgtcactacagcagagcggggaactgctcactcgccttaagcagattggcgccctgcagtag

SEQ ID NO: 189454 - DNA, 321 bp, synthetic construct
  misc_feature 1..321: note = Description of Artificial Sequence: Synthetic coding sequence
  source 1..321: mol_type = other DNA
atggcccaggagttcgtgaactgcaagatccagcccggcaaggtggtggtctttattaagcccacttgcccatattgccggcgcgctcaagagattttgtcccagctccccatcaaacagggactgctcgagtttgtggatatcaccgccactaaccacaccaacgaaattcaggactacctacaacaacttaccggcgctcggacagtgcccagggtgttcattgggaaggattgcattggcggatgctcggatctcgtgtctctgcagcagtccggagaattgttgacacggctgaagcagattggcgccctccaatag

SEQ ID NO: 189455 - DNA, 495 bp, synthetic construct
  misc_feature 1..495: note = Description of Artificial Sequence: Synthetic coding sequence
  source 1..495: mol_type = other DNA
atgatctggcggcgggccgccctggccggcacccggctggtgtggagccgcagcgggtcagctggctggctggatcgggccgctggagcggccggagccgctgccgccgctgcctccgggatggagagtaacacttcctcgagcctggaaaacctcgcaaccgcaccggtgaatcagatccaggagaccattagcgataattgcgtcgtcatattctccaagacatcctgttcctactgtactatggcaaagaaactgtttcacgacatgaacgtcaactacaaagtcgtagaactagacttgctggagtacggtaaccaatttcaggatgcactgtacaagatgaccggcgagcgtactgtgcctaggatcttcgtgaacggcacatttattggcggcgctactgacacccacaggttgcataaggagggaaagctgctgccactggtgcaccaatgttacctcaaaaagtctaagcgcaaggagttccagtag

SEQ ID NO: 189456 - DNA, 498 bp, synthetic construct
  misc_feature 1..498: note = Description of Artificial Sequence: Synthetic coding sequence
  source 1..498: mol_type = other DNA
atgaacccccgggacaagcaggtgagccggttcagccccctgaaggatgtttacacgtgggttgccctcgccggcatccagcgtagcggaagccctggacgcacgcggagcgccgcaagacgaatggagagcaatacaagttcctccctcgaaaatttggcgaccgccccggtgaatcagattcaggagacgattagtgacaattgtgtggttattttctccaaaacgtcatgctcctattgcactatggccaagaaactcttccatgatatgaatgttaactacaaggtcgtggagctcgacttattagaatacggcaaccagttccaggacgctctgtataaaatgacaggcgagcgtaccgttccaaggatttttgtgaacggcacattcatcgggggcgcaaccgatacccataggctacacaaggaggggaaactgcttccactggtgcaccagtgctacttgaagaagtctaaacgcaaggagttccaatag

SEQ ID NO: 189457 - DNA, 1008 bp, synthetic construct
  misc_feature 1..1008: note = Description of Artificial Sequence: Synthetic coding sequence
  source 1..1008: mol_type = other DNA
atggccgccggcgccgccgaggccgccgtggccgccgtggaggaggtcggatcggcggggcaattcgaagagctcctccggcttaaggcgaaatcgttactcgtggtgcatttttgggccccttgggccccgcagtgcgcacaaatgaacgaggtgatggccgaattagcaaaagaattgcctcaggtgtcgtttgtaaaactggaggctgagggggtccctgaagtgtccgaaaaatacgaaatctctagcgtgcctaccttcctgtttttcaagaattcccaaaaaatcgatcgactggacggcgcgcacgccccagagctgaccaagaaagttcaaagacatgcatccagcggcagctttctgcccagcgcgaacgaacatcttaaggaagatcttaatctccgcctcaaaaagctaacacacgcagcaccgtgtatgttgttcatgaaggggacccctcaggaacctcgctgtggctttagcaaacagatggtggaaattctgcacaaacacaacatccagttctccagtttcgacattttctcagatgaagaagtccgacaagggctgaaggcctactccagttggcccacatacccccagctgtatgttagcggcgagctgataggaggccttgacatcatcaaggagcttgaggcttccgaagaactcgatactatctgcccaaaggcacccaaattagaagaacgactgaaggtgctgacaaacaaggccagcgtgatgctcttcatgaagggaaacaaacaggaagccaaatgcgggttttccaaacaaatcctggagatcctgaatagcaccggcgtcgagtacgagacctttgacattctggaagacgaagaggtgaggcaggggctcaaagcctattccaattggcccacgtatccccaattgtatgttaagggcgaacttgtgggcggtttggacatcgtcaaggaattaaaggagaatggggagcttctccccatcttaagaggtgaaaattag

SEQ ID NO: 189458 - DNA, 1008 bp, synthetic construct
  misc_feature 1..1008: note = Description of Artificial Sequence: Synthetic coding sequence
  source 1..1008: mol_type = other DNA
atggccgccggcgccgccgaggccgccgtggccgccgtggaggaggtcgggtctgccggccagttcgaggagctgttgcgtttgaaagcgaagagccttctggtcgtgcatttctgggccccatgggcgccccagtgcgctcagatgaacgaagtcatggcggaacttgcaaaagagctgcctcaagtttcttttgtgaagctggaggctgagggagttcccgaggtgagcgaaaagtacgagatatctagcgtcccaacattcctcttctttaaaaatagccaaaagatcgatagactcgatggtgctcatgcccccgagctgacgaaaaaggtccaacgacatgccagctctgggtcttttttgcctagcgcaaacgaacatttaaaggaggacctgaatctgcggttaaaaaaactcactcacgccgccccatgcatgctgttcatgaaaggtactccccaggagcccagatgcggattttccaagcagatggttgagattttgcacaagcataacatccagttctccagctttgatatctttagcgacgaagaggttagacagggtttaaaggcttacagttcgtggccgacatacccccagctatacgtgtctggagagctcattggcggattagatattatcaaggagcttgaggccagcgaagagttagataccatctgccccaaagctcccaaactcgaagaacgcctgaaagtgctgactaacaaagcaagcgtgatgctgtttatgaaaggcaacaagcaggaagctaagtgcggatttagcaagcagatactggagatcctgaacagtacgggggtggagtacgagacctttgacatcttagaagacgaagaggtcagacagggactgaaggcctactcaaactggccaacatacccccaactgtacgtgaagggcgaactggtgggagggctcgatatagttaaagaacttaaggaaaacggggaactactgcccatcctgcgtggggagaactag

SEQ ID NO: 189459 - DNA, 1008 bp, synthetic construct
  misc_feature 1..1008: note = Description of Artificial Sequence: Synthetic coding sequence
  source 1..1008: mol_type = other DNA
atggccgccggcgccgccgaggccgccgtggccgccgtggaggaggtgggaagtgctggccagtttgaagaactcctgcggcttaaggccaagtctctgcttgtcgtacacttctgggccccttgggctccccagtgtgcacagatgaatgaggtgatggctgaactggcaaaagaattgcctcaggtgagctttgtgaaactcgaagcagaaggtgttccagaggtctctgagaagtatgagatatcctccgttccaacttttctcttctttaagaacagccagaagatcgaccggcttgacggcgctcacgctccagagctgacgaaaaaggtacagcggcacgcttccagcgggagcttcctgccatcagctaacgagcatttgaaggaagatctgaacctcagattgaagaaactcacccacgctgctccctgcatgctgttcatgaagggaacaccccaggagcccagatgcggatttagtaaacagatggtcgagatactgcataaacataatatacagttctctagctttgatatattctcggatgaggaagtgcgccagggtctgaaggcatacagttcgtggccaacctacccccagctgtacgtcagtggcgagcttatcggtggactggacattattaaagagctggaagcaagtgaggaactggatactatttgcccaaaggcacctaaattggaggaacgccttaaagtcctcactaacaaggccagcgtgatgctgttcatgaaaggtaacaaacaagaggctaagtgtggatttagcaagcagatactagagatacttaacagcactggagttgagtatgaaacctttgatatactggaggatgaagaggtgagacaaggactaaaggcatatagcaattggccgacctaccctcaactgtacgtaaaaggggagctcgtgggcggcctggatatcgtgaaggagctgaaggaaaacggcgaactcttacccatactgaggggcgaaaactag

SEQ ID NO: 189460 - DNA, 474 bp, synthetic construct
  misc_feature 1..474: note = Description of Artificial Sequence: Synthetic coding sequence
  source 1..474: mol_type = other DNA
atgagcggcagcctgggccgggccgccgccgccctgctgcggtgggggagaggagccgggggaggcggcctctgggggcccggtgtgcgagcagcaggaagtggcgcgggcggcggagggtccgcagagcagctggacgcccttgtgaagaaagataaagtggtcgtttttcttaagggcactcctgaacagccgcaatgtggcttttcgaatgccgtggtgcagatcttgaggctgcacggagtaagagattacgccgcgtataatgttctggatgatcctgagctacgccaaggaataaaagactactccaattggcctactatcccccaggtatacctgaacggggagttcgtgggggggtgcgatatccttctccagatgcaccagaatggagacctcgttgaggagttaaagaaactgggcattcattctgctctcttggacgagaagaaggaccaggatagcaaatag

SEQ ID NO: 189461 - DNA, 873 bp, synthetic construct
  misc_feature 1..873: note = Description of Artificial Sequence: Synthetic coding sequence
  source 1..873: mol_type = other DNA
atgctgaagcgggagatgaagcccgagagcgaccggccccggaaggtccggtttaggatcgccagtagccattctggaagagtgctcaaggaggtttacgaggatggacagccatccggttcgctcgattcagagtgtgcttcaatatgtggcattgatgggctgggcgacagtgacgggcagcaaaatggccacatcgaatccgagggcgacgagaatgagaacgatcaggattccttactggtgctcgctagggccgcctcagagaagggatttggcacacgccgggtgaatatcctgagcaagaacgggaccgttagaggtgtcaagtataaggtgagcgccggccaggccctttttaacaacctcaccaaagtgttacagcagccaagcaccgaccttgagttcgatagagtggtcatttacacaacctgcctgcgggtcgtacggacaaccttcgagcgttgcgaactggtccgcaagattttccaaaatcacagggtgaaattcgaagaaaaaaacatagcccttaatggcgagtacggaaaggaattggatgagcggtgcagaagagttagtgaagcaccttccctgccagtggtgtttattgacgggcactacctgggtggcgctgaaaaaattcttagcatgaacgaatctggcgagctccaggacattctcaccaagattgaaagagttcagcatccccatgaatgcccgtcctgtggtggcttcgggttcctcccttgtagtgtttgccacggctctaaaatgtccatgtttaggaattgcttcaccgactctttcaaggctcttaagtgtaccgcatgcaacgagaacggactgcagcggtgcaaaaactgcgctggctag

SEQ ID NO: 189462 - DNA, 828 bp, synthetic construct
  misc_feature 1..828: note = Description of Artificial Sequence: Synthetic coding sequence
  source 1..828: mol_type = other DNA
atgagccactgcagcagccgggccctgaccctgctgagcagcgtgtttggcgcctgcggcctgttgctagttggcattgcggtaagcaccgattattggctctatatggaggagggcactgtcctccctcagaatcaaactaccgaggtaaagatggctctccatgccgggctgtggagagtctgtttcttcgcaggaagggagaaaggtagatgcgttgcttccgagtactttttggaacccgaaataaatttggttactgaaaacactgagaatatacttaagacagtccgtaccgccacccctttccccatggtctcactgtttctggtcttcactgcctttgtgatatctaacattggccatatccgcccccagcggaccatcctggctttcgtgagcgggatcttttttatattgagcggcctctccctggtggtcggcctcgtgctatatatctcctccatcaatgatgaagtgatgaatcgacccagtagctcagagcagtacttccactaccggtacggctggtccttcgcctttgcggccagcagctttttgctcaaagagggcgctggcgtgatgtccgtgtacttatttacaaagcggtacgccgaggaggaaatgtaccggccccatccagccttctatcgtccacgactgtctgattgtagcgactactctggacaattcctacagccggaagcctggcgacgagggcgctcaccgagtgatatttcttccgatgtcagcatccaaatgactcagaactaccctcctgcaatcaaataccccgaccacctccacatcagcacttctccctgctag

SEQ ID NO: 189463 - DNA, 987 bp, synthetic construct
  misc_feature 1..987: note = Description of Artificial Sequence: Synthetic coding sequence
  source 1..987: mol_type = other DNA
atggccctgcggggcgtgagcgtgcggctgctgagccggggccccggtctgcacgtattacgcacctgggtctcatctgcagctcagactgctagccgccctgaattcgactggcaggacccactggttctggaggagcagctgacaacagatgagatactcataagagacacgtttcgaacctactgtcaggagcgtcttatgccccgaattcttctcgctaatcgtaacgagggctatgggtgtgcaggagtgtcttcagttgcctatgggctgcttgcaagggaactcgagagagtggacagtggataccgcagcgcaatgtccgtgcagagtagtctagtcatgcaccccatttacgcctatggcagtgaagagcagcgccagaagtatctaccacagctggccaaaggagaattgctgggctgctttggcctaactgaaccaaattccggatccgatccgtcctctatggaaacgcgcgcacattacaacagttcgaacaaatcctacacactgaatggcactaagacctggatcactaatagtccaatggccgacctgttcgtggtttgggcacgatgcgaggacggttgcatacggggctttcttctcgagaaaggaatgaggggactatccgccccgcgtatccaaggtaagttttcccttagagccagcgccactggcatgatcatcatggatggggtggaagtccccgaggaaaacgtgctccccggtgcttcttccctcggcggaccattcgggtgtttaaataatgcaagatatggcatcgcctggggcgtcctgggcgccagcgaattctgcttacatacagcacgacagtatgccctggacagaatgcagtttggagtgcctctagctcggaatcagctcatacagaaaaagctggcagatatgttaacagagattacgttaggcttacatgcatgcctgcaacttggccggttgaaggatcaagacaagtag

SEQ ID NO: 189464 - DNA, 1185 bp, synthetic construct
  misc_feature 1..1185: note = Description of Artificial Sequence: Synthetic coding sequence
  source 1..1185: mol_type = other DNA
atgcggagcagcagcggcacccccagcgcccccaccgcccggcgggatagctgtctcgcctcttgctggccaattgctaccaaaagcctcgccctgttacctcgccttgagtgcagcgggacgattcttgcacactgcaagttctgcctgccaggttcatccgattcgccggcaagcactcctctggtggctggtattacaggctatggctgcgcaggagtttcaagtgtggcctatggactgcttgcacgagaacttgagagggtggactctggatataggagcgccatgtctgtacaatcctccctggtaatgcaccctatttacgcgtacgggagcgaggagcaacggcagaagtatctgccccaactggccaaaggcgagctgcttggctgttttggcctgaccgagccaaactcaggctctgatccatcttcaatggaaacccgagcacactataactccagtaataaaagctatacactaaatggaaccaagacgtggattactaacagcccaatggctgatctcttcgtggtgtgggcccgctgtgaagacgggtgcatcaggggctttcttctggagaagggtatgagaggtctgtccgccccacggatccagggcaaattcagcctgcgggcctccgccactggaatgattattatggatggcgtagaggttcctgaagaaaacgttctccccggcgcgagcagcctcgggggaccgttcgggtgcttgaacaatgctaggtatggaatcgcctggggagttttgggagcgtctgaattttgtctccacaccgcaagacagtacgcgttggatagaatgcagtttggagtgcccctggctaggaatcagttaatccagaagaaactggccgatatgctgacggagattacccttggattacatgcctgcttgcagctgggaagactgaaagatcaagacaaagccgcacccgaaatggtcagtctcctgaaacggaacaattgtggtaaagccctcgacatcgcacggcaggcacgggacatgctcggaggtaacggcatttcagacgaataccacgtgatccggcatgctatgaacttggaggcggtcaacacctacgagggaactcacgatatccacgcacttatcctggggagggcgattacggggattcaagctttcaccgcctcaaaatag

SEQ ID NO: 189465 - DNA, 1287 bp, synthetic construct
  misc_feature 1..1287: note = Description of Artificial Sequence: Synthetic coding sequence
  source 1..1287: mol_type = other DNA
atggccctgcggggcgtgagcgtgcggctgctgagccggggccccggcctgcatgtgcttcgtacttgggtttcttccgccgcccaaacagaaaaagggggccgcacacagagccagctcgcaaaatcgtcacggcccgagtttgactggcaagacccactggtgcttgaggaacagctcaccactgacgagattctgatccgcgacaccttcagaacatactgccaggaaaggctgatgcctaggatactcctggctaatcggaacgaagtgtttcaccgggagataatatcggagatgggcgagctgggggtcctcggaccaaccataaaagggtacggctgtgccggggttagcagtgtggcctacggtctgctcgccagagagctggaacgagtggacagcggataccgcagtgctatgtccgtgcagagcagcctagtgatgcatccgatctacgcgtacggaagcgaggaacagcggcagaagtatctgccccagctcgctaagggtgagctcctgggctgcttcgggctcacagaacccaactctgggagcgatccctcaagtatggaaactagagcccactataatagttcaaacaagtcttacactctgaacgggacaaagacctggattacgaattcaccaatggctgatctgtttgtggtgtgggcccggtgcgaggatggctgcatccggggatttctgctcgagaaggggatgcggggcttgagcgctcctcggatccaaggaaaattctcgttaagggcatcagccacaggtatgataatcatggacggagtggaagtgcctgaggagaacgtcctgcccggtgcgtcaagtctgggcggcccgttcggatgtttaaataatgctcgatatggaatcgcatggggtgtgttgggcgcctccgagttctgcctccacaccgcacggcagtatgcccttgaccgaatgcaatttggggttccgctcgctagaaaccagttgattcagaagaagctggctgacatgcttacggaaatcactctcggacttcacgcctgtctacagttgggacgccttaaggatcaggacaaggctgcccctgaaatggtctctctgttaaagaggaataattgtgggaaggctctggacatcgccagacaagcaagagacatgctgggggggaatgggattagcgacgaataccacgtgattcggcacgcgatgaatctggaagctgtgaacacctacgaggttgtccagatgtgctctctaaagagacggtggaattccctatag

SEQ ID NO: 189466 - DNA, 297 bp, synthetic construct
  misc_feature 1..297: note = Description of Artificial Sequence: Synthetic coding sequence
  source 1..297: mol_type = other DNA
  misc_feature 1..144: note = DNA
  misc_feature 145: note = RNA
  misc_feature 146..297: note = DNA
atgtgcgccgcccggctggccgccgccgccgccgccgcccagagcgtgtatgcattttccgcccgtcctcttgccggtggggagcccgtgtctctggggtcattgcgtggaaaggttttacttattgagaacgtcgcgtcactgtgaggaaccacagtgcgagattacactcagatgaatgaactgcagcggaggctaggtcccagggggctggtcgtgctcgggttcccttgtaatcaatttgggcaccaggttagacgagccgaacgcgggggagcaggggctgacgtccagtag

SEQ ID NO: 189467 - DNA, 612 bp, synthetic construct
  misc_feature 1..612: note = Description of Artificial Sequence: Synthetic coding sequence
  source 1..612: mol_type = other DNA
  misc_feature 1..144: note = DNA
  misc_feature 145: note = RNA
  misc_feature 146..612: note = DNA
atgtgcgccgcccggctggccgccgccgccgccgccgcccagagcgtgtatgcattctctgctcggccactggctggtggggagccagtatctctcggctcacttcgcggtaaggttcttctcattgagaatgtggcttctctgtgaggtaccaccgttcgagactacacacagatgaacgagctccaaaggcgcctaggccccagaggcctggttgtcctggggtttccctgcaatcaattcggtcatcaggaaaatgcgaagaacgaggagattcttaattccctcaagtatgtcagaccaggcggagggtttgaaccaaacttcatgctttttgagaaatgtgaagtgaacggcgctggtgcacatccattattcgctttcttgcgggaggccctcccagccccaagcgacgacgccacagccctcatgaccgatccgaagcttattacttggagtcccgtgtgtcggaacgacgtggcgtggaatttcgagaagttcctcgtgggccccgacggagtgccgctccgccgttattccagacgcttccaaactattgacatcgagcccgatatagaggccctgcttagccagggaccatcttgtgcatag

SEQ ID NO: 189468 - DNA, 573 bp, synthetic construct
  misc_feature 1..573: note = Description of Artificial Sequence: Synthetic coding sequence
  source 1..573: mol_type = other DNA
  misc_feature 1..117: note = DNA
  misc_feature 118: note = RNA
  misc_feature 119..573: note = DNA
atggccttcatcgccaagagcttctacgacctgagcgccatcagcctggatggggagaaagtcgacttcaacaccttcagaggaagggctgtgctcattgaaaacgtggcttccctttgaggcaccacgacgcgggatttcactcagcttaatgaactccagtgcagatttccacgcagactggtcgtactgggtttcccttgcaaccagtttgggcaccaggagaattgccagaacgaggaaatcctgaatagtttgaaatatgtcaggccaggagggggttatcagccaacgttcacattggtgcaaaagtgtgaggtgaatggacagaatgagcacccagtgtttgcctatctgaaggacaagctcccttacccatatgatgaccctttctccttgatgactgatccaaaattgatcatttggagtcctgtccgacgcagtgacgtggcctggaactttgagaaattcctcataggcccagagggagaaccgttcaggcgatacagccggacatttccgactatcaacatagagcccgacattaagagacttctcaaagtggccatatag

SEQ ID NO: 189469 - DNA, 594 bp, synthetic construct
  misc_feature 1..594: note = Description of Artificial Sequence: Synthetic coding sequence
  source 1..594: mol_type = other DNA
  misc_feature 1..216: note = DNA
  misc_feature 217: note = RNA
  misc_feature 218..594: note = DNA
atgagcctgggccggctgtgccggctgctgaagcccgccctgctgtgtggtgctttagctgcgcctggccttgcaggaactatgtgtgcctctcgggacgattggagatgtgcaagatccatgcacgagttctccgccaaggacatcgacggtcatatggtcaacctagacaaataccgagggttcgtctgcattgtcaccaatgtagcgtctcagtgaggtaagaccgaagtgaactatacacagctggtcgatctccatgctcgatacgctgaatgcgggctgaggatcttggcattcccttgcaatcagttcggcaaacaagagccaggaagcaatgaggagatcaaggaatttgcagccggttataacgtgaaattcgacatgttttctaaaatctgtgtcaatggggatgacgcccatccgctgtggaaatggatgaagatccagcctaagggcaagggaattttaggcaacgccataaaatggaattttactaagtttctaatagataagaacggctgcgtggttaagcggtacgggccaatggaagagcccctggtgattgaaaaagaccttccgcactacttttag

SEQ ID NO: 189470 - DNA, 666 bp, synthetic construct
  misc_feature 1..666: note = Description of Artificial Sequence: Synthetic coding sequence
  source 1..666: mol_type = other DNA
atgaccacccagctgcgggtggtgcacctgctgcccctgctgctggcctgcttcgtgcagactagtccaaaacaagagaaaatgaaaatggactgccacaaggacgagaaggggacaatctatgattatgaagctattgctcttaacaaaaacgagtacgtgagctttaagcagtacgtcggcaaacatatactgtttgtgaatgtggctacatactgcggactcaccgctcaatatcccgagctgaacgcattacaggaagaactgaagccttatgggctggtcgtgctggggttcccatgcaaccagttcgggaagcaggaacctggcgacaataaggagatcctccccggtctgaaatacgtgagaccgggaggaggtttcgtgcctagcttccaactttttgagaagggcgacgtgaacggcgagaaggagcagaaggtgtttagctttttaaagcacagctgcccacacccctccgagatactcgggacctttaaaagcatttcctgggatccggtgaaagtccacgacatcaggtggaacttcgagaaattcctcgtggggccagatggtatccctgtgatgagatggtctcaccgggccacggtctcatccgtcaagaccgatatcctagcttatcttaagcagttcaaaacgaagtag

SEQ ID NO: 189471 - DNA, 303 bp, synthetic construct
  misc_feature 1..303: note = Description of Artificial Sequence: Synthetic coding sequence
  source 1..303: mol_type = other DNA
atgaccacccagctgcgggtggtgcacctgctgcccctgctgctggcatgttttgtgcagacctcacctaagcaagaaaagatgaagatggattgccacaaggacgagaaaggtactatttacgactatgaggctatcgccctgaacaagaatgagtacgtgtcctttaaacagtacgtgggtaaacacattctttttgtgaacgtggctacgtattgtggcctgaccgctcaataccctggcatgtccgtgcagggagaggacctgtacctcgtgtcatcctttcttcgcaaaggcatgtag

SEQ ID NO: 189472 - DNA, 573 bp, synthetic construct
  misc_feature 1..573: note = Description of Artificial Sequence: Synthetic coding sequence
  source 1..573: mol_type = other DNA
atggccgagaagacccagaagagcgtgaagatcgcccccggcgccgtagtttgcgtggaaagcgagattaggggagacgtgaccatcgggccccgcacagtgattcacccaaaagcgcgcatcatagctgaagccggcccgatcgtgatcggcgaaggaaacctgatagaagagcaggcactcatcataaacgcctacccagacaatataacccccgacactgaggatccagaacctaagcccatgatcattgggacaaacaatgtattcgaagtgggctgctactcccaggcaatgaagatgggagacaataacgtgatcgagtccaaagcttacgtgggcagaaatgtgattttgacctccgggtgtattatcggtgcttgttgtaatttaaataccttcgaagttatccccgaaaacacagtcatctacggggcagactgcctgcgccgtgtacagacggagaggccccagccccagactctgcagcttgacttcttgatgaaaattcttcctaactaccatcatctgaagaagactatgaaggggagtagcactccggtgaagaattag

SEQ ID NO: 189473 - DNA, 1440 bp, synthetic construct
  misc_feature 1..1440: note = Description of Artificial Sequence: Synthetic coding sequence
  source 1..1440: mol_type = other DNA
atggcctgccggcaggagccccagccccagggccccccccccgccgctggagcggtggcctcgtatgattacctggtcattgggggggggagtggaggtttggcctctgcgcgccgcgcggcagaactgggcgcccgcgctgccgtagtcgaaagccataaactcgggggcacctgcgtcaacgtgggatgcgtccccaaaaaggtcatgtggaacaccgccgttcacagtgagttcatgcatgaccacgcggactacgggttcccaagttgtgaggggaagttcaactggagggttataaaggaaaaaagggatgcctacgtttcaagacttaacgccatttaccagaataacctgacaaagtctcacatagaaattatccgcgggcacgctgcctttaccagcgaccctaagccaacaatagaggtaagcgggaaaaaatataccgccccccacatcctcatagctactggaggaatgccctccaccccacatgagtcgcagattccaggcgcctctctcggtatcactagtgacggattctttcaacttgaagagctgcccggacggtccgttattgtcggtgccggctacattgctgtcgaaatggcagggatactgagtgctcttggatccaagacctccctcatgattagacacgataaggtactgcgcagctttgactcaatgatttcaaccaactgcaccgaagagctggagaatgccggtgtggaggtgctgaagttctcacaagtcaaggaggtgaaaaaaacgctttccggcctggaagtgagtatggtcactgccgtgcctgggaggctgcctgtcatgaccatgatccctgacgtggattgtctgctgtgggccatagggcgggtacctaatacaaaggatctgtcgctaaataaactcggaattcaaacagatgataaaggacatattattgtcgatgaatttcagaacaccaatgtgaagggcatttacgcggttggagatgtgtgcggcaaggccttgctaactcctgtggccatcgccgcgggtcggaagctcgctcaccgtttgtttgagtataaagaagactccaagctggactataacaatatccctacggtggtgttttcccacccaccgattggcactgtcggtcttactgaggatgaggcaatacacaagtacggcattgagaacgttaaaacctattctacttcttttacaccaatgtaccacgctgtcactaagcgaaagacaaagtgtgtaatgaagatggtctgtgcgaataaggaggaaaaggtggtaggcatccacatgcaaggtctgggttgtgacgaaatgcttcaggggttcgccgtggctgtaaagatgggtgcaaccaaggccgattttgacaatactgtggccatccatcctacatcatcagaggagcttgtgacccttcggtag

SEQ ID NO: 189474 - DNA, 1323 bp, synthetic construct
  misc_feature 1..1323: note = Description of Artificial Sequence: Synthetic coding sequence
  source 1..1323: mol_type = other DNA
atggccctgctgccccgggccctgagcgccggcgccggccccagctggagacgagcggcgagggccttcagagggttcctgttgcttctgccggaaccagccgcattaacgagagctctatcccgcgccatggcctgtcgtcaggaaccccaaccacagggacccccacctgcggccggcgctgttgcctcttacgattacttagtaatcggaggaggctctgggggccttgcctccgccaggagggctgcggaactcggcgccagggctgctgtggtggagtcgcacaagcttggcggtacatgtgtgaacgtgggctgcgtgcctaagaaggttatgtggaatacggccgtgcactctgaatttatgcacgatcacgcggattatggtttcccatcatgcgaaggtaaattcaactggcgcgttatcaaggagaaacgcgacgcctacgtgtccagattaaacgctatttatcagaataacctgaccaagagccacattgagatcatccggggccacgccgccttcacatctgatccaaaaccaaccattgaggtctccgggaagaagtataccgcccctcacattttaatagctactgggggaatgccttcaacaccccatgagagtcagattcctggtgcgtctctggggatcacgagtgacggcttcttccagctcgaagagctgccgggtcgcagtgtgattgtgggagccggatacatcgctgttgaaatggcaggaattctcagtgctctgggctctaaaactagcctcatgatcagacacgacaaaggtattcaaacggacgataaggggcatattatcgttgatgaattccaaaatactaacgtgaaaggaatatacgctgtgggtgatgtttgtggtaaggcccttctcacccctgtggcaatcgctgctggccggaaactggcgcaccgactgttcgagtataaagaagattctaagctggattataacaatattccaaccgtggtgtttagtcatcctcccattgggacagtcggactgacagaagacgaagcaatccacaaatatggcatcgaaaatgtgaaaacatacagcaccagctttacacccatgtaccatgcagtcactaagcgaaagaccaaatgtgtgatgaagatggtgtgtgccaataaagaagagaaagttgtgggtattcacatgcagggactggggtgtgacgagatgcttcagggattcgctgtggccgtcaagatgggcgccacaaaagcggatttcgacaacaccgtggcgattcaccctaccagcagtgaggaacttgtcacactgcgatag

SEQ ID NO: 189475 - DNA, 1410 bp, synthetic construct
  misc_feature 1..1410: note = Description of Artificial Sequence: Synthetic coding sequence
  source 1..1410: mol_type = other DNA
atggccctgctgccccgggccctgagcgccggcgccggccccagctggaggcgcgctgcacgcgctttcaggggcttcctattgctgttgcctgagcccgcagcactgacaagggccctctctcgcgccatggcctgtagacaggaaccccagcctcagggcccgccccctgccgctggtgcagtggcctcttacgattatttggtcattggagggggcagtggaggtctagccagcgcaagacgggcagccgagctgggcgcgcgcgccgcggtggtagaatcacacaagctgggaggaacatgcgtcaatgtgggttgcgtgcccaagaaagtcatgtggaacaccgctgtgcactctgagtttatgcatgatcatgcggactatggttttccatcatgcgagggcaagttcaactggcgggtcatcaaggagaaacgagatgcctacgtatcccggctcaatgccatctatcagaacaacctgacgaaatctcacattgagatcatccggggccatgctgcattcacatcggacccaaagccaacaatagaggtgtctggcaaaaagtacactgcccctcacatcctcatagccaccggggggatgccgtccacgccacatgagagccagatcccaggagctagcctgggaatcacctctgacgggttcttccagctggaggaattgccaggaaggtcggtcattgtgggcgcaggttatatcgctgtcgagatggctggaatcctcagtgccttaggcagtaagactagcctgatgattagacatgataaagtattgagaagttttgactcgatgatttcaaccaattgcaccgaagagttggagaatgctggtgtagaagtgttgaagtttagccagggaatacaaaccgatgacaagggccacatcattgtcgacgaattccagaacacaaatgtaaaagggatttatgcagtcggagacgtttgtgggaaagcactgctgacgccagtggctattgctgctgggaggaaactggctcacagattgttcgagtacaaagaggactctaaactggattacaataatatacccactgtggtgtttagccacccgcctatagggaccgtggggctcacggaggacgaagcgatccacaagtacgggattgagaatgtcaagacgtactccacaagctttactcctatgtaccacgctgtgacgaaaagaaaaaccaagtgcgtgatgaagatggtttgtgctaacaaagaggagaaggtggtaggcatacacatgcaagggttagggtgtgacgaaatgctccagggatttgctgtcgccgtcaagatgggcgccaccaaagccgacttcgacaacaccgtagcgatccatcccacttctagcgaagagcttgtgacattaagatag

SEQ ID NO: 189476 - DNA, 1482 bp, synthetic construct
  misc_feature 1..1482: note = Description of Artificial Sequence: Synthetic coding sequence
  source 1..1482: mol_type = other DNA
atggccctgctgccccgggccctgagcgccggcgccggccccagctggcgccgcgccgcccgggcatttaggggctttttgctgttgctgccagaacctgccgctctcacccgtgccctaagtagggcaatggcctgcagacaagagcctcaaccccagggcccacctccggcagccggggccgtcgcatcctatgactatctcgtcatcggcggtgggtccggcgggctggcctctgccagaagggctgccgagctgggggcacgggctgccgtggtggaaagccacaagcttggaggcacatgtgttaatgttggatgcgtcccaaaaaaggtaatgtggaacactgccgtgcacagcgaatttatgcatgaccacgcagactatgggttccccagttgcgaggggaagtttaactggagggttattaaagagaaacgtgatgcgtacgtgtcaaggcttaacgctatctaccaaaacaatcttaccaaaagtcacatcgagataatcaggggccatgcggccttcacttccgacccaaaaccaactatagaagtttccggcaaaaagtacacagctcctcatattctgattgccaccggtggcatgccatctaccccccacgagagccagatccctggagcctcccttgggattacgtccgacggattcttccagttggaggaactgcccgggagaagcgtgatcgtcggagcaggctatatcgcagtcgagatggccggcattctgtctgccttgggtagtaaaacaagtctgatgataagacacgataaagtgaaagaagtcaagaaaacgttgagcggactcgaagtgagcatggtgacggccgtacctggcaggctgcctgttatgacaatgataccagatgtcgattgcttgctgtgggccatcggtcgggttcccaataccaaggacctcagtctgaataagcttggcattcagacagacgacaagggacacataatagtcgatgaatttcagaacaccaatgttaaaggcatctatgccgtcggggacgtgtgtgggaaggcactgctaacgcccgtcgccatcgcggccgggcgcaaacttgcccaccggttgtttgagtacaaggaggatagtaaacttgactacaacaatatcccaactgtggtgtttagtcacccgccaatagggactgtgggtttgacggaggacgaagctatccataaatatggcatcgaaaacgtaaaaacgtatagcacctcctttacacctatgtaccatgccgtcactaaaagaaagacgaaatgcgttatgaaaatggtctgcgctaacaaagaagagaaggtcgtagggatacacatgcagggcctcggctgtgatgagatgttgcagggctttgcggtagcagttaagatgggcgcaactaaggcggactttgacaataccgtggctatccatccaacatcctccgaagagttagtgaccctgcggtag

SEQ ID NO: 189477 - DNA, 669 bp, synthetic construct
  misc_feature 1..669: note = Description of Artificial Sequence: Synthetic coding sequence
  source 1..669: mol_type = other DNA
atggccgagaagcccaagctgcactacttcaacgcccggggccggatggagtccacccggtggctactcgctgctgccggagtggagttcgaggagaagttcatcaaatctgctgaggatctcgacaaactgcgtaatgacgggtatcttatgttccagcaagtgccgatggtcgagatcgatggaatgaaactggtgcagacccgagcgattttgaattatattgcgtctaagtacaacctgtacggaaaggatataaaagaaagggcacttattgacatgtacattgagggaattgccgatctgggggagatgatactgctgctgcccgtatgtcccccagaggagaaggacgctaaattggccctgatcaaggagaaaataaaaaatagatactttcctgcatttgaaaaagtgcttaaatcccatggacaggactatctggttggcaacaagctgtctagggctgacatacacctggttgagttactatattacgtggaggagcttgactcaagtctgatctcgtcatttcctctgctgaaggcattaaagacgcgcatatctaacctacccactgttaagaaatttttgcagcccggaagcccgagaaagcccccaatggatgaaaagtctcttgaggaagccagaaagattttccgattttag

SEQ ID NO: 189478 - DNA, 669 bp, synthetic construct
  misc_feature 1..669: note = Description of Artificial Sequence: Synthetic coding sequence
  source 1..669: mol_type = other DNA
atggccgagaagcccaagctgcactacagcaacatccggggccggatggaatctattcgatggctgctggcagctgctggtgtagagtttgaagagaagtttattaaatccgcggaggaccttgataagctgcgcaatgatggctacctgatgttccagcaggtgcccatggttgaaattgacgggatgaaactggtccagacacgtgcgatactgaattatatcgcctccaagtacaatctctacggaaaggacatcaaggaaaaagctctcattgatatgtatatcgaagggatcgccgaccttggcgagatgattctgcttctgcccttcagccagcctgaagagcaggacgccaaacttgccttaatccaggagaaaaccaagaaccgctactttccagccttcgagaaggtgctaaagagccatggccaagactacctcgttggaaacaagctgtccagagccgacatacaccttgtggaactactttactacgtggaggagttagatagctcgctgatttcctcttttccgcttctcaaggcgctcaaaacccgcatttccaacttaccaaccgtaaagaagtttttacagcctggttcccccaggaaaccccctatggatgagaagagcctcgaagagagcagaaagattttccgcttctag

SEQ ID NO: 189479 - DNA, 729 bp, synthetic construct
  misc_feature 1..729: note = Description of Artificial Sequence: Synthetic coding sequence
  source 1..729: mol_type = other DNA
atgctgctgctggccccccagatgctgagcctgctgctgctggccctgcctgtgctggcctcaccagcatatgtggcacccgcgcctggccaggctctacaacagactgggatcgtcggcggacaggaggcacccagatccaaatggccgtggcaagtctctctcagggtaagaggtccctactggatgcatttctgcggaggaagtcttatacacccacaatgggtgctaaccgctgcacactgtgttgagcccgatattaaggatctggcggccctgagggtgcagctccgggagcagcatctgtactatcaagaccagcttctgcctgtgtccaggatcatcgtgcaccctcagttctacattatacaaaccggggctgatatcgctctcctggaacttgaagagcccgtgaacatcagttcacatattcacaccgtgactctgccccctgcgtctgagacattccccccaggtatgccgtgttgggttactggatggggcgatgtagataataacgtgcacctacctccgccctaccctctgaaagaagtggaggtgcctgtcgtcgaaaaccacctgtgtaatgcggagtaccacacgggcttacacactggtcatagcttccagatagtacgagatgatatgttgtgcgccgggtcagagaatcatgattcgtgtcagggagacagtggcggccccctagtctgtaaagtcaacggaacgtag

SEQ ID NO: 189480 - DNA, 519 bp, synthetic construct
  misc_feature 1..519: note = Description of Artificial Sequence: Synthetic coding sequence
  source 1..519: mol_type = other DNA
atgttccagcaggtgcccatggtggagatcgacggcatgaagctggttcagactcgtgccattttgaattacatcgctagcaagtataatctgtatgggaaggacattaaggaaagggcgctgatcgacatgtacacggagggcatggcggatcttaacgagatgattctactgctgccactttgccgccccgaagaaaaagatgccaaaattgccctgattaaggagaaaaccaagagtcgttattttcctgcttttgaaaaggtgcttcaaagtcatgggcaagactaccttgtcggaaataagctgtcacgggctgatatttcccttgtggaactattgtattacgtcgaagagctggatagttctttgatctcaaacttcccgcttctaaaagcccttaaaacaagaatttcaaacctgcctactgtaaagaagtttcttcaacccggctccccacggaagccccctgctgatgctaaagcactggaggaggcccgtaagattttccggttctag

SEQ ID NO: 189481 - DNA, 327 bp, synthetic construct
  misc_feature 1..327: note = Description of Artificial Sequence: Synthetic coding sequence
  source 1..327: mol_type = other DNA
atgttccagcaggtgcccatggtggagatcgacggcatgaagctggttcaaaccagagctatcctgaactacatagcaagcaagtataacttgtacggcaaagacattaaggagcgcgccctcatcgacatgtacactgagggaatggcggatcttaacgagatgattctcctgctgccattatgtaggcctgaagagaaggacgccaagatcgcactgattaaggagaaaactaaaagcaggtactttccggcatttgaggcggatatttccttggtagagctgctctattacgtcgaggagctggacagttcactgatctcgtag

SEQ ID NO: 189482 - DNA, 669 bp, synthetic construct
  misc_feature 1..669: note = Description of Artificial Sequence: Synthetic coding sequence
  source 1..669: mol_type = other DNA
atggccgcccggcccaagctgcactaccccaacggccggggccggatggaatctgttcggtgggtcctggctgccgcgggcgtggaatttgatgaggaatttctagagacaaaggaacagttgtataagcttcaggacggaaatcatctgttgttccagcaagtgccaatggtggaaattgacggaatgaaactggtgcagaccaggagcatattacactacattgcagataaacacaatttattcgggaagaatctgaaggaacgaactctcatagacatgtacgtggaaggaacactggatctcctggagctgctgataatgcatccctttctgaaacccgatgaccaacaaaaggaagtcgtgaacatggctcagaaggccatcatccgctatttccccgtgttcgagaaaattctcagaggccacggacagagctttctggtggggaatcagctgtccttggccgacgtgatcctgctgcagactatcctggcccttgaagaaaagatcccaaacatcctgtcagcattcccctttctgcaagagtacacagtgaagctcagtaatatacctactattaagcgtttcctggagccaggatccaaaaagaagcctccacccgatgagatctatgtgcgcaccgtttataacattttccggccatag

SEQ ID NO: 189483 - DNA, 390 bp, synthetic construct
  misc_feature 1..390: note = Description of Artificial Sequence: Synthetic coding sequence
  source 1..390: mol_type = other DNA
atgtacgtggagggcaccctggacctgctggagctgctgatcatgcaccctttcctcaagcctgacgatcagcagaaggaggttgtgaacatggcacagaaagccattatacgttacttccctgtcttcgaaaagatcctccgcggacacggccagtccttccttgtgggaaatcagctgtccctggctgacgtgatactcttgcaaaccatcctggccctggaggagaaaatacctaatatcctttctgccttcccttttctgcaggagtatacagttaaactgtccaatatcccaaccattaagaggttcctggaacctgggagtaagaaaaagccaccgccggatgagatctacgtcagaaccgtgtataacatcttcaggccatag

SEQ ID NO: 189484 - DNA, 669 bp, synthetic construct
  misc_feature 1..669: note = Description of Artificial Sequence: Synthetic coding sequence
  source 1..669: mol_type = other DNA
atggccgcccggcccaagctgcactaccccaacggccggggccggatggagtccgtgagatgggtgctggcggctgccggagtggaattcgatgaggagttcctagaaaccaaagagcagttgtacaaactgcaggacggcaaccacctgctgtttcaacaggtccctatggtcgaaattgatggtatgaagttagtgcagacacgcagcatactgcattacattgctgacaagcacaacttgttcggtaagaacctcaaggagaggaccctcattgatatgtatgtggagggcacacttgacttgttagaactcctcataatgcacccttttcttaagcctgacgaccaacagaaggaggtggtgaatatggcacagaaggctatcataagatattttccagtcttcgagaaaatcctgcggggtcacggacagtctttcctcgtgggtaaccagctttcactcgcagacgtgatcttgctgcaaacaatcctagcactggaagaaaagatcccaaatatcctctctgctttcccctttctgcaagagtacacagttaagctcagcaacattcccactattaagagatttctcgaaccaggctcaaagaaaaagccaccacccgacgagatctatgtcagaacagtgtacaatatctttcggccctag

SEQ ID NO: 189485 - DNA, 270 bp, synthetic construct
  misc_feature 1..270: note = Description of Artificial Sequence: Synthetic coding sequence
  source 1..270: mol_type = other DNA
atgtacgtggagggcaccctggacctgctggagctgctgatcatgcaccctttcctgaagccagatgaccagcaaaaggaagttgtcaatatggcacagaaggctattatcagatattttccagtctttgaaaaaatactgcgcggacatgggcagagttttttagtgggaaatcagctcagtctggccgacgtgatactgcttcagacaattctcgccctggaggagaaaattccgaacatcctgagcgcattcccttttctacaatag

SEQ ID NO: 189486 - DNA, 390 bp, synthetic construct
  misc_feature 1..390: note = Description of Artificial Sequence: Synthetic coding sequence
  source 1..390: mol_type = other DNA
atgtacgtggagggcaccctggacctgctggagctgctgatcatgcaccctttccttaaacccgacgaccaacaaaaagaagtggtgaatatggctcaaaaggccatcatccggtacttccccgtattcgagaagatactgcgcggacatggtcaatctttcctcgtggggaaccagctctcactggccgatgttatcttgctgcaaactattctggccctggaggagaaaatccccaacatcctgtctgccttccccttcttgcaagagtacactgtgaagctgtccaatattccgaccattaaacggtttctggagcccgggagtaagaagaagcctcctccggatgagatctacgtgaggaccgtatacaatatctttcgtccatag

SEQ ID NO: 189487 - DNA, 669 bp, synthetic construct
  misc_feature 1..669: note = Description of Artificial Sequence: Synthetic coding sequence
  source 1..669: mol_type = other DNA
atggccgagaagcccaagctgcactacagcaacgcccggggcagcatggagtctattcgctggctgctggccgcagcgggggtggaactggaggagaaatttctggaatcggctgaggacctggacaagctaagaaacgacgggtccctgctgttccagcaggtgcctatggtggagattgacggtatgaaactggttcagacacgggccatacttaactacatcgcctcaaaatacaatttgtacggaaaggacatgaaggagcgtgccctgatcgatatgtatactgagggaatagttgacctgactgaaatgattctcctactgctcatttgccagcccgaggagcgggacgctaaaacagccctggttaaggagaaaattaagaatcgatacttccctgccttcgaaaaagttctcaagagtcaccggcaggactatctggtgggaaacaaacttagttgggctgatattcacctagtggagctcttttactatgtagaggagctggatagtagtctgatttcgagctttccattgctaaaggcccttaaaacaaggatctccaaccttccaaccgtgaagaaattccttcagcctggaagccaaaggaagccgcctatggatgagaagtccctcgaggaagctagaaagatcttcagattctag

SEQ ID NO: 189488 - DNA, 669 bp, synthetic construct
  misc_feature 1..669: note = Description of Artificial Sequence: Synthetic coding sequence
  source 1..669: mol_type = other DNA
atggccgagaagcccaagctgcactacagcaacgcccggggcagcatggagtcaatacgctggctcttggctgccgctggtgtagagctggaggagaaattcctcgaatcagcggaagaccttgacaagctgcgcaatgacggctcactgctctttcaacaggttccgatggtggagattgatggtatgaagttagttcagactagagccatcctgaattatatcgccagcaaatacaatctatacggcaaagacatgaaggagagagctcttatcgacatgtatacagaggggatcgtcgaccttaccgaaatgattctcctgttactgatctgccagcctgaggagcgggacgcgaagacggccctcgtcaaggaaaaaattaaaaaccgatattttccagcttttgagaaggtgctgaaatcccataggcaggattacctggttggcaataagctgtcctgggctgacatccatttggtggagttgttctactacgttgaagagctggactctagccttatctccagcttcccacttctgaaggctctgaaaaccaggatctctaacctcccgactgtgaagaagtttttgcaaccaggctcccagcgaaagccgcctatggacgagaaaagcctggaggaggcccgtaaaatctttcggttttag

SEQ ID NO: 189489 - DNA, 657 bp, synthetic construct
  misc_feature 1..657: note = Description of Artificial Sequence: Synthetic coding sequence
  source 1..657: mol_type = other DNA
atgcccatgatcctgggctactgggacatccggggcctggcccacgccatccggctgttgctggagtacacagacagctcatacgaagaaaagaagtacaccatgggggacgcccctgattatgaccgcagccagtggttgaatgagaagttcaaactaggactcgatttcccaaatctcccctacctgatcgacggagctcacaaaattactcagtccaacgctatcctctgctacatagctaggaaacataacctctgcggcgaaaccgaagaagaaaaaattcgtgtggatatcctggaaaaccagacaatggataatcacatgcaacttggcatgatatgttataaccccgagtttgagaagctgaagcctaaatacttagaagagttacccgagaagctcaagctctacagcgaatttctcggtaagcgtccctggttcgctggaaacaagatcacattcgtggacttcctagtgtatgatgtcctcgacttacatcggatcttcgagcccaagtgtttggatgctttccctaatctaaaagacttcatctcacgtttcgaaggtcttgagaagatttctgcctatatgaagagcagccgcttcctccctagacctgtgttttcaaaaatggccgtctggggcaataagtag

SEQ ID NO: 189490 - DNA, 546 bp, synthetic construct
  misc_feature 1..546: note = Description of Artificial Sequence: Synthetic coding sequence
  source 1..546: mol_type = other DNA
atgcccatgatcctgggctactgggacatccggggcctggcccacgctatcagactgctgcttgagtacaccgattcatcatatgaagaaaagaaatacacgatgggggacgctccagactatgatcgtagccaatggctcaatgaaaaattcaaactgggcttggacttcccaaacctgccctacctaattgatggggcccacaagattacacagagcaacgccatcttgtgctatattgccaggaaacacaacctctgcggcgaaacagaggaggagaagatccgcgtggacattctagaaaaccaaacaatggacaatcacatgcagttgggcatgatctgctacaacccagagtttgagaaactaaagcccaagtatctggaggagctgcccgaaaagttgaaactatacagcgagttcctcggaaagcgtccatggtttgctggtaataaaggactcgagaagataagtgcctatatgaagtcttccagattcctgccccgccctgtcttctcaaaaatggctgtttggggcaacaagtag

SEQ ID NO: 189491 - DNA, 450 bp, synthetic construct
  misc_feature 1..450: note = Description of Artificial Sequence: Synthetic coding sequence
  source 1..450: mol_type = other DNA
atgcccatgatcctgggctactgggacatccggggcctggcccacgcaattcggctgctgctggaatatacagactcctcttacgaggagaagaaatacaccatgggggacgccccggattatgacaggtcccaatggctaaatgagaagttcaaactgggattagatttccccaaccttccttatttaattgatggggctcataaaatcacccaatccaacgccattctgtgctacatcgcccgaaaacacaacctgtgtggggagaccgaagaagaaaagatcagagtcgatatccttgaaaaccagaccatggacaaccatatgcagctgggaatgatttgttataaccccgaattcggcctagagaagatcagcgcatacatgaaatcatccagatttctccctcgcccggtctttagtaagatggccgtttggggaaacaagtag

SEQ ID NO: 189492 - DNA, 714 bp, synthetic construct
  misc_feature 1..714: note = Description of Artificial Sequence: Synthetic coding sequence
  source 1..714: mol_type = other DNA
atgcccatgatcctgggctactgggacatccggggcctggcccacgcaatcaggttgctgctcgaatacaccgacagttcctatgaagagaaaaaatataccatgggtgacgcaccagactacgaccgctctcagtggctcaacgaaaagtttaaactgggcctggactttccaaatggcatgctgggctcacttgtagctcagctgtctttcgccggattcccttccatccaactgccttacttaattgacggtgctcacaagatcacccaaagcaacgcgattttgtgttatattgcacgaaagcacaacctgtgcggagagacagaggaggagaaaatacgcgttgatatcctcgagaatcagaccatggataaccacatgcagctggggatgatatgttacaatccagaattcgaaaagctgaaaccaaagtatctggaggagttacccgagaagctgaaactgtactcggagtttttgggcaagcggccttggtttgctggcaataagattaccttcgtcgactttctggtgtatgacgtgctggacctacacagaatttttgaaccaaagtgcctggacgcatttccaaatctgaaggattttatcagccggttcgagggtctcgaaaagatctcagcatatatgaaatcaagccgctttctccctcgccctgtctttagtaagatggctgtgtggggtaataagtag

SEQ ID NO: 189493 - DNA, 657 bp, synthetic construct
  misc_feature 1..657: note = Description of Artificial Sequence: Synthetic coding sequence
  source 1..657: mol_type = other DNA
atgcccatgaccctgggctactggaacatccggggcctggcccactccattagactgctgctggaatatacagacagctcttatgaggagaaaaaatatactatgggagacgcccccgactacgatcgatcccagtggctcaatgagaaattcaagctgggcttggacttcccgaacctgccttatcttattgacggtacccacaaaataactcaatctaacgccattttgcgctatatcgcccggaaacataacctgtgtggagaaagtgagaaagagcagataagggaagatatactggagaatcagtttatggactcacgaatgcagctggctaagttatgctatgatcccgacttcgagaaactaaaacccgaatatctccaggccctgcctgagatgctgaaactatacagccagtttctggggaagcagccttggttcctgggcgacaaaattaccttcgtggacttcatcgcatacgatgtactggaacggaaccaggttttcgagcctagttgtctagacgccttcccaaacctgaaggattttatcagccggttcgaggggcttgagaaaataagcgcttatatgaaatcttcgcgcttcctgcctaggcccgtcttcactaagatggcagtgtggggcaacaaatag

SEQ ID NO: 189494 - DNA, 540 bp, synthetic construct
  misc_feature 1..540: note = Description of Artificial Sequence: Synthetic coding sequence
  source 1..540: mol_type = other DNA
atgaccctgggctactggaacatccggggcctggcccacagcatccgtcttcttctggagtatacagattccagctatgaggagaaaaaatatacaatgggggacgcacccgattatgacaggtcccaatggctgaacgagaagttcaagctgggcctggactttccaaacctgccttatctcatagacggcacacacaaaattacacagtccaacgcaatattgagatacattgccagaaaacacaatctgtgcggagaatcagaaaaagaacagatacgcgaggatatcttagagaaccagtttatggacagccggatgcagctagcaaaactctgttacgatccggactttgaaaaactcaaaccagaatatctccaggccttgcctgaaatgctcaagttgtactctcagtttctcggtaagcagccatggtttttaggcgacaagggactggagaagatttcagcctatatgaaatccagcagatttcttccccggcctgtctttacaaaaatggcggtctggggaaacaaatag

SEQ ID NO: 189495 - DNA, 264 bp, synthetic construct
  misc_feature 1..264: note = Description of Artificial Sequence: Synthetic coding sequence
  source 1..264: mol_type = other DNA
atggacagccggatgcagctggccaagctgtgctacgaccccgacttcgaaaagctgaagccagagtatctgcaggctctgcccgagatgcttaagttgtactctcaatttctcgggaagcagccatggtttttaggcgacaagatcacctttgtagactttatagcatacgatgtgttggaacgaaaccaggtcttcgaacccagctgcctggacgccttccccaatttaaaggattttatttctcggtttgagcacagttag

SEQ ID NO: 189496 - DNA, 576 bp, synthetic construct
  misc_feature 1..576: note = Description of Artificial Sequence: Synthetic coding sequence
  source 1..576: mol_type = other DNA
atgcccatgaccctgggctactggaacatccggggcctggcccactcaattaggcttctgctcgagtataccgatagcagttatgaagaaaagaagtatactatgggggatgcccccgactatgatagaagccagtggttgaacgaaaagttcaagctaggcctggatttccctaatttgccctatttaattgacggtacgcataaaataactcaaagcaacgcgattttgcgctacatagctcgaaagcacaatctctgcggcgaaagcgaaaaggagcagattagggaggatattttggaaaaccaattcatggatagtcgtatgcagttggcaaagctctgctacgaccccgactttgaaaagctcaagcccgagtacttgcaggccctgcctgagatgcttaagttgtacagccagttcctgggaaagcagccctggttcttaggtgataagatcacatttgtggacttcatcgcctatgacgtactcgagagaaaccaggtcttcgagccatcctgcctcgacgccttccccaacctgaaggatttcatttctcgctttgagcatagttag

SEQ ID NO: 189497 - DNA, 576 bp, synthetic construct
  misc_feature 1..576: note = Description of Artificial Sequence: Synthetic coding sequence
  source 1..576: mol_type = other DNA
atgcccatgaccctgggctactggaacatccggggcctggcccacagcattaggctgcttttagagtataccgactcttcctatgaagaaaaaaagtatacaatgggggatgcccccgactatgatcggagtcaatggctgaatgaaaaattcaaactaggtctcgacttcccaaaccttccgtacctgatcgacggaactcacaagatcacacagtctaatgcaattttgcgatacatcgccagaaagcataacctgtgcggcgagtccgagaaggaacagatccgagaggacatcttggaaaatcagtttatggacagtcgaatgcagctggcgaagctgtgctatgatcctgacttcgaaaaactcaaacctgagtacttgcaggccctgcccgagatgctgaagttgtactcgcagttcttgggtaagcagccttggtttctcggcgataaaatcaccttcgtggattttatcgcctacgatgtgctggaacgcaatcaggtgttcgagccttcctgcctggatgcctttcccaaccttaaggatttcatcagccgattcgagcacagctag

SEQ ID NO: 189498 - DNA, 678 bp, synthetic construct
  misc_feature 1..678: note = Description of Artificial Sequence: Synthetic coding sequence
  source 1..678: mol_type = other DNA
atgagctgcgagagcagcatggtgctgggctactgggacatccggggattggctcacgcgatccgcctgttgctggaattcacagacacatcctacgaggaaaaaagatatacctgcggagaagcaccggactatgataggagccagtggctcgacgtcaagtttaaactcgacctagattttcctaacctgccatacctgctagacgggaaaaataagatcacgcagagtaacgctatcctgagatacattgcacgaaagcacaacatgtgcggagagacagaggaggaaaaaatacgcgttgatatcatagaaaatcaagtgatggactttcgaacacagcttattcggttgtgttactcctcagaccacgagaaactgaaaccacagtacctcgaagaactgcctggccagctaaagcaattcagtatgttcttggggaaattcagttggttcgcaggggagaagctcactttcgtggattttctgacttacgacatcctggatcagaatcgaatttttgatcccaagtgcctggacgagtttcccaatctcaaggccttcatgtgccgattcgaagctctggagaaaatcgcagcttacctgcagtctgatcaattttgtaagatgcctatcaacaacaagatggctcagtggggcaataagccagtttgctag

SEQ ID NO: 189499 - DNA, 678 bp, synthetic construct
  misc_feature 1..678: note = Description of Artificial Sequence: Synthetic coding sequence
  source 1..678: mol_type = other DNA
atgagctgcgagagcagcatggtgctgggctactgggacatccggggtcttgctcacgcgattagattactgctggagttcacggacacctcatacgaggaaaagaggtatacctgcggcgaggcacctgactatgacaggtcccaatggctggatgtgaagttcaagttggatctggacttccctaacttgccgtacctcctggacggtaagaacaagatcactcagagcaatgccatactgcgctatatcgcaaggaaacacaacatgtgcggagaaacagaggaagagaagatacgggtagatattatcgagaaccaggtcatggatttccgaacccagctgattcgcttatgctattcttccgaccacgagaaattgaaaccacagtacctggaagagttgccaggacagctcaaacagttctccatgttcctgggcaaattcagttggttcgctggggagaaattgacttttgtggattttcttacatacgatatactggatcaaaaccggatctttgatccaaagtgtctggacgagttccccaacctgaaagcctttatgtgcaggttcgaagcactcgaaaagatcgccgcttacttacagagtgaccagttttgcaagatgccaatcaataataagatggctcagtggggaaacaagccagtctgttag

SEQ ID NO: 189500 - DNA, 678 bp, synthetic construct
  misc_feature 1..678: note = Description of Artificial Sequence: Synthetic coding sequence
  source 1..678: mol_type = other DNA
atgagctgcgagagcagcatggtgctgggctactgggacatccggggtttggcacatgctattaggctgctgctggagtttacggatacttcgtatgaggaaaaacggtatacctgcggcgaggctcccgattatgacaggagtcagtggttagacgtgaaatttaaactggatctagatttccccaatctaccttatcttctggacggtaaaaacaaaattacccaaagcaacgctatcttaaggtatattgcaagaaagcacaacatgtgtggggagaccgaggaagagaaaataagagtcgacatcattgagaatcaggttatggacttccgtacccagttgatcaggctgtgctactcatcagatcacgagaagctgaagccacaatacctggaggaattacctggacaactcaagcagttctcgatgtttttgggcaaattctcatggttcgcgggcgaaaagctaaccttcgtggactttctcacctatgacatcctggaccagaaccgcattttcgaccccaaatgccttgacgagttccccaacctcaaagcattcatgtgccgcttcgaggctctcgagaagattgctgcttaccttcagtccgatcagttctgtaagatgcccatcaataataaaatggcccaatgggggaacaagcccgtgtgttag

SEQ ID NO: 189501 - DNA, 588 bp, synthetic construct
  misc_feature 1..588: note = Description of Artificial Sequence: Synthetic coding sequence
  source 1..588: mol_type = other DNA
atgagcatgaccctgggctactgggacatccggggcctggcccacgccatacggctcctgcttgaatacaccgatagctcatatgaagagaaaaagtacacaatgggagacgcccccgattatgatcgcagccagtggttgaacgagaagttcaagctgggcctggattttcctaacctcccctatctgattgatggcgcacacaagatcacacagagcaatgccatcctctgctacattgctcgtaaacacaatctttgtggtgagactgaggaagaaaaaatcagggtggatatcctagaaaaccaggccatggatgtctctaaccagctggctcgggtctgttactctccagactttgagaaactgaagcctgaatacctggaggagctgcctacaatgatgcagcacttcagccaatttcttggcaagcgaccttggttcgtaggcgataagatcactttcgtggattttcttgcatatgatgtgttggatctgcataggatctttgagcccaactgcctcgatgccttcccaaatttgaaagatttcatcagccgcttcgaagtgagctgtggtataatgtag

SEQ ID NO: 189502 - DNA, 474 bp, synthetic construct
  misc_feature 1..474: note = Description of Artificial Sequence: Synthetic coding sequence
  source 1..474: mol_type = other DNA
atgagcatgaccctgggctactgggacatccggggcctggcccacgctattcggctcctgctggaatataccgatagttcttacgaggagaagaaatacacaatgggggatgctccggactacgaccgcagtcagtggctcaacgagaaattcaagctgggcttagatttccccaatgagaagcttaaacctgagtacttggaagagctgccaaccatgatgcaacacttcagtcaattcctagggaaacggccctggtttgtcggagacaagatcacttttgtggactttcttgcctacgacgttctggatctgcatcgtatcttcgagcctaattgcctggatgcctttccaaacctgaaggacttcatatctcggttcgaagggctggagaagatctccgcatacatgaaaagctccagatttctgcctaagccactatatactcgtgttgccgtttggggcaacaaatag

SEQ ID NO: 189503 - DNA, 609 bp, synthetic construct
  misc_feature 1..609: note = Description of Artificial Sequence: Synthetic coding sequence
  source 1..609: mol_type = other DNA
atgctgggcagcctgctggcccagctgagcttccccggcttcccctccatccaactcccatacctcatcgatggcgcccataagatcactcagtccaacgccatcttgtgttacatagcacgcaaacataatctctgcggcgagaccgaggaagagaagattagagtggatatcctggagaaccaggcaatggatgttagcaatcagttggcacgggtgtgctattccccagacttcgaaaagcttaagcccgaatatctggaagagttgcctaccatgatgcagcactttagccagtttctgggaaaaagaccttggtttgtcggtgacaaaatcaccttcgtggacttcctggcctatgatgtgctcgacctgcacagaatctttgagcctaactgccttgatgcgttccccaacttaaaggacttcattagtagatttgaagtcatgcctccctcctcgtttctgttcgacgccccgtgctctgtgacttcctttcagatgctaagccagagttggtcctatattaaaaacaacctccaccttctgagtgcaggattcatgcccggtacactaccctccacgctgtacctgtcgtgcggtatctag

SEQ ID NO: 189504 - DNA, 657 bp, synthetic construct
  misc_feature 1..657: note = Description of Artificial Sequence: Synthetic coding sequence
  source 1..657: mol_type = other DNA
atgagcatgaccctgggctactgggacatccggggcctggcccacgccattaggcttctgcttgaatatactgacagctcttatgaagagaagaagtacaccatgggtgatgcacccgattacgaccggagccagtggctcaacgagaaatttaaactcggtttggactttcccaacctgccctatctgattgacggagctcataaaataactcaatccaatgccattttgtgttatattgccagaaagcacaatttgtgcggtgaaaccgaggaggagaaaatccgggtagacatcctggaaaatcaagctatggatgtgtccaatcagcttgcccgggtttgctactcgcccgatttcgaaaaactgaagccagaatacctcgaggagctgcctacgatgatgcagcacttcagtcagtttcttgggaaacgaccatggttcgtgggtgacaaaattactttcgtcgatttcttggcctatgacgtgttggacctgcatcgcatctttgagcctaactgcttagacgcgttcccaaacctgaaagacttcatctccaggttcgaaggtctagaaaaaatcagcgcttatatgaaatcctcacggttcctgcctaagcccctgtataccagagtggctgtatgggggaataaatag

SEQ ID NO: 189505 - DNA, 657 bp, synthetic construct
  misc_feature 1..657: note = Description of Artificial Sequence: Synthetic coding sequence
  source 1..657: mol_type = other DNA
atgcccatgaccctgggctactgggacatccggggcctggcccacgcaattcgccttctgttggagtatacagattcaagttatgtcgagaaaaagtacacactcggagacgcacctgactatgaccgatcccagtggcttaatgaaaagtttaagttaggcttagacttccctaatctgccttatctgatagacggcgcccacaagatcacacagagcaacgcaatcctgaggtacatcgcccgcaagcataatttgtgcggagagaccgaggaagagaagatccgcgttgacatattagagaaccaggtgatggataatcatatggagctggtgcggctctgttatgaccccgactttgagaagctaaaacctaaatatctggaagagttgccggaaaagctcaaactgtattccgaatttctgggaaaacgcccttggtttgctggcgataagattacctttgtcgattttcttgcatatgacgtactagatatgaagcgcatcttcgaacctaaatgtctcgacgcatttcttaatttaaaagacttcatctcaagatttgagggtcttaaaaaaattagcgcctacatgaagtcctcccagtttctccggggcctgctgtttgggaaaagtgctacctggaatagcaagtag

SEQ ID NO: 189506 - DNA, 714 bp, synthetic construct
  misc_feature 1..714: note = Description of Artificial Sequence: Synthetic coding sequence
  source 1..714: mol_type = other DNA
atgcccatgaccctgggctactgggacatccggggcctggcccacgcaatcaggcttctgttggagtacactgactcttcatacgtggagaagaaatacacactcggtgatgcccccgactacgaccggtctcagtggcttaacgagaaatttaagctgggactggattttccaaatggcatgcttgggagcctggtagctcagctgagctttcctgggtttcccagcatccagttgccatacctgatagatggcgcacacaaaatcacacaaagcaacgctatattaagatacatcgcccgcaagcacaacctgtgtggcgaaaccgaagaggagaagatcagggttgatattctggagaaccaggtgatggacaatcacatggagttggtgcgcctctgttatgatccagattttgaaaaactgaagccgaagtaccttgaagagttgcccgaaaaactgaaactgtatagcgaatttctcggcaagagaccatggtttgcaggggataagataacgttcgtcgacttcctggcttatgatgtcctcgatatgaagcgcattttcgagcctaagtgcctggatgccttcctcaacttaaaagactttattagccgattcgagggtctaaaaaagatctccgcttacatgaagagcagccaattcctcagggggctcctgttcggcaaaagcgccacttggaattccaaatag

SEQ ID NO: 189507 - DNA, 609 bp, synthetic construct
  misc_feature 1..609: note = Description of Artificial Sequence: Synthetic coding sequence
  source 1..609: mol_type = other DNA
atgctgggcagcctggtggcccagctgagcttccccggcttccccagcatccagctgccatatctcattgacggggcacataaaatcacgcagtcaaacgctatcttgagatacattgctcggaagcataatttgtgcggggaaactgaggaggagaagattagagtggacatcttggaaaaccaagtaatggacaaccacatggaattggtgaggctttgctacgacccggacttcgaaaaactcaaacccaagtacctggaagaactccctgaaaagttgaagctttacagcgaattccttggcaagaggccctggttcgccggcgataaaataacttttgtggactttttggcttatgacgtattagacatgaaaaggatatttgaacccaaatgcctcgacgcctttctcaatctgaaagatttcatttccaggttcgaagtaatgcccccaagctcctttctgttcgatgctccttgctcctttcttagctttcagatgctcagtcaaagttggtcctacaccaaaaacaattcctacgtgctgagtacaggtttcatgccagggattatgccgtccacattgtacctcagctgccggatctag

SEQ ID NO: 189508 - DNA, 627 bp, synthetic construct
  misc_feature 1..627: note = Description of Artificial Sequence: Synthetic coding sequence
  source 1..627: mol_type = other DNA
atgagcggcgagagcgcccggagcctgggcaagggcagcgccccccccggtccagtgcctgagggaagcatcagaatctattccatgagattttgtccatttgctgaacgaaccaggctggtgctgaaagcgaaaggcatccgacatgaggtcataaatattaatctgaaaaataagcccgagtggttcttcaagaagaatccttttgggttagtgcccgtgctggagaactcccagggtcaattgatatatgagtcagctattacctgtgagtatttggatgaggcttaccctggaaagaaactgctccccgacgacccatatgaaaaggcatgtcagaagatgatattagagcttttttcaaaagtgctgactaacaagaaaacaacattcttcgggggaaacagtatctctatgatcgactacctcatatggccatggtttgagcgtctcgaggcgatgaaattgaacgagtgtgtggaccacactcctaaactcaagctttggatggccgccatgaaggaggatccaacagtgagcgcccttttaacctccgagaaagactggcagggattcctggaactgtacctccagaactcgcccgaggcctgcgactatgggctgtag

SEQ ID NO: 189509 - DNA, 726 bp, synthetic construct
  misc_feature 1..726: note = Description of Artificial Sequence: Synthetic coding sequence
  source 1..726: mol_type = other DNA
atgagcggcgagagcgcccggagcctgggcaagggcagcgcccccccgggacccgtccccgaggggtccatccggatctatagtatgcgcttctgcccctttgcagaacgcacacgacttgtgctgaaagcaaaaggaattcgtcatgaggtgattaacattaatctgaaaaataagcctgagtggtttttcaagaagaatccattcgggctcgtgccggtcctggagaattctcagggacagctcatctacgaatccgccataacatgcgaatatctggatgaagcctatccaggcaagaagcttcttcccgatgatccatacgaaaaagcatgccaaaagatgatcctggagctcttttcgaaggtcccctcccttgtcggaagtttcatccgaagtcagaataaagaggactatgccggccttaaagaggagtttcggaaggaattcacaaagctggaagaagtacttaccaataaaaagactaccttttttggcgggaacagcataagcatgatcgactacttaatttggccctggttcgagcgcttagaagctatgaagctgaatgaatgtgtggatcataccccaaaactgaagctgtggatggccgctatgaaggaggatccaactgttagcgccctgctgacatcagagaaagattggcaaggattcctggagctgtacctgcagaatagcccagaagcctgtgactatggactgtag

SEQ ID NO: 189510 - DNA, 543 bp, synthetic construct
  misc_feature 1..543: note = Description of Artificial Sequence: Synthetic coding sequence
  source 1..543: mol_type = other DNA
atgcggttctgccccttcgccgagcggacccggctggtgctgaaggctaaggggatcagacatgaggtgatcaacatcaacctcaagaacaagccggaatggttttttaaaaaaaatccctttgggttagtgcccgtcctcgaaaattcacaagggcagctgatctatgagtcggccatcacctgcgagtatctcgatgaagcatatcccggcaaaaaattgttgcctgacgacccatatgaaaaggcttgtcaaaagatgattttggagctcttcagtaaagttctgaccaataaaaagacaaccttcttcggaggcaactccatttcaatgattgattatcttatctggccatggtttgagaggctggaagctatgaagttgaacgagtgcgtggaccacacccccaagcttaagctctggatggcggccatgaaagaagacccgacggtctctgcactcctcactagcgagaaagattggcagggattcttagagctgtatctacagaattccccagaggcttgtgattacggactttag

SEQ ID NO: 189511 - DNA, 603 bp, synthetic construct
  misc_feature 1..603: note = Description of Artificial Sequence: Synthetic coding sequence
  source 1..603: mol_type = other DNA
atgcggttctgccccttcgccgagcggacccggctggtgctgaaggcaaagggtattcggcatgaagtgatcaatataaacctcaagaacaaaccagagtggtttttcaagaaaaatcccttcggtctggttcctgtactggagaactctcagggccagctaatatatgagtccgctatcacgtgtgagtatctggacgaagcttacccagggaaaaaacttctgcccgatgacccctacgaaaaggcctgccaaaaaatgatactagagttgttctctaaagtgcctagccttgttggcagcttcatccggagccagaacaaggaagactatgcagggctaaaggaggaattcagaaaagagtttacaaagctcgaggaggtcctgactaacaagaagacgaccttttttggtggcaacagcatttctatgattgactatctgatttggccttggtttgagcgcttagaagcaatgaagttaaatgaatgcgtagaccacactccaaagctcaagctgtggatggctgcgatgaaggaggacccgaccgtgtccgcgctgttgacctccgagaaggactggcagggctttctggaattatag

SEQ ID NO: 189512 - DNA, 642 bp, synthetic construct
  misc_feature 1..642: note = Description of Artificial Sequence: Synthetic coding sequence
  source 1..642: mol_type = other DNA
atgcggttctgccccttcgccgagcggacccggctggtgctgaaggcgaaaggcatccggcatgaggtgattaacatcaacctgaagaataagccggaatggttttttaagaagaatccttttgggctcgttcccgtcctcgaaaactcccaggggcagttaatttacgagtcagctattacctgcgaatatctggatgaggcctatcctggtaagaaactccttccggatgacccttacgagaaagcctgtcagaagatgattctcgaactgttctcaaaggtcccaagcctcgtgggcagcttcattagatctcagaataaagaggattatgcggggctcaaagaggagttccggaaagaatttaccaaactggaagaggttctcaccaataagaaaaccaccttttttggcgggaactccatctccatgattgactacttgatctggccctggttcgaaaggctggaggcgatgaagctgaatgagtgcgtggaccacactccaaagctgaagttgtggatggccgccatgaaggaagatccaacagtgagcgcgctgcttacctctgaaaaagactggcagggctttctggagctttaccttcagaacagccctgaagcctgcgactatggactgtag

SEQ ID NO: 189513 - DNA, 732 bp, synthetic construct
  misc_feature 1..732: note = Description of Artificial Sequence: Synthetic coding sequence
  source 1..732: mol_type = other DNA
atgagcggcgacgccacccggaccctgggcaagggcagccagccccccgggccagtgcccgaaggactgattcggatatactccatgcgattctgtccttatagccatcgtacacggctggtgctgaaggcaaaggatattcggcacgaggtggtcaatatcaaccttagaaataaacctgagtggtattatacaaagcacccatttggtcatatcccagtcttagaaactagtcaatgtcaactcatctacgagagcgtgattgcctgcgaatacctggatgacgcctaccccgggagaaagctctttccgtacgacccctacgagcgcgcaagacagaaaatgctgctggagttgttttgtaaggtaccacatctcacgaaggaatgtttagtggccctgaggtgtggaagagagtgtaccaacctaaaagctgccctgagacaagagtttagcaatttggaggagatactcgagtaccaaaacaccaccttttttggaggaacttgcatctctatgatcgactacttgctttggccatggttcgagagactagacgtctacggcatcctggactgcgtgtcacacacccctgcactgagactgtggatctccgctatgaagtgggatcctactgtgtgcgctctgttgatggacaaaagcatcttccagggcttcctgaatctatatttccagaataatcctaacgcctttgacttcgggctgtgttag

SEQ ID NO: 189514 - DNA, 648 bp, synthetic construct
  misc_feature 1..648: note = Description of Artificial Sequence: Synthetic coding sequence
  source 1..648: mol_type = other DNA
atgcggttctgcccctacagccaccggacccggctggtgctgaaggctaaggatattaggcatgaggtggttaacatcaacctcagaaacaagcccgaatggtactataccaaacatccctttggacacatccccgtgctcgaaaccagccagtgccaactgatctacgagtccgtcattgcttgcgagtatcttgacgatgcctaccctggtagaaagctgtttccatatgatccatacgaacgcgctcgccagaaaatgctgttggagctgttctgtaaggtgccccacttgactaaagagtgcctagtggctttgcgctgtggcagagagtgcacaaacctgaaggctgctctgagacaagagttctccaacctggaagagatcctggagtatcaaaacactactttctttggcggcacatgtataagcatgattgattacctgctctggccgtggttcgagcgcctggacgtctacggcatactcgattgtgtgagccacaccccagctttacgcctgtggatttctgccatgaagtgggaccctactgtgtgtgccctgctgatggacaagtccatttttcaaggatttcttaatctttacttccagaataatccaaatgcattcgattttgggctgtgttag

SEQ ID NO: 189515 - DNA, 732 bp, synthetic construct
  misc_feature 1..732: note = Description of Artificial Sequence: Synthetic coding sequence
  source 1..732: mol_type = other DNA
atgagcggcgacgccacccggaccctgggcaagggcagccagcccccgggcccagtgcccgaaggactcattagaatttactcgatgcgcttctgcccctattcacaccgtaccaggctcgtgctgaaggctaaagacattcgtcacgaagttgtcaatatcaacctaagaaataaacctgagtggtattacactaagcatccattcggtcacatccctgtcctagagaccagtcagtgccaactgatctacgagtccgttattgcttgcgaatacctggatgatgcatatcccggtagaaaactcttcccctacgatccttacgagcgggcaagacagaagatgctacttgaacttttctgtaaagtcccacacctgacgaaggagtgtttagtggccttacgatgcggtagagagtgcaccaaccttaaggctgcgctcaggcaggagttttctaacctggaggaaatactggagtaccagaacaccacattctttggcggaacatgtatctccatgatcgattacctgctgtggccatggttcgagcgtctggacgtgtacggcatcctcgattgcgtgtcacacacgcccgctctccggctgtggatcagcgccatgaagtgggatcccacagtgtgtgcgctcctaatggataaatccatttttcagggctttttgaacttatacttccagaacaatcccaatgctttcgacttcgggctctgctag

SEQ ID NO: 189516 - DNA, 501 bp, synthetic construct
  misc_feature 1..501: note = Description of Artificial Sequence: Synthetic coding sequence
  source 1..501: mol_type = other DNA
atgagcggcgacgccacccggaccctgggcaagggcagccagcccccaggccccgttcctgagggattgattaggatctactccatgcgcttttgcccttatagccaccggacacggctcgtacttaaggcaaaagatatccgccacgaggtggtgaacatcaatctaagaaacaagccagaatggtactacacaaagcacccttttgggcacatcccggtcctggagactagtcaatgtcagctgatctatgaatctgtgattgcatgtgaatatttggacgacgcataccccggacggaaattattcccctacgacccttatgaaagagcacgccagaagatgctccttgaactcttttgtaaagtgccccatctgacaaaggagtgtctcgtcgccctcagatgtggcagggagtgcacaaacttaaaggccgccctgcggcaagagttcagcaaccttgaagaagataggaagaagcggaaattcattcctggctag

SEQ ID NO: 189517 - DNA, 366 bp, synthetic construct
  misc_feature 1..366: note = Description of Artificial Sequence: Synthetic coding sequence
  source 1..366: mol_type = other DNA
atgcggttctgcccctacagccaccggacccggctggtgctgaaggccaaagatatccgtcacgaggtcgttaacatcaacctgaggaataaacccgaatggtactatacgaaacaccccttcggccacatccccgtgttagaaacttcacagtgccagctgatctatgaatctgtgatagcctgtgagtatttagacgatgcttaccccgggcgaaagctgtttccttacgatccctacgagagggccagacaaaagatgttgctggagctgttctgcaagctgtgtgagccacatgcttccccagccgcactggacatttcccatgaggtcggtccccactccctgtgttcgtcccacggatag

SEQ ID NO: 189518 - DNA, 630 bp, synthetic construct
  misc_feature 1..630: note = Description of Artificial Sequence: Synthetic coding sequence
  source 1..630: mol_type = other DNA
atgagcggcgacgccacccggaccctgggcaagggcagccagccccccggccctgtgccggaaggtctgattcgcatctatagcatgaggttttgtccatacagccacagaacccggttggtgctgaaggcaaaggacattcggcatgaggtggtcaatatcaacttgcgtaacaaaccagagtggtattacaccaaacatccgtttggccatatccccgtgctggagacctctcagtgtcagctgatttatgaaagcgtcatcgcatgtgagtacctggacgatgcctatccaggcaggaagctgtttccgtacgacccctacgaaagagcaaggcaaaagatgttgctagaactgttttgtaagattctcgaataccagaacactaccttcttcgggggaacatgcatcagcatgatcgattaccttctgtggccttggttcgagaggctggacgtctacggcattttagattgcgtgtcgcatacacccgcactgagactgtggatctccgcaatgaagtgggaccctacggtttgcgctcttctcatggacaaatccattttccagggcttcctgaatttgtacttccaaaacaatccgaacgcgtttgatttcgggttatgttag

SEQ ID NO: 189519 - DNA, 723 bp, synthetic construct
  misc_feature 1..723: note = Description of Artificial Sequence: Synthetic coding sequence
  source 1..723: mol_type = other DNA
atgggcctggagctgtacctggacctgctgagccagccctgccgggcagtttatattttcgcaaaaaagaatgatatcccgttcgaattacgtattgtcgatctgatcaaagggcagcacctgagcgatgccttcgcccaggtcaaccctctcaagaaagtgccagctttaaaagatggcgacttcaccctcaccgaaagtgtagccatcctgctgtatcttaccaggaagtataaggtccccgactactggtaccctcaggacctgcaagccagggcccgggtggatgaatatctcgcctggcagcacaccactttgcgccgaagctgcctgcgggccctgtggcacaaggttatgtttcctgtgttcctcggcgaacctgtgagtccccagaccctagctgctaccctggccgaacttgatgtgactttgcagctccttgaagataagtttctccaaaataaggcctttctgaccggacctcacatctccctggcagatctagtcgcaattaccgaacttatgcatcccgtgggtgccggatgccaagtgtttgagggaagacccaaactcgccacatggagacaacgcgtggaagcggcagtcggtgaggatctttttcaggaggcgcacgaggtgattcttaaagcaaaagattttccacccgctgatcccaccattaaacagaaactcatgccatgggtgttggcgatgataaggtag

SEQ ID NO: 189520 - DNA, 486 bp, synthetic construct
  misc_feature 1..486: note = Description of Artificial Sequence: Synthetic coding sequence
  source 1..486: mol_type = other DNA
atgggcctggagctgtacctggacctgctgagccagccctgccgggccgtatacattttcgctaaaaagaacgatattcccttcgagcttaggattgtagacttgattaagggtgtaatgtttccagtgtttctgggggagccagtgtcccctcaaactttggcagccacgcttgctgagctcgatgttacactgcaacttctggaggataaatttttgcagaacaaggcattcctgaccggaccccatattagtctggccgaccttgtcgccattactgaacttatgcaccctgtgggcgctggttgtcaagttttcgagggtcgcccaaagctcgcaacatggcgacagcgagtggaagcagcagtgggagaagacctcttccaggaggcgcatgaggtgatcttgaaagcgaaagacttccccccagcagacccaaccataaagcagaaactaatgccttgggtgctcgccatgatccgctag

SEQ ID NO: 189521 - DNA, 369 bp, synthetic construct
  misc_feature 1..369: note = Description of Artificial Sequence: Synthetic coding sequence
  source 1..369: mol_type = other DNA
atgttccccgtgttcctgggcgagcccgtgagcccccagaccctggccgccacattggccgagttggacgtgacattgcagctgctggaagataagtttctgcagaataaggccttccttacaggacctcatatatccctcgccgacctcgtggcaattactgaactgatgcaccccgttggcgcggggtgccaggtgttcgagggaagacctaagttagccacgtggagacagcgggtggaagcggccgttggcgaggatctgtttcaggaggcccacgaggtgattcttaaagccaaggactttcctccagcggacccgactatcaaacagaaactgatgccatgggtgttggccatgatcagatag

SEQ ID NO: 189522 - DNA, 198 bp, synthetic construct
  misc_feature 1..198: note = Description of Artificial Sequence: Synthetic coding sequence
  source 1..198: mol_type = other DNA
atgggcctggagctgtacctggacctgctgagccagccctgccgggctgtctacatattcgccaagaagaatgatatcccttttgaactgagaatcgtcgacctaatcaagggtcagcatctgagcgacgcatttgcccaagttaatcccttgaagaaagtacccgccctgaaagacggggacttcacactgacatag

SEQ ID NO: 189523 - DNA, 219 bp, synthetic construct
  misc_feature 1..219: note = Description of Artificial Sequence: Synthetic coding sequence
  source 1..219: mol_type = other DNA
atgggcctggagctgtacctggacctgctgagccagccctgccgggcagtttacatcttcgccaagaaaaatgatattccattcgaactgaggatcgtagacctgattaaggcaagggggtgctggttgccctcactgaggcgcccaacccaggcagggcacatggctgcagctcgcggcggcagttctggcggtggacctttaccgggggggccttag

SEQ ID NO: 189524 - DNA, 405 bp, synthetic construct
  misc_feature 1..405: note = Description of Artificial Sequence: Synthetic coding sequence
  source 1..405: mol_type = other DNA
atgcccttcctggagctggacaccaacctgcccgccaaccgggtgcccgctggtttggaaaagcggctctgtgctgccgcagcctccatcctcggtaagcctgcggacagagttaacgttacagtgcgccccggactcgctatggcattgtcagggagtacggagccctgcgcgcaattgtccatctcatccatcggggttgtgggcacagcggaagataatcgctcccatagcgcccattttttcgagtttctgacgaaagagttggccctgggccaagacaggttcccaaccgtgctctcaacgagccccgccgcccacggaggccctaggtgcccgggcgagatcattgaaggaaaaaaatcatgcctaaacgaggaggccctgttcatttactttatatag

SEQ ID NO: 189525 - DNA, 831 bp, synthetic construct
  misc_feature 1..831: note = Description of Artificial Sequence: Synthetic coding sequence
  source 1..831: mol_type = other DNA
atgcccgtgcccgccagctggccccacccccccggccccttcctgctcctgaccttgctgctgggtttaactgaggtagcaggagaggaggagcttcagatgatccagcctgagaagcttctgcttgtaactgtcggaaagaccgctacactgcattgcactgtgacatccctgttacccgttggtccggtgctttggtttcgcggggtgggccccgggagggagctgatttacaaccaaaaagagggacacttcccccgcgtgaccaccgtgtcagatctcaccaaacgcaacaatatggatttttcaatacgcatctcgtcaattacccccgcagatgtcggaacctactactgcgttaaattccgtaaaggttcaccggagaacgttgagttcaagtccggcccaggcacagaaatggcactgggcgctaaaccctctgcccctgtggtcctcgggccagctgcaagaaccacgcccgagcatactgttagtttcacatgcgaatcacacggattctcgcctcgcgacatcacgctcaagtggtttaagaatggcaacgagctcagcgactttcagacaaacgtggaccccaccggacagtccgtggcttattccattcgttccacagctagggtggtactggacccctgggatgtccgctctcaagtgatttgtgaggtagctcatgtgacgctacagggcgacccactgcgcgggaccgccaacctcagtgaggctattagagggcctgcctctagcctgaccgccctcctgcttattgcagtcctgctggggccaatttatgttccatggaagcagaagacctag

SEQ ID NO: 189526 - DNA, 1092 bp, synthetic construct
  misc_feature 1..1092: note = Description of Artificial Sequence: Synthetic coding sequence
  source 1..1092: mol_type = other DNA
atggccaccaactggggcagcctgctgcaggacaagcagcagctggaagagctagcacgtcaagcggtggaccgcgcgctcgcggaaggggtcctgctgagaacctcccaagagcctacctccagcgaagtcgtcagttatgccccatttaccttgttcccatctttggtaccttcagctctgctggagcaggcttacgccgttcagatggacttcaatttgcttgttgatgcagtctctcagaacgctgcttttcttgaacagactctctctagtgcgttagtgcttttaattgcacaggaaaaagaacgtaacatcttcgatcagcgggcaatagagaacgaactgctcgccagaaatatccatgtcatccgaagaacttttgaggatattagtgagaaaggctctctcgatcaggacagaaggttgttcgtcgacggtcaggaaatcgccgtggtgtacttcagagatgggtacatgcccaggcaatattccctgcagaattgggaggctcgactgctgctggaacgaagtcacgccgccaaatgcccggatatagcaactcagctcgccgggaccaaaaaggttcagcaggaactgagccgccctggaatgctggaaatgctgctacccgggcagcctgaagcagtggcccgccttcgagctactttcgctggcctgtattctttggacgtgggagaggagggcgatcaggccatcgccgaagctctggccgcccctagcagattcgtgctgaagcctcagcgcgagggaggtgggaacaacttgtatggtgaggagatggtgcaggcattgaagcagttaaaagattccgaggaaagagcctcctacattctcatggagaagatagaacctgagcccttcgagaactgtctactgcggcccgggtcacccgccagggtggtgcaatgtataagcgagttagggatctttggcgtctacgtccgtcaggaaaagactctagtcatgaataagcatgtgggacatctcctgcgtaccaaagccattgagcatgccgatggcggggttgccgcgggggtggccgtgttggataatccctatcctgtgtag

SEQ ID NO: 189527 - DNA, 1041 bp, synthetic construct
  misc_feature 1..1041: note = Description of Artificial Sequence: Synthetic coding sequence
  source 1..1041: mol_type = other DNA
atgttccagcggagcgccgacggcagccccgccctgaagcagatcgagatcaacacaatctccgcatcctttggggggctggcgtcccgtactccagctgtccatagacatgttctgagcgtgttatccaaaacaaaagaggcagggaagatcctgtcaaacaacccttccaagggtctggcactcgggatcgccaaggcttgggagctatacggttccccaaacgccttagttctgctgattgcccaggaaaaggagcgcaacatatttgatcagcgagccatcgaaaacgagctgttggcccggaatatccatgtcatccggcgaacatttgaggacatcagcgagaaaggctcactcgatcaggatagacgcctcttcgtggatgggcaagaaattgcggtggtatacttcagagacggttacatgcccagacagtactctcttcagaattgggaggcaaggcttctgttggaaagaagtcatgccgctaagtgtccggacatcgccacccaactggccggcaccaagaaagtgcagcaggaactgtcgaggcctggcatgttagaaatgctgctgcctggacagcccgaggcggtggccagattacgtgccacctttgctgggctctatagcttggacgtgggagaggagggtgaccaggctattgccgaagctttagccgcacccagcagattcgttctaaaaccccagagagaaggaggcggaaataacctgtatggtgaagaaatggtacaggcactcaagcagttgaaggattcagaggagagggcaagctacattctgatggagaagattgagcctgaaccattcgaaaactgtcttttgcgtcctggcagtcccgccagggttgtgcaatgcatctcggaattaggaatatttggcgtgtacgttcgacaggagaaaactcttgttatgaacaaacacgttggtcacctcttgcggacaaaagctattgagcatgccgacggcggcgtggcagccggagttgcggttctagacaatccataccctgtgtag

SEQ ID NO: 189528 - DNA, 768 bp, synthetic construct
  misc_feature 1..768: note = Description of Artificial Sequence: Synthetic coding sequence
  source 1..768: mol_type = other DNA
atgagcagcatcggcaccggctacgacctgagcgccagcaccttctctcccgatggacgcgtcttccaggtggaatacgcgatgaaggctgtggagaattcaagcaccgcaatcggaatacgatgtaaggacggcgtggtgttcggggtggaaaaactggttctgagcaagctgtacgaggaaggtagtaataagcgattatttaatgtcgatcgccacgttgggatggctgtggccgggctcctggccgatgcgcgatctcttgctgacatcgcaagagaagaggccagcaattttcgatccaactttggctacaatattcctctaaagcatctcgcagaccgggtggccatgtacgtgcacgcttacactctctatagcgccgttaggcccttcggatgtagcttcatgttgggatcttatagcgtgaatgacggagcccaactatacatgatcgacccatcaggcgtgagttacggctattgggggtgtgcaatcggaaaagccagacaagcagctaagactgagattgagaaactgcagatgaaagagatgacatgccgagacattgtaaaggaagtcgccaagatcatttatatcgtgcatgatgaggttaaggacaaagctttcgaactcgagcttagctgggtgggcgagctcacgaatggacggcacgagattgttccgaaagatatcagggaggaggccgaaaagtacgcaaaggaaagcttgaaggaggaggatgagtctgatgatgataacatgtag

SEQ ID NO: 189529 - DNA, 525 bp, synthetic construct
  misc_feature 1..525: note = Description of Artificial Sequence: Synthetic coding sequence
  source 1..525: mol_type = other DNA
atgcaggccggcaagcccatcctgtacagctacttccggagcagctgtagctggcgggtgcggatcgcactggctctgaaaggcatagactacgaaaccgtgccaatcaacctgattaaagacggaggtcagcagttctccaaggactttcaggcacttaacccaatgaaacaggtgcctactctcaagatcgatgggatcacaatccaccagtccaacctgagcgtgctaaagcaggtcggcgaggagatgcagctgacttgggcccagaatgctattacatgcggttttaacgcactggaacagatactgcagtccacagctggcatttattgtgtgggcgacgaagtaactatggcagatctgtgcttagtgcctcaggtggctaatgcggagagattcaaggtggacctgactccatatcccacaattagctctataaacaagcggctgctcgtcctggaagcctttcaggtatctcatccttgtaggcagccagacacaccgaccgagctgagggcctag

SEQ ID NO: 189530 - DNA, 486 bp, synthetic construct
  misc_feature 1..486: note = Description of Artificial Sequence: Synthetic coding sequence
  source 1..486: mol_type = other DNA
atgaagcaggtgcccaccctgaagatcgacggcatcaccatccaccagagtctcgccattattgaatacttagaagagatgcggcctacacctcggttgctgccacaggatccaaagaagagggcaagcgtgagaatgatttctgatcttattgccggcggcatccagccgctccaaaacctgagcgtgttaaagcaggtgggggaggagatgcagctaacatgggcacagaatgccattacatgtgggtttaacgcactggaacagattttacaatccacagctggcatctattgtgtgggcgatgaggtcaccatggccgacctgtgtttagttccccaagttgccaacgcagaacgcttcaaggtggacctgaccccctatccaactataagttctatcaataagaggctactggttctggaggcttttcaagtgagccatccctgtcgccaaccagacactcctactgagttgagggcctag

SEQ ID NO: 189531 - DNA, 486 bp, synthetic construct
  misc_feature 1..486: note = Description of Artificial Sequence: Synthetic coding sequence
  source 1..486: mol_type = other DNA
atgaagcaggtgcccaccctgaagatcgacggcatcaccatccaccagtccctcgccatcatcgagtatctcgaggaaatgagacctaccccccggttgctccctcaggacccaaaaaagagagcatcggttcggatgatcagcgacctcatcgcaggcgggatccaacccctccagaacctttctgttctgaagcaagtaggcgaggagatgcagttgacttgggcccagaacgccatcacttgtggtttcaacgccctggaacaaatcctgcaatctacggccgggatttattgcgttggtgacgaagtcacgatggccgacctgtgtcttgtccctcaggtggctaacgcagagcgcttcaaggtagatttgacaccctaccctacgatctcttctatcaacaaaagactgttagtcctcgaagcattccaggtgtcccatccgtgcaggcaacccgatacccccaccgaactcagagcctag

SEQ ID NO: 189532 - DNA, 180 bp, synthetic construct
  misc_feature 1..180: note = Description of Artificial Sequence: Synthetic coding sequence
  source 1..180: mol_type = other DNA
atgaagcaggtgcccaccctgaagatcgacggcatcaccatccaccagagcctcgcaatcatcgagtacctggaagagatgaggcctacgcctaggcttctgccacaggacccaaagaagagggcctccgtgcgcatgatcagtgatctcatcgccggggggatccagcctctccaatag

SEQ ID NO: 189533 - DNA, 117 bp, synthetic construct
  misc_feature 1..117: note = Description of Artificial Sequence: Synthetic coding sequence
  source 1..117: mol_type = other DNA
atgaagcaggtgcccaccctgaagatcgacggcatcaccatccaccaaagtcttgctattatagaatacttagaagagatgagacctaccccccgcttactgccacaggacccatag

SEQ ID NO: 189534 - DNA, 486 bp, synthetic construct
  misc_feature 1..486: note = Description of Artificial Sequence: Synthetic coding sequence
  source 1..486: mol_type = other DNA
atgaagcaggtgcccaccctgaagatcgacggcatcaccatccaccagagcctcgcaattatagagtacctggaggagatgagaccgactcctcggctgctgccacaagatcccaaaaaacgggcctctgtccgtatgattagtgatcttattgcaggggggatacaacccttacaaaacctcagcgtgcttaagcaggtgggcgaagaaatgcagcttacgtgggcccaaaatgccattacatgcggcttcaatgcactcgaacagatccttcagagtacagcagggatctattgcgtgggtgacgaggtcactatggcagacttgtgcctggttccacaagttgctaacgccgagaggttcaaagtcgacctgacgccatatcccaccatctccagtattaataagcggttacttgtgctggaagccttccaggtttcccacccatgtaggcagcccgataccccaactgagctacgagcatag

SEQ ID NO: 189535 - DNA, 387 bp, synthetic construct
  misc_feature 1..387: note = Description of Artificial Sequence: Synthetic coding sequence
  source 1..387: mol_type = other DNA
atggccggcaacctgctgagcggcgccggccggcggctgtgggactgggttcccttggcctgtcgttccttcagcctgggggtccccagattgattggaatcagactcactctgccccctccgaaagtagtcgataggtggaatgaaaaaagggccatgttcggggtatacgacaacataggaattttggggaattttgagaagcaccccaaggagctgattcgcggccccatctggctgcggggatggaaagggaacgagctgcagagatgcattagaaaaagaaagatggtcggatctcgtatgtttgccgatgacctgcataatctcaacaagagaatacggtacctctataagcactttaatcggcacggcaaattcaggtag

SEQ ID NO: 189536 - DNA, 783 bp, synthetic construct
  misc_feature 1..783: note = Description of Artificial Sequence: Synthetic coding sequence
  source 1..783: mol_type = other DNA
atggaggagatgcgggaccccagcaagatcaagtggggcgacgccggcgcagaatacgtggtcgagtcaactggggtcttcacaaccatggagaaggctggagctcatctgcagggtggggccaagagagtcattatatcagcaccgtccgcagacgcgccaatgttcgtcatgggcgtcaaccatgagaagtacgacaattcgttaaagatcatatcaaatgcaagttgtacaaccaattgtcttgcccccctcgcaaaggttatccacgacaattttggtattgtggaggggcttatgacaacagtacatgctataacggcaacacagaaaacagtggatggaccatctggcaagctgtggcgggacggcaggggggctctgcagaacattattccggcatctaccggtgccgcaaaggccgtcggcaaagtaataccagagctgaacggtaaattaacaggcatggcatttagggtgccaaccgccaacgtcagcgtcgtcgacctgacttgtcgtctagaaaaaccagccaaatacgacgacatcaagaaggttgtcaagcaggcctctgaggggcctttgaaggggatcctggggtacacagaacatcaagtagtgtcatccgactttaattcggacacacatagtagcacgtttgatgccggcgccggtatcgccctgaacgatcacttcgtcaaactcatttcctggtatgacaatgaatttggctattccaatcgtgttgtggatctgatggcacacatggcctctaaggagtag

SEQ ID NO: 189537 - DNA, 882 bp, synthetic construct
  misc_feature 1..882: note = Description of Artificial Sequence: Synthetic coding sequence
  source 1..882: mol_type = other DNA
atggtgtacatgttccagtacgacagcacccacggcaagttccacgggacagttaaggccgaaaacggcaaactcgtcattaatgggaaccccattacaatatttcaggagagagacccatccaaaatcaagtggggagatgccggcgctgaatatgtcgttgagagtacaggcgtgttcaccacaatggagaaagctggcgctcaccttcagggaggagccaagagagtaatcatctccgcccctagcgctgatgctccaatgttcgtaatgggagttaaccatgaaaagtatgacaactccctgaaaatcatctctaacgcctcgtgcacaactaactgtctggcccctttagccaaggtcatacacgacaacttcggaatcgtggaggggctgatgacaacggtccacgctatcacagcaacacagaaaacagtggacggaccgtcaggtaagctgtggcgggacggaagaggagcacttcagaacatcatcccagcctcaaccggggcagcgaaggctgtcgggaaggtcatcccagagcttaacggcaagctcactgggatggcttttcgggtgccgaccgccaacgtcagcgtggtcgatctgacttgcagacttgaaaaaccagcaaaatatgatgacattaaaaaggtagtgaaacaggcaagcgaaggcccactgaagggcatcttgggctataccgagcaccaagtagtctccagcgacttcaattctgacacgcactcttcaaccttcgatgcaggcgcgggcattgcactgaacgatcattttgtgaagctgatcagctggtatgataatgagttcggatacagtaaccgcgtcgttgacctcatggcccatatggctagtaaagaatag

SEQ ID NO: 189538 - DNA, 1008 bp, synthetic construct
  misc_feature 1..1008: note = Description of Artificial Sequence: Synthetic coding sequence
  source 1..1008: mol_type = other DNA
atgggcaaggtgaaggtgggcgtgaacggcttcggccggatcggcaggctagtgacgagagcggcattcaatagtggcaaagtagacatagtggctattaacgacccatttattgatctgaactatatggtatacatgttccagtatgacagtacccatgggaaattccatggaacagtgaaagccgagaacggaaaacttgtgatcaacggtaacccaatcaccatatttcaagagcgcgaccctagcaagatcaagtggggagacgccggagccgagtacgttgtggagtctacgggggtctttacgaccatggaaaaggccggcgcccatctacagggaggagctaagagggtgattatctccgccccctcagctgatgcaccaatgtttgtgatgggcgtgaatcatgaaaagtatgataacagcttaaaaattatcagtaatgcttcctgtactaccaattgcctggctcccctggccaaagtcatccatgataatttcgggatcgttgaaggcctcatgaccacagtccatgccatcaccgctactcagaagacggtagacgggccatctggcaaactctggagagatggccgaggcgctctgcagaacatcatccctgcttctacaggcgccgccaaagctgtgggcaaggtaatcccagagttaaacgggaaactgaccggcatggcattcagagtcccaactgccaacgtcagcgtggtggacttgacttgccgacttgaaaaaccggcgaagtacgatgacattaaaaaggtggtaaagcaggcctcggagggaccattaaagggcattctcgggtacaccgagcaccaggtggtgtccagcgatttcaactctgatacacactcatcgaccttcgacgcaggggccgggatcgcattgaatgatcatttcgtgaagttaattagctggtatgataatgagttcgggtacagcaatagggtggttgatttaatggcccacatggcaagcaaagagtag

SEQ ID NO: 189539 - DNA, 1008 bp, synthetic construct
  misc_feature 1..1008: note = Description of Artificial Sequence: Synthetic coding sequence
  source 1..1008: mol_type = other DNA
atgggcaaggtgaaggtgggcgtgaacggcttcggccggatcggccggttagttacccgtgccgcattcaactccggcaaagtagatatagtcgccatcaacgatcctttcatagatctgaactatatggtgtacatgttccagtatgacagcactcacgggaagtttcacgggacagtgaaagccgagaacgggaagctggtcattaacgggaaccccattacaatctttcaggagagggatccttcgaaaatcaagtggggcgatgccggcgccgaatatgtcgtggaaagtaccggcgtcttcacaaccatggaaaaggctggcgcccacttacagggcggggcgaaacgcgtgattatttctgcccccagtgcggatgccccaatgtttgtgatgggtgtgaaccacgaaaagtacgataacagcttgaagattatctctaacgcatcgtgtaccacgaactgtctggcacccctggcaaaagttatccatgataactttggcattgtggagggcttgatgaccactgtgcatgccataaccgccacccagaagacggtggacgggccttccgggaagctctggagagacggccggggggccttgcagaatatcatccctgccagcactggggcggctaaggcggtgggcaaggtaattcccgagctcaacggcaagctgaccgggatggcattccgggttcccaccgcaaacgtgtccgttgttgacctcacgtgtcgcctggaaaagcccgcgaagtacgatgacatcaagaaggtggtgaaacaggcttctgaagggcctttgaagggtatcctcggctatactgagcaccaggtggtgtcttcagactttaattcagatacacattcttccacatttgatgctggggccggcatcgcgctgaacgatcattttgtgaagctgattagttggtatgataacgaatttggctatagcaaccgagtggtcgacttaatggctcacatggcaagcaaagaatag

SEQ ID NO: 189540 - DNA, 648 bp, synthetic construct
  misc_feature 1..648: note = Description of Artificial Sequence: Synthetic coding sequence
  source 1..648: mol_type = other DNA
atgggcaaggtgaaggtgggcgtgaacggcttcggccggatcggcaggctggtaactagagccgcctttaactccggtaaagtagacatcgtggcaattaacgaccccttcattgacctgaactatatggtctacatgttccagtacgactcaacgcacggaaagttccacggcacagtgaaggccgagaacggcaagttggttatcaacggcaacccaattacgatatttcaggaacgtgacccaagtaagatcaagtggggtgacgcgggagctgaatatgtggtggagtctaccggggttttcacaacaatggagaaggcaggagcccacctgcaaggcggagccaagagggtgataatatccgccccttccgccgacgctccgatgttcgtgatgggcgtcaaccacgagaaatatgacaattcacttaagatcatcagcaatgcctcttgtacaacaaactgtttggccccactggctaaggtgatccacgataattttggcatagtggaaggcctcatgacgacagtgcatgcaattacagccactcaacgcgaggcacattggcacggactcccttgtccgcactgtcagcgagtgagcggcggacccgaccttccatctagaaagacctgccaaatttag

SEQ ID NO: 189541 - DNA, 675 bp, synthetic construct
  misc_feature 1..675: note = Description of Artificial Sequence: Synthetic coding sequence
  source 1..675: mol_type = other DNA
atgaccctgttccacttcggcaactgcttcgccctggcctacttcccttactttattacctataagtgctccggcttatccgagtacaatgcattctggaagtgcgtccaagccggcgtgacgtacctgttcgttcagctctgcaaaatgctctttttagctacattcttcccgacctgggaagggggaatctatgattttattggggagttcatgaaagctagcgtggacgttgctgacttaataggacttaatctggtgatgtctcgaaatgcaggtaaaggcgagtataagatcatggtggcggctctcggatgggccaccgcagaactgattatgagtcggtgcatcccactgtgggtgggggctcggggtattgaattcgactggaagtacatccaaatgagtatcgattctaacatctccctagtgcactatatcgttgcctccgctcaggtctggatgataacacggtacgatctgtatcacaccttccgcccagcagtgctattgctgatgtttctgtctgtgtataaagcctttgttatggagacatttgtgcatctgtgctcactgggaagctgggctgcattgctcgccagagcagtcgtgacaggcctgctcgcgctgagcactctggcactgtacgtcgcagtagtgaatgtgcactcatag

SEQ ID NO: 189542 - DNA, 1104 bp, synthetic construct
  misc_feature 1..1104: note = Description of Artificial Sequence: Synthetic coding sequence
  source 1..1104: mol_type = other DNA
atggccgccgccctgcaggtgctgccccggctggcccgggcccccttgcacccactcctttggcggggctcagttgcgcgcctggcctcctcaatggctctcgccgagcaggccaggcaactgttcgagtccgccgtaggggccgttctccccggtccaatgcttcaccgcgcattgtcacttgaccctggcgggcggcaactgaaagtgcgcgataggaattttcagctgcgtcagaacctgtacttggttggatttggcaaggccgttctgggcatggcagccgcagccgaggaacttctgggacagcatctggttcagggagtgatatcggtgccaaagggaatccgagctgcgatggaaagagcaggcaagcaggaaatgctcctgaagccacattcgagggtacaggtctttgagggcgccgaagacaacctcccagatagggatgctctgcgtgccgctttggctattcaacagcttgccgagggcctgaccgcagacgatctcctgctggtgttaatatctggcggtggtagcgccctcttgcctgccccaatcccccctgtaaccttagaagaaaagcaaacgctgactagactcctggcagcacgtggcgcgacaatacaggaacttaacacgatccggaaagcactgtcccagctaaagggcgggggactggcccaggcggcctatccagctcaagtagtctcactgattttgagcgacgtggtaggtgaccctgtggaggtgattgcttccggccctacagttgctagttcccacaatgtgcaggactgcctgcacatcctgaacagatacgggctgcgcgcagcactcccacggagcgtgaagaccgtgctgtctcgggccgacagcgatccgcatggacctcacacatgtggacatgtgttgaacgtgattattgggtcgaatgttctggccctcgccgaggcacagagacaggcggaggcgttgggctaccaggcagtagtattgtcagccgcaatgcagggatggggcactccagccgctcatagggatgaccgttaccaatgtcacggacaccccccactcgtccctgccgcttccgtcatggcctag

SEQ ID NO: 189543 - DNA, 705 bp, synthetic construct
  misc_feature 1..705: note = Description of Artificial Sequence: Synthetic coding sequence
  source 1..705: mol_type = other DNA
atggccgccgccctgcaggtgctgccccggctggcccgggcccccctgcacccacttctgtggcgaggcagcgtcgcaagactcgcctcatcaatggccttggccgagcaggcccgccaactgtttgaatcagctgtgggagccgtgctgccaggccctatgctgcatcgggcactgagtctggaccctggggggagacaactcaaggtgagggaccgcaactttcagctccgtcaaaacctgtatctcgtcggcttcggcaaggctgtcctgggaatggcagctgcagccgaggaactacttggacagcacctggtgcagggcgtcatctccgtgcccaagggcattcgcgcagctatggaacgtgcaggtaaacaggaaatgctccttaagccccactctcgggttcaggtctttgagggagcagaggataatctgcccgaccgggacgccttgcgtgccgccctcgccattcagcagctagcggaaggcctgaccgctgatgacttgctgttggtgctcatcagtgggggagagccccaccctgttagatgtgggggaggtccatgtgggggcgattgtcaatggccgcatagagggcagtttccgcaatgtgctcgcttacctgcttacccacagtcactgcgtcctccgtgttctcccgccaccttctgcgaggactgtgcggtctctgggcggctttag

SEQ ID NO: 189544 - DNA, 1374 bp, synthetic construct
  misc_feature 1..1374: note = Description of Artificial Sequence: Synthetic coding sequence
  source 1..1374: mol_type = other DNA
atggccgccgccctgcaggtgctgccccggctggcccgggcccccctccatcccctgctgtggagggggagcgtcgcacgtctggcatcttcgatggcactagcggaacaggccaggcaactgttcgaatctgccgtgggagcagtgttaccaggaccaatgctgcatagagctttgtccttagatccgggggggcgccaactgaaggtgcgtgacagaaactttcagctccggcagaacctttatcttgtcgggttcgggaaggcagtcctggggatggctgcggcagctgaagagctgctgggacagcacctggtgcagggtgtcatctcagtgcccaaaggaatccgggctgcccccataccgcctgtgacgcttgaggagaaacagacattgacccgcctcctggccgcaaggggcgccactattcaggaactcaatacaatcagaaaagctctctctcaacttaaggggggcgggctcgctcaggcagcctaccccgcgcaggtcgtctccttgatcctttctgacgtcgtcggcgaccctgtggaagtgattgcatccggacccactgttgcaagcagccacaacgtccaagactgtctgcatatcctgaatcggtacggattgcgcgcagctttgcctaggtctgtaaaaaccgtgttgtctcgagcggatagtgaccctcatggtcctcatacttgcgggcacgtacttaacgtgatcatcggttcgaatgtgctagccctggctgaggcacagcgccaggcggaagctctgggttaccaggctgttgtcctttcagcagccatgcagggcgatgtgaaatctatggcacaattctatggacttctggcgcacgtcgcacggacccggcttacaccttccatggccggcgcttccgtcgaggaggatgcacagctgcatgagttagccgccgagctgcagattcctgatctacagctggaagaagcgttagaaaccatggcatgggggcgcggtcccgtctgcctgttagcggggggggagcctaccgtccaattacagggatccggtcgtggcgggcgtaaccaggagctcgccctgcgtgtgggggccgaacttcgaagatggcccctgggaccgattgacgttctctttttatctggagggactgacggccaagacggacctacagaggccgcaggcgcctgggtaaccccagaactggcctctcaagccgcagctgaaggacttgacattgctaccttcctcgcgcacaatgacagccatactttcttctgctgtctgcagggcggcgcccatctcctgcacacaggcatgactggcaccaacgtgatggatacccacctgttgttccttcggccgcgatag

SEQ ID NO: 189545 - DNA, 1572 bp, synthetic construct
  misc_feature 1..1572: note = Description of Artificial Sequence: Synthetic coding sequence
  source 1..1572: mol_type = other DNA
atggccgccgccctgcaggtgctgccccggctggcccgggcccccctgcatccccttttatggagagggtccgttgccaggctcgcatcttctatggccctggcagaacaggcccgacagttgttcgagagtgcagtgggcgctgttctcccaggaccgatgttacatcgggctctcagcctggatccgggcggaagacagcttaaagtcagggaccgcaactttcagctgagacagaatctatacctggtcgggtttggcaaagcagttctcggcatggccgcggcggcagaggagttacttggccaacacttagtgcagggcgtgatttcggtgcctaaggggattcgagccgcaatggaacgtgcagggaagcaagagatgctgttgaaaccacacagtcgtgtacaagtgtttgaaggggctgaggataacctgcctgatagagacgccttgcgggccgccctcgccatacagcaattggctgaaggactcacagccgacgaccttctgcttgtgctgatctcaggaggagggagcgcactccttcctgcccctattcctcctgtgactctggaggagaagcagactctgactagactgctggccgcacggggagctaccatacaggaactcaacaccatccgaaaagcccttagtcagctaaagggggggggcctcgcgcaggccgcctatcctgctcaagtcgtgtcccttattcttagtgacgtggttggggacccggtcgaagtcatcgcaagcggtccaacggtggcctccagccataacgttcaggactgcctgcacatccttaatagatatggccttcgggccgccttgccacgctctgtgaaaactgtactcagtagggctgattcagacccccacgggccacacacctgtggccacgtcctgaatgtcattattgggtcaaacgtcttggccttggctgaagctcagcgccaggctgaagccctggggtatcaggctgtggtcctcagcgccgctatgcagggcgatgtcaaatccatggcacagttttatggtctcctggcccatgtcgcccgaacacgcctgacaccgagcatggcgggtgcttctgtggaggaggacgctcagctgcacgagctcgctgctgagctccagatccccgacctccaactggaggaggcactggagaccatggcctgggggaggggcccagtatgcttattggcagggggcgaacctaccgtgcagcttcaaggcagtggtagaggcgggagaaaccaggaacttgccctaagagttggggcagaattacgccgctggcctttgggccctattgatgttttattcctgtcgggaggaacagacggtcaggacggcccgaccgaggctgcaggcgcctgggtgacgccggagcttgctagtcaagcagccgctgaaggattggatattgccacattcctggcacataatgacagccatacattcttctgttgtctgcaagggggtgcacatttgctgcatactgggatgaccgggacgaatgtgatggatacacatcttctcttcctcaggcctagatag

SEQ ID NO: 189546 - DNA, 852 bp, synthetic construct
  misc_feature 1..852: note = Description of Artificial Sequence: Synthetic coding sequence
  source 1..852: mol_type = other DNA
atggagctgctgctgagccagagctgcatctggtggcccatggtgggggaaggtaggacaatcataagctgcggaatcaaggcaatggagaggtcaggtaactacctcatatggctacaaaaaggagaaatgcttttgaagcctcactcgagggtccaggtgttcgagggagctgaagacaacctgcccgaccgcgacgcactgcgtgcagcactggccatccagcaactggctgagggtctcaccgcagacgacctgctgttagtgcttatcagtggaggtggatcagcgctcctccccgctcccatcccgcctgtaacactcgaggagaagcagacccttacgaggctcctggccgcccgtggcgcaacgattcaagaattaaatactatcagaaaagccctctctcagctcaaagggggcgggctcgcacaggcggcttatcctgcacaggtggtaagcctgatcctgtctgacgtggtgggagacccggttgaagtgattgcttctgggcccactgtagcctccagccataacgtccaggactgcctgcatatcctgaaccgttatgggctgcgggctgcactccctcgttcggtcaagactgtgttgagtagagccgattcagacccacatggaccacacacctgtggtcacgttctgaatgtaattatcggctcaaatgtattggctctggccgaggcccagcgccaggccgaggcactcggatatcaagctgtcgtactgtctgctgccatgcaaggatggggcacaccagccgcccatcgcgacgataggtaccagtgtcacgggcatccccctcttgtgcctgctgcctcagttatggcctag

SEQ ID NO: 189547 - DNA, 723 bp, synthetic construct
  misc_feature 1..723: note = Description of Artificial Sequence: Synthetic coding sequence
  source 1..723: mol_type = other DNA
atgctgctgaagccccacagccgggtgcaggtgttcgagggcgccgaggataacctccccgaccgcgatgctttgcgtgcggcactagccattcagcagcttgcggagggactaacagcagacgatctgttgctggtgctgatcagcggaggcggctccgctttgctgccggcccccatcccgcccgtgacactggaggagaagcagacgcttacgaggcttctagctgcccggggggcgacaatccaggagctgaacaccattcggaaagccttatcacagctgaaggggggaggccttgctcaggctgcttacccagctcaggtggtcagcttgattctatccgacgtcgtgggggatcctgtggaggttatcgccagtgggcctacagtggcgagcagtcacaacgtgcaggattgtctgcacatcctgaatcggtacgggctgcgcgccgcgctgcctcgctccgttaagaccgtcctctcccgggcagactccgatcctcacggacctcacacttgtggacacgtactaaacgtcataatagggagtaatgtcctggcgttggcagaagctcagcgtcaggcagaggcccttggctaccaggcagtggtgctgagtgccgcaatgcaggggtggggcacacctgcggcccaccgtgatgataggtaccaatgccacggacacccgcccctggtgcccgccgcgtccgttatggcttag

SEQ ID NO: 189548 - DNA, 618 bp, synthetic construct
  misc_feature 1..618: note = Description of Artificial Sequence: Synthetic coding sequence
  source 1..618: mol_type = other DNA
atggccgccgccctgcaggtgctgccccggctggcccgggcccccctccacccactactttggcgcggatctgtcgcacgattggcttcatcaatggccctcgcggaacaggcaaggcaacttttcgagtccgccgtaggggcagtcctccccgggccaatgctgcatagggcactgtccctcgatcccggtggccgccagctgaaagttcgcgataggaactttcagttgcgccaaaatctttatctggtgggctttggcaaagccgtgctgggcatggccgccgctgccgaggagcttttgggtcaacacctcgtccagggcgtcattagcgttcctaaggggatcagggcggcaatggaaagagccggaaagcaagagatgctgttaaagccccattctagagtgcaagtctttgaaggagccgaggataacttgcccgacagagacgccctgcgggcggccctggcaatccagcagctcgctgaaggcttgacggctgatgatctcctgctcgtcctgatctctgggtggggaacacctgccgcgcatcgcgacgaccggtaccagtgccatgggcacccccccctagtgcccgccgccagcgtcatggcatag

SEQ ID NO: 189549 - DNA, 705 bp, synthetic construct
  misc_feature 1..705: note = Description of Artificial Sequence: Synthetic coding sequence
  source 1..705: mol_type = other DNA
atggccgccgccctgcaggtgctgccccggctggcccgggcccccctccacccgctcctatggaggggttccgtggctcgcctggcctcaagtatggccttggcagagcaggctagacagctttttgagtccgcagttggggcagtgctgcccgggcctatgctgcatagagctttaagcctggacccaggcggacgccagcttaaggttcgggacaggaatttccaactgcggcaaaacctgtatctggtgggctttggaaaggctgttttagggatggccgctgccgcagaggagctgctcggtcagcacctagttcagggtgttattagtgttccaaagggcatacgagctgctatggaacgagccggaaagcaggagatgcttctcaagccgcactcccgggtgcaggtgttcgaaggtgccgaagataacctgcctgaccgtgatgctttaagggcagctctagccatccagcagctcgcggaaggtttaaccgcagatgacctgctactggtgttgataagcggtggggaacctcatcccgtgcgttgcggaggcggaccctgcggcggggactgtcaatggccccaccgggggcagtttccacagtgcgccagacttccagcatatccacagtccctgaggcccccttgttcgcccgccacgttctgtgaggactgcgccgtgtctggcagactctag

SEQ ID NO: 189550 - DNA, 285 bp, synthetic construct
  misc_feature 1..285: note = Description of Artificial Sequence: Synthetic coding sequence
  source 1..285: mol_type = other DNA
aagatcctggacgccatgaaccgggactgcggcatccccctgagccacctccaggtggacgggggaatgacaagcaataagattctgatgcagcttcaagccgacattctgtatatccctgtagtgaagcctagcatgcccgagactactgccttgggagcagcaatggccgctggggccgccgagggggtgggggtttggagtctcgagccggaggacctgagcgcggtgactatggagaggttcgaaccacagatcaatgccgagggaaccttcaaagagtag

SEQ ID NO: 189551 - DNA, 1662 bp, synthetic construct
  misc_feature 1..1662: note = Description of Artificial Sequence: Synthetic coding sequence
  source 1..1662: mol_type = other DNA
atggccgccagcaagaaggccgtgctgggccccctggtgggcgccgtcgaccaggggacaagtagcacaagatttttagtttttaattccaaaactgcagaactgctgtcccatcaccaagtggagattaagcaggagtttcctcgtgaaggctgggtggagcaagaccccaaggaaatactgcatagcgtgtacgagtgtattgagaaaacctgcgagaaactggggcagctgaatattgatatttccaacatcaaggcaataggagtgtccaatcagcgggaaacaacagttgtctgggacaaaattactggcgaaccgctatataatgcagtggtctggcttgacctaaggactcagtccacagtggagagcctatcaaagcgaatcccaggcaacaataactttgtgaaatccaaaactggtttgcctctttcaacatacttctcagcagtgaaactgcgatggctgctggataatgtacgtaaagtgcagaaagctgtcgaagagaaacgggcgctttttgggacaattgactcatggttaatctggagcctcaccggcggcgtcaacggaggcgtgcactgtactgacgtcactaacgctagtcgtactatgctgttcaacatccacagtctggaatgggataagcaactatgcgagttttttggcatccccatggagatccttccaaatgtgcgaagctcctccgaaatatatggattaatgaaagctggggccctagaaggcgtgccaatcagcggctgcttaggggaccagagcgccgcactggtgggccagatgtgcttccagatcggacaagctaaaaatacatatggaaccggctgtttcctgttgtgtaacaccggccataaatgtgttttttccgaccatggcttgttaacaaccgtggcttacaagctcgggcgggacaagccagtctactacgcgctcgagggcagtgtggctatcgcaggtgccgtgatcagatggctgcgcgacaacctcggcatcatcaaaacaagcgaagagatagaaaagctggcaaaagaggtgggcacatcttatggctgctactttgtaccagcttttagtggcctttacgctccctactgggaaccctcagctcgcggcattatttgcggccttactcaatttactaataagtgtcacattgccttcgccgcactggaagcggtgtgcttccagactagggagattcttgatgccatgaatcgcgattgtggaattccactgagtcacctgcaggtggatgggggcatgaccagtaataaaatcctgatgcagctccaggctgacatactgtacattccagtagttaaaccatccatgcctgagactaccgctttgggtgcagccatggctgccggcgcagccgagggagtcggagtatggtccctggagccagaggacctaagtgcagttaccatggagcgttttgaaccgcaaatcaacgcagaggagtccgaaattcgatacagcacctggaagaaggccgtcatgaagtctatgggctgggtgactactcagtcccctgaaagcggagacccttccatattctgtagtctccccctcgggttcttcattgtctccagcatggtcatgttgatcggcgcaagatacatctcggggatcccctag

SEQ ID NO: 189552 - DNA, 1575 bp, synthetic construct
  misc_feature 1..1575: note = Description of Artificial Sequence: Synthetic coding sequence
  source 1..1575: mol_type = other DNA
atggccgccagcaagaaggccgtgctgggccccctggtgggcgccgtcgaccagggcacatccagtactcggtttctggtgttcaattctaaaaccgccgagctgctctcacatcaccaagtcgagattaagcaggagttcccaagggaaggttgggtggagcaggatcctaaggaaatacttcacagtgtctacgagtgcatcgaaaagacttgcgagaaactgggtcagctgaacattgatatctccaacatcaaagctattggagtgagcaaccagcgtgaaacaacagttgtatgggacaagattacaggagagccactctataacgcagttgtttggcttgacctccgcacacagagtactgttgagtcccttagtaagagaatccccgggaataataactttgtcaagtcaaaaactggattgcctttgtccacctattttagcgccgtgaagctgcggtggttgttagacaacgtcagaaaggtgcagaaagctgtggaggaaaaaagagccctgttcggtaccatagattcttggctgatttggtctttgacaggcggcgtgaatggtggtgtgcattgtaccgatgtgaccaatgctagcagaactatgctgttcaacatacacagcttggaatgggacaaacagctctgcgagttttttggaattcctatggaaatcttgcccaatgttaggagcagtagcgagatctatggtcttatgaaagcgggcgccttagagggtgtacctattagcggatgcctgggagatcaaagtgcagcactggtgggacagatgtgcttccagatcggacaggcgaaaaatacgtacggaacgggatgcttcctcctttgtaataccgggcacaagtgtgtcttcagcgatcacggattactcacgacagttgcatacaagcttgggcgagacaagccggtgtattatgccctcgaaggtagcgtggctattgcaggagctgttatcagatggttaagagataacctgggtatcatcaaaacttccgaagagatagaaaagctcgccaaggaagttgggactagctacggatgttatttcgtgccggccttctctggattgtatgcgccttattgggagcccagtgcccgggggatcatctgcggtctgacgcagttcacgaacaagtgccacattgcgtttgctgcgctagaagccgtatgtttccagacaagagagattctcgacgcaatgaatcgcgactgcggaatcccattatcccatttgcaggtagacggaggcatgacctctaacaagattctgatgcagctgcaggcagatatcctgtatatccccgtcgtgaagccctccatgccggagactactgcccttggagcagcgatggcggccggagccgccgaaggcgtcggagtttggtccctcgagccagaggacctgagcgcggttactatggagaggtttgagcctcagatcaatgccgaggaaagtgagattcggtactccacttggaaaaaagctgtgatgaagtctatgggctgggtcaccactcaaagcccagaaagtggcatcccctag

SEQ ID NO: 189553 - DNA, 1593 bp, synthetic construct
  misc_feature 1..1593: note = Description of Artificial Sequence: Synthetic coding sequence
  source 1..1593: mol_type = other DNA
atggccgccagcaagaaggccgtgctgggccccctggtgggcgccgtggatcagggtacctcaagcacaagatttcttgtctttaacagtaagaccgcggagctgttatctcaccatcaggtagagattaagcaagaattcccgcgcgaagggtgggtggagcaggacccaaaagagatcctgcacagcgtgtatgagtgcatcgaaaagacctgcgaaaaactgggtcagctgaatatcgatatctccaatataaaagctattggcgtgtcaaaccaaagagagactactgttgtgtgggataagattaccggcgaaccactgtacaacgccgtggtctggctcgacttaaggacacagagcacagtggagtcgctgtcgaagcgcatcccggggaacaacaactttgtgaaaagcaaaacgggtctgccgcttagtacatatttcagtgccgtcaaacttaggtggctgttggacaacgtccggaaagtgcagaaagctgtggaagaaaaacgggcattgttcggaacaatcgattcctggctgatttggagcctcactggtggtgttaatggaggcgtccactgtacagacgttacaaacgcaagtcgaacgatgctgttcaatatccactctttggagtgggacaagcagctatgcgaattcttcggcattcccatggaaatcctccctaacgtccgctcatccagtgagatctacggactgatgaaaatttcccactctgtgaaggctggcgccctggaaggcgtgcccattagcggatgtctcggcgaccagtctgccgccctggttggacagatgtgttttcagatcgggcaagcaaagaacacgtatggcactgggtgtttcttactgtgcaacaccggtcacaaatgcgtcttctccgatcacggactgctaacaacagtagcctacaagctgggacgagataagcccgtatattacgctcttgagggtagtgttgcaatcgctggagccgttattcggtggctgcgcgacaatctgggaattataaaaacttctgaggaaatcgaaaagctcgcaaaggaggttggcacaagttatggatgttactttgtgcctgccttttcaggcctctatgccccatattgggagccttccgcccgcggaatcatctgtggtcttacacaatttactaataagtgccatattgcctttgccgcgctggaggcagtttgttttcaaacccgagagatcctagatgccatgaatcgcgattgcgggatccctctttcacaccttcaggtggacggtggtatgacaagcaacaaaatactgatgcagctgcaagccgacattctatatataccagtcgtgaaaccttcgatgcccgaaactacagccctgggggcggcgatggccgcaggtgcggccgagggtgtcggtgtatggtctttagagcctgaggacctgtcggcggtcaccatggagcggtttgaacctcaaatcaatgcagaggaatcagaaattagatactccacttggaagaaagccgtgatgaaatccatgggatgggttacaacccagtcccccgagtctggaatcccgtag

SEQ ID NO: 189554 - DNA, 1065 bp, synthetic construct
  misc_feature 1..1065: note = Description of Artificial Sequence: Synthetic coding sequence
  source 1..1065: mol_type = other DNA
atgctgttcaacatccacagcctggagtgggacaagcagctgtgcgagttctttgggatccctatggagattctgccaaacgttcggagttcttccgaaatttatggattaatgaaaatttcccattcagtcaaggcaggcgccctcgagggagtacccattagcggttgtctgggagaccagagtgctgctctggttggacagatgtgtttccagattggacaagcaaaaaacacttatggaactggctgctttctgttatgcaatacaggccacaagtgtgtttttagcgaccacgggcttctaacgaccgtggcgtacaaactagggcgagataagcctgtttattatgcactcgaagggtcggttgccatcgcgggcgctgttatacgatggctgagagataacctgggaataatcaagacaagcgaggaaattgaaaagcttgccaaagaagtgggcacttcttacggatgctatttcgtcccagctttttccggattatacgccccatattgggagccatctgcccgcggtatcatttgcgggctgactcaatttacaaacaagtgtcacatcgctttcgccgcactcgaggcagtctgtttccagactagagagattcttgatgctatgaacagggactgcggcattcccctttcacatttgcaggttgacggtggaatgacaagcaataagattctgatgcagctccaggcggatatactgtacataccagttgttaaaccaagcatgcccgagactaccgctctgggtgcggcaatggcagccggcgcagccgaaggcgtcggcgtgtggtcactggaaccagaggatctctctgctgtaactatggagaggtttgagcctcagattaatgcggaagagagcgaaattagatacagcacctggaaaaaggcagtcatgaaaagcatgggatgggtgacaacacaaagccctgaaagcggggacccatcaatattctgcagcttgcctctcggattctttatcgtgagcagtatggttatgcttatcggagcccgatatatatccggcattccatag

SEQ ID NO: 189555 - DNA, 1104 bp, synthetic construct
  misc_feature 1..1104: note = Description of Artificial Sequence: Synthetic coding sequence
  source 1..1104: mol_type = other DNA
atggcctacctggacaacttcaagaccaacgcccggcacttcatcctgtttgtcaatatctcaagccttacaggtggcgttaacgggggggtccactgtaccgacgtgacaaatgccagccgaacaatgctctttaacatccactccctcgagtgggacaagcagttatgcgagttcttcggcatacctatggagatcctgcccaacgtcagaagcagctccgaaatttacggattgatgaaaattagccactccgttaaagcgggagccctggagggggtacccataagcgggtgtctgggggatcagagcgccgccctggtggggcagatgtgcttccagatcggccaggcgaagaacacttacggcactggctgcttcctgctctgtaatactgggcataagtgtgtgtttagtgaccatggccttttgaccactgttgcgtacaaattgggccgcgacaagcccgtctactacgctttggaggggagcgttgctatagccggggccgtaatccggtggctcagggacaacctgggcatcataaagacatctgaggagatagagaagctggccaaagaggttggcacgtcatatgggtgttactttgtgccagcgttcagtggattgtacgcgccctactgggagccctcggcacgaggaattatttgcggactgactcagttcacgaataagtgccacatcgcctttgccgccctagaagctgtttgtttccagacccgtgagatcctcgacgccatgaatagagattgcgggatccctctcagtcatcttcaggtggatggagggatgactagtaataagatcctcatgcagcttcaagcagacatactctatatccctgtggtgaagcctagtatgcctgagacaacggctttgggagccgcaatggcagcgggggcggcagagggtgtaggtgtgtggagcctcgaaccagaggacctgagcgcagttacaatggaacgttttgagcctcagattaatgcagaggaaagcgagatacgctacagtacttggaaaaaagctgtgatgaaatcgatgggatgggtgacaacacagtccccggagtctggcatcccatag

SEQ ID NO: 189556 - DNA, 1680 bp, synthetic construct
  misc_feature 1..1680: note = Description of Artificial Sequence: Synthetic coding sequence
  source 1..1680: mol_type = other DNA
atggccgccagcaagaaggccgtgctgggccccctggtgggcgccgtggaccagggtaccagctctacacgcttcctggtgttcaacagcaaaaccgcggaactgctttcacatcatcaggtggaaattaaacaggaattcccaagggaaggttgggtcgagcaggaccccaaagagatactccatagcgtgtacgaatgtattgaaaagacgtgcgaaaagctgggccaactgaacattgatattagtaatatcaaagctattggagtgagtaaccagagagagactacagtggtttgggacaaaattaccggcgagcctttatacaatgccgtcgtgtggctggacctgagaacgcaaagtaccgttgaatccctgtctaagaggatccctgggaataataattttgtgaagtctaagactgggctcccactgtcgacttactttagcgcggtgaagctcagatggcttttggacaacgttagaaaagttcagaaagccgtcgaggaaaagagggcactcttcggcacaatagacagttggttgatatggagtctgacaggaggggtaaacggaggcgtgcactgtactgatgtgacaaacgcctcaagaaccatgctgtttaatatacattccctcgagtgggataagcagctgtgtgagttctttggcattcctatggagattctgcccaatgtgcggagcagcagcgagatctatggactcatgaccattcacaattcaaagaaggcaggggccctggaaggagtgcctatctccggttgcttaggcgaccagtccgccgcactcgttggccagatgtgttttcagataggtcaggccaaaaatacttacggtactggctgtttccttctttgtaatacaggacacaagtgtgttttcagcgaccatgggctgttgacaacggttgcttataaactcgggagagataaacccgtctactacgcacttgaaggctctgtggcaatcgccggagccgtgatcagatggctcagggataaccttggcatcatcaagacaagtgaggagatcgagaagcttgccaaggaagtgggtacctcctatgggtgttatttcgtgcctgcttttagcggactctacgccccttactgggaaccttccgcacgagggatcatttgtggactgacccaatttactaacaaatgccacatagccttcgcagctcttgaagccgtgtgcttccagacccgcgagattctggatgccatgaatagggattgtggcatccccttgtctcatctccaggtggatggcggtatgactagtaataagattctaatgcagcttcaagccgacatcctgtacattcctgtggtaaagccatcgatgcctgagacgaccgctctcggtgctgcaatggccgcaggggccgcggaaggtgtgggagtctggtccctcgagcctgaggacctctctgccgttaccatggaaagatttgagccccagatcaatgcagaagagtcagaaatccggtatagtacctggaagaaagcggtaatgaagtctatgggctgggtcacgacacaatcacctgagagtggtgatccaagtatcttctgtagcttgccactgggcttctttattgtgagttcgatggttatgctgataggagcccgatatatctcgggcatcccttag

SEQ ID NO: 189557 - DNA, 1662 bp, synthetic construct
  misc_feature 1..1662: note = Description of Artificial Sequence: Synthetic coding sequence
  source 1..1662: mol_type = other DNA
atggccgcccccaagaccgccgccgtgggccccctggtgggcgccgtagtgcagggaactaactctacaaggttccttgtgttcaacagcaaaacggccgaattactgagccatcacaaggtggaactcacacaggagttcccgaaggaagggtgggttgaacaggaccccaaagagatactgcagagcgtttatgaatgtattgcccgaacatgcgagaaactggatgaactcaatattgacatttccaacatcaaggctgtcggtgtgagcaatcagcgagagactacggtcatttgggacaagctgacaggggaaccactgtacaatgctgtggtctggctggacctaagaacccagaccactgtggaagacctcagcaagaagattcctggaaacagcaattttgtgaagtccaagaccgggttaccattgagcacctactttagcgccgttaaattgagatggatgctcgataacgtcaggaatgtgcaaaaggcagtggaagagggcagagccctgtttggcaccatcgacagttggctgatctggtcactgactggtggtgtcaatgggggggtccattgcaccgatgttaccaacgcaagtcgaacaatgttgtttaatatacacagcctcgaatgggacaaggagctctgtgatttcttcgagatacccatggacttacttccaaatgttttttcctcatcagagatatatggactgattaaaaccggagcactggaaggggtgcccatcagtggttgcctgggggaccaatgtgccgccctggttggccaaatgtgctttcaggaaggacaagctaagaacacatacggaaccggatgtttcctcttatgcaatacggggcgtaaatgtgtattctctgaacacggactattgaccactgtagcatataaactgggacgggagaagcccgcatactatgcactggaggggtcagttgccattgctggagcagttatccgttggctgagggacaatctcggcataattgagacttcaggggacattgagagactggctaaggaagtgggcacttcatacgggtgttattttgttcccgcgttctctggcctttacgccccatactgggaaccaagcgcgaggggtatcctctgtggactaacacagttcacaaataagtgtcatatcgcctttgcagccctggaggcagtgtgctttcagacacgcgaaatactggaagctatgaatcgggattgtggaatacctctccgtcacctgcaagtcgacggcggcatgactaacaataaggtcctcatgcaactccaggccgatatcctccatatccctgtgatcaagcccttcatgccagaaaccacagctctaggagccgcaatggctgctggagccgcagaaggggtgtctgtgtggagccttgagcctcaagctctgagcgtgctgcgaatggaacgattcgaaccgcaaatccaggcaactgagagcgaaatcagatacgccacatggaaaaaggccgtgatgaagagcatgggctgggtgaccagccagtcccccgaggggggggatcccagtatcttctcgagtctccctcttggattctttatcgtttccagcatggtgatgctgataggcgccaggtatatcagtggagtgccatag

SEQ ID NO: 189558 - DNA, 1050 bp, synthetic construct
  misc_feature 1..1050: note = Description of Artificial Sequence: Synthetic coding sequence
  source 1..1050: mol_type = other DNA
atggccagcaagaaggtgtgcatcgtgggcagcggcaactggggctcggccattgctaagattgtaggcgggaacgccgcgcaactggcacaattcgatcccagggtcactatgtgggtcttcgaggaggacattggtggaaagaagttgactgagataatcaatactcagcacgagaacgtgaaatacctgccaggccacaagctgcctccaaatgtcgttgccgtgcctgacgttgtccaagcggcagaagacgctgatatactaatctttgtggtaccccaccagttcatcggcaagatttgcgaccagcttaagggccatctgaaggcaaatgctactggtattagtttaataaagggcgtggatgagggtcctaacggcctcaaactgatatctgaggttataggagaaaggctgggcatccctatgagcgtcctcatgggggccaacatcgcatctgaagttgctgatgagaaattctgtgaaaccacaatcgggtgtaaagacccggcgcagggacagctactgaaggaactcatgcagacaccaaattttcgcattacagtggtccaggaagtggataccgttgaaatttgtggcgcccttaagaatgtagtagccgttggcgccggattctgtgacggcctcgggtttggcgataacacgaaggccgccgtgattcggctgggattaatggagatgatagctttcgcgaagctcttttgcagcggaccagtgagctctgccacgttcctggagagctgtggggtggccgatctcatcactacatgctacggagggcgcaatcgtaaggtcgctgaagcgttcgccaggactggcaaaagcattgagcagttggaaaaggaactcctgaacgggcaaaagctgcagggccccgagaccgctcgggagttatatagcatcttacagcataaggggttagtagacaagttccctctgttcatggcagtgtataaggtatgttatgagggccagcccgtgggggagttcatccattgtcttcagaaccatcctgagcatatgtag

SEQ ID NO: 189559 - DNA, 981 bp, synthetic construct
  misc_feature 1..981: note = Description of Artificial Sequence: Synthetic coding sequence
  source 1..981: mol_type = other DNA
atgcagacccccaacttccggatcaccgtggtgcaggaggtggacaccgttgaaatctgtggggccctgaaagtccgcggcgctcaacgacaactctggggagaggagaaggctcctaaggaggtctggctctccagcgcaagactccaggtcctgcaggcgctcaccatcgagcagtggtttcctttcccaactatgagccacgcttatagacgatcctgccgctctaaggctcgcgcgattcaagctgactacagttcctctgacagggggccaccctgtagctgcccaattctcgccccctgcggcacccctcacccactggcgcccggaggtcaaggcgacaaggagatgcctagattgatgggtgacaaaacatcgctgacccctaggcagacaaatgggcagaactatggatcctggactgccgtggacggcctgtacaacggtatggtgcggtgggaagaccaattggaaaggagagttgttttcagaaaatgtccaaggggcgggagtatggggcagggcctgcggaagggagttcagcagggaggaaagcctcgaggaggtagcaggctgctgaagggccacaccctctacctcagcagtgccgtaggtgtgaccgctgacgaaatgagtatgcgagggctgcatatgggcccaatcggagggggattatttacttatgatctgcactctttcaaaaacgtagtagctgtgggagccggcttttgtgacgggctgggattcggtgacaatactaaagctgccgtgatacgcctggggcttatggagatgatcgcatttgccaagcttttctgctccggtccagtgagtagcgctacctttttggagtcctgcggggtggccgatctgataacgacctgctatggtggccgcaatcgcaaggtggcagaggccttcgcccgcactggtaaggtgggcccagggagacgggaaaatcgaggtgctgcactatag

SEQ ID NO: 189560 - DNA, 1056 bp, synthetic construct
  misc_feature 1..1056: note = Description of Artificial Sequence: Synthetic coding sequence
  source 1..1056: mol_type = other DNA
atggccgccgcccccctgaaggtgtgcatcgtgggcagcggcaactgggggagcgccgtggccaagatcatcggtaataacgtgaagaagctccagaaattcgccagcactgtcaaaatgtgggtgtttgaagagacagtgaatggacgtaaactaaccgatatcattaataatgatcacgaaaatgtgaaatacctgccagggcataaactgcccgaaaatgtggttgcaatgtccaacctgagcgaggcagtgcaggacgcagatcttttagtattcgtgatcccccaccagttcatccaccggatttgcgacgaaattactggccgcgtgccaaagaaggccctgggcataacccttatcaaagggatcgatgaaggccctgaagggctgaaactcatttcagacattatacgcgaaaaaatgggaatcgacatttcagtgctaatgggagccaacatagccaatgaagtggcagcagaaaagttctgcgaaacaaccattggatccaaggttatggaaaatggacttctgtttaaagaactgcttcagacgcccaacttcaggatcacagtcgtagacgacgctgataccgtggagttatgtggggcccttaagaatatcgtggccgtcggggccggcttttgtgacgggctccgatgtggagataacacaaaggccgccgtcattaggttgggcctcatggagatgatagctttcgccagaatcttttgtaagggacaggtatcaaccgctactttcctcgagtcctgtggcgtcgcggacctgatcaccacgtgttatggcggtcgtaataggcgcgtcgctgaggcattcgccaggaccggaaagaccattgaagaactggagaaagagatgcttaacgggcaaaagctgcaggggccacagacgtcggcagaagtgtacagaatactaaagcaaaaggggctgctagataaattccccctgttcacagcggtctaccagatctgctatgaatccaggccagtgcaggagatgctgagctgcttgcagtctcatcctgagcacacgtag

SEQ ID NO: 189561 - DNA, 1860 bp, synthetic construct
  misc_feature 1..1860: note = Description of Artificial Sequence: Synthetic coding sequence
  source 1..1860: mol_type = other DNA
atggagagcagcagcagcagcaacagctacttcagcgtgggccccacgtctccttcggctgtcgtgctcctgtattctttgtccaaagagtctctccagtccgtagatgtgttgagggaggaggtatctgagattctggacgaaatgtctcacaagttgcgacttggcgcaattcggttttgcgcctttaccttgtcaaaggtgttcaaacaaatattctctaaggtctgtgttaacgaggaaggcatccagaagctgcagcgggcaatacaggaacatccagttgtgcttcttccgtcccaccgctcctatatagatttcctgatgttgtctttcctgctatataactatgacctgcccgttcctgtcattgcggccgggatggatttcctgggtatgaaaatggtgggggagttgttgcgtatgagcggggccttctttatgcgcaggacttttggaggcaacaagctctactgggctgtgttctctgaatacgtcaaaaccatgctcaggaatgggtacgctccagtcgagttcttccttgagggtacgcgctccagatctgctaaaactttaactccaaaatttggtctcctaaatatcgtcatggagcctttctttaagcgtgaggtgtttgatacctaccttgtccctatttccatctcctatgacaagatccttgaagagacactgtacgtgtatgagctgctgggggtaccaaagcctaaggaatccactaccggcctgctaaaggccaggaaaattctcagtgagaatttcggttccatccacgtgtatttcggcgaccccgtgtctctcagaagcctggcggcgggacgaatgtcaaggagttcttacaatttagttcctcgctacatcccccagaagcagagtgaagatatgcatgccttcgttaccgaggtcgcatacaagatggaactgctgcagatcgagaacatggtgcttagcccctggacccttatcgtggcggtccttctgcaaaatcgacccagcatggactttgatgcgcttgtagaaaagaccctgtggctgaaaggtttgactcaggcgttcgggggtttcctgatctggcctgacaacaaacccgccgaagaagtggtcccagcgtccatattgcttcattctaacatagccagcttagtgaaggatcaggttatccttaaggtcgatagcggagacagcgaagttgtggacggcttaatgcttcaacacattactttgttgatgtgcagtgcttatcgcaatcagcttttaaacattttcgttaggccttctctggtggccgtggcacttcagatgactcccgggtttcgcaaggaggatgtctactcatgcttcagattcctgcgggatgtgtttgcagatgaatttatctttttacctggcaataccctaaaagactttgaggaggggtgctaccttctttgtaaatccgaagccattcaggtcacaaccaaggacattctcgtcaccgagaaaggcaacacggtactcgagtttcttgtggggttattcaagccgttcgtggaaagctaccagattatctgcaagtacctgctaagtgaagaggaggatcattttagtgaggagcagtacctagctgctgtccgcaagttcacaagccaattactggatcagggtacgtcccagtgttacgatgtgctctctagtgatgtgcaaaagaacgcgctggccgcctgcgtgcggttgggtgtggtggaaaagaaaaaaattaataacaactgtatctttaatgtgaatgagcctgctacgacaaagcttgaagaaatgctgggatgcaagactccaattggaaagcctgcgacagctaagctttag

SEQ ID NO: 189562 - DNA, 2043 bp, synthetic construct
  misc_feature 1..2043: note = Description of Artificial Sequence: Synthetic coding sequence
  source 1..2043: mol_type = other DNA
atggagagcagcagcagcagcaacagctacttcagcgtgggccccacttctccctccgcagttgtccttctctactccaaagagctgaagaaatgggacgaattcgaggacattctcgaggagcgtcgccacgtgagtgatctgaaattcgccatgaaatgctacacacctctagtctataagggtatcaccccatgtaaaccgatcgatatcaagtgctctgtcctgaactctgaagagattcactacgtgatcaagcaattgagtaaggaatctctgcaatccgtagacgtccttagggaggaggtgtcagaaatactcgatgagatgagccataaacttcgtttgggagctattcgcttctgtgcgttcacactctctaaggttttcaaacagatttttagtaaagtgtgcgtgaacgaagaaggtatccaaaaactgcaacgggcaatccaggagcacccggtggtcctgttgccctcccaccggagttatatagatttcctgatgttaagttttctcctgtacaactatgacctccccgtgccagttatcgcagctgggatggatttcctgggcatgaaaatggtaggggaactgctcagaatgagtggcgccttttttatgcgtaggacttttggcggaaataaattgtactgggcggtttttagtgagtacgtgaagacaatgctgaggaacgggtacgctcccgtggaattttttttggaaggtacacggagtagatcagctaagactctgaccccgaagtttgggttactgaatatagttatggaacctttcttcaagagggaggtgtttgacacatacctggttccaattagcatctcctacgacaaaatccttgaggagaccctttatgtgtatgagcttctcggcgtgcctaagcctaaggagagcaccactggtctgctgaaggctcgcaaaatactgtcagagaatttcgggtccattcacgtgtattttggggacccggtttctctgaggtccttagcagccggcaggatgagcaggagcagttacaatctggtcccacgatacattccccagaagcagtctgaggacatgcacgcctttgtcacagaggtcgcctacaaaatggagctcttacagatcgaaaacatggttctcagcccctggacactcatcgttgccgttctgctgcaaaataggcccagcatggacttcgacgcgctagtcgagaagacgctgtggcttaaaggccttactcaggcgttcggagggttcttaatctggccagacaataagcccgcggaagaggtggtgcctgcttccatacttctgcactccaatatcgcatcacttgtcaaggaccaggtgatccttaaagtggacagtggtgattctgaggtggttgatgggctcatgctgcagcacattactttgttgatgtgttcagcctataggaaccagctgttgaatatcttcgtcaggcccagtctcgtggccgtcgcacttcagatgacaccgggtttccgaaaggaggacgtatattcatgcttcagattcctgagagacgtatttgctgacgagttcatctttctgcctgggaacaccctcaaggactttgaggagggatgctacctactctgtaagagtgaagccatccaggtaaccacaaaagatatcctggtaaccgaaaaaggtaatacagtgctcgaattcctcgtgggcttgtttaaaccctttgtcgagtcgtaccagattatatgtaagtacctgctgtccgaggaagaagatcacttctctgaagagcaatacctcgcggccgtgagaaaatttaccagtcagcttctggatcagggcactagccagtgttatgacgtcctgagcagtgatgtgcagaagaatgcacttgccgcgtgcgtaagactgggcgtcgttgaaaagaaaaagatcaacaacaattgtatttttaacgttaacgagcccgccaccacgaaattagaagaaatgttaggatgtaaaaccccaatagggaagccggccacagctaagctgtag

SEQ ID NO: 189563 - DNA, 1764 bp, synthetic construct
  misc_feature 1..1764: note = Description of Artificial Sequence: Synthetic coding sequence
  source 1..1764: mol_type = other DNA
atggagagcagcagcagcagcaacagctacttcagcgtgggccccacatcaccgtccgcggtcgtccttttatacagtaaggaactgaagaaatgggacgaatttgaggatattctggaagaacgcaggcatgttagtgatctgaagtttgctatgaagtgttacacaccactggtgtataagggtatcacaccctgtaagcctatcgacattaagtgttccgtcctgaattccgaggaaatccactatgttattaaacagctatcaaaagaatccctgcagtcagttgatgttctccgcgaggaggtgagcgaaatccttgatgagatgtctcacaaactccgtctcggtgcaatacgtttttgcgccttcaccttaagtaaggtgttcaagcagatattcagtaagctgcagcgcgctattcaggagcaccctgtagtcctacttccttctcatcggagctatatcgatttcttgatgctgtcgtttctcctgtacaactatgatctccccgtcccggttatagcagctggaatggatttcctgggcatgaagatggtcggtgagctcctgcgtatgagcggcgcctttttcatgcgccggacatttggcggcaataagttgtactgggctgttttcagtgagtacgtcaagactatgctaagaaacggatacgcccctgtggaattctttctggaggggacccgaagtcgtagcgcaaagacattgaccccaaaattcggactgctcaacatagtcatggaaccttttttcaagcgagaagtgttcgacacctaccttgtgcctattagcatcagttatgataagatcctagaggaaacactctatgtgtacgaattactcggggtgccgaaacccaaagagtcaactaccggtctgcttaaagcccgaaaaattctgtccgaaaacttcggatccattcatgtatattttggcgatcctgtgtctttacgctcattagctgcaggccgcatgagtcggtcgtcatataatctggtacctcgatacattcctcagaaacaaagcgaggacatgcatgcattcgtcaccgaagtggcctacaaaatggagctcctgcagattgagaatatggtgcttagtccgtggactctcattgtggcagttctgctccaaaataggcccagtatggacttcgatgcgctcgtggaaaagaccctgtggctaaaaggactgacacaagcctttggtgggtttctgatctggcctgacaacaagccagcggaggaggtcgtcccagccagcattctcctacactcaaatattgcttccctagtgaaggatcaggtgatcctgaaggtagattctggcgattctgaggttgtagatggccttatgttgcagcacattaccctattaatgtgctctgcctataggaaccaattacttaacatttttgtgcgcccttctctggtcgctgtggcactgcagatgacccccggatttagaaaagaggacgtgtactcttgcttcaggttcctccgcgacgtgttcgcagatgagttcattttcctcccaggtaacacgctcaaagatttcgaagagggctgctacctcctgtgcaaatcagaagcaatccaggtaactacgaaagatatcctagtaacagagaagggcaacacagtgctggaatttctggtgggcttgttcaaaccattcgttgagtcttatcagatcatttgtaagtatcttctgtcggaggaagaagaccacttttctgaatag

SEQ ID NO: 189564 - DNA, 669 bp, synthetic construct
  misc_feature 1..669: note = Description of Artificial Sequence: Synthetic coding sequence
  source 1..669: mol_type = other DNA
atggagagcagcagcagcagcaacagctacttcagcgtgggccccaccagccccagtgccgtggtgcttttatatagcctctccaaagagagtcttcagtcagtggatgttctgcgcgaagaggtgtctgaaattttggacgagatgtcccataagctgcgactgggcgcgattcggttctgcgcgttcaccctgagcaaggtattcaaacagattttctcgaaggtgtgtgtcaacgaagaaggcattcagaagcttcagcgtgcaatccaggaacaccccgtggtactgctgcccagccaccggagctacatagattttttgatgctgtccttccttctgtataattatgacttaccagtgcctgttattgccgctggaatggacttcttggggatgaagatggtgggagaactgttacgcatgagcggtgccttctttatgcgccggactttcggcgggaataaattatactgggccgtgttctcggaatatgtcaaaaccatgctgaggaacggatacgctcctgtggagttcttcctcgaagggacacggagtcgtagcgcaaagactctgacccctaagtttggcttactgaacatcgtgatggagccatttttcaaacgcgaagtattcgacacgtatctcgttcctatcagcatttcatag

SEQ ID NO: 189565 - DNA, 870 bp, synthetic construct
  misc_feature 1..870: note = Description of Artificial Sequence: Synthetic coding sequence
  source 1..870: mol_type = other DNA
atgagccggaacagccggaagaccatcggcaaggtgcgggtggactacattatcattaagccccttccagggtactcctgtgacatgaagtcaagtttcagcaaatactggaaacccaggatacctctggatgtaggccacagaggagccgggaattccaccaccacggcccaactggcaaaggtgcaggaaaacactatcgcctctctgcggaacgctgcttcacacggggctgccttcgtagaattcgatgtgcacctgtcaaaggactttgtgcctgtggtgtatcatgacctgacatgctgtctcacaatgaagaaaaacctctggttccgtagaaagatacccttccagaaaatcagccacttcctgctcctgagatgggttagacagaagcagaacaagtaccccattctcttcctcacccaggggaaatcagagatttatccagaacttatggatcttcgtagtcgaacaacacccattgcgatgagttttgctcaatttgagaatttgctcggaatcaatgtccacacagaggaccttctgcggaacccttcctatatccaggaagccaaggcaaagggcctcgtcatcttctgctggggagacgatactaacgatccggagaatcgtaggaagttaaaggagcttggggtcaacgggctgatttacgaccggatctacgattggatgcctgagcagcccaatatctttcaggtggagcagctggaacggcttaaacaagagctaccggagcttaaaagttgtctgtgccccaccgtaagccgcttcgtgccatcctcgctgtgtggcgaatccgacatacacgtcgacgccaatgggattgataatgtggagaacgcctag

SEQ ID NO: 189566 - DNA, 2019 bp, synthetic construct
  misc_feature 1..2019: note = Description of Artificial Sequence: Synthetic coding sequence
  source 1..2019: mol_type = other DNA
atgacccccagccaggtggccttcgagatccggggcaccctgctgccaggtgaagtgttcgccatctgcgggagctgcgacgccttgggtaattggaacccacagaacgcagtcgcccttctccccgagaatgataccggcgagtccatgttgtggaaggccaccatcgtgctgtcaagaggagttagcgtacaataccgctactttaaagggtactttttagagccaaaaaccataggcggcccttgccaagtgatcgtgcataaatgggagactcatctgcagcctcgctctatcacccccttggaaagtgaaatcataatcgacgatgggcagttcggaattcataacggggtcgagaccttggattccgggtggctgacatgtcagactgagatcaggctgaggctgcactattcagaaaagccgcctgtgtctattactaaaaagaagctgaagaaatctagattcagagtaaagctaactttagaaggcttggaggaggacgacgatgaccgggtttccccaactgtgcttcacaagatgagcaactctctggagatctcactgatcagtgataacgaatttaaatgccgtcattctcagcctgaatgtggttacggactgcagccagatcgctggacagagtactccatccagaccatggagccggacaatctggagctgatatttgacttctttgaggaagatttgtctgaacacgtcgtacagggagatgccttacccggccacgtcggaaccgcatgcctgcttagttccactattgctgaaagcggtaagtcggccggcatattgaccctccccatcatgtcccggaatagtcggaagaccatcgggaaggtgcgcgtagactatatcatcatcaaacctctgcccggatactcctgtgatatgaaatcaagcttttcaaaatattggaaaccacggattcctctcgacgtcgggcatcgcggggcaggaaactctacaaccaccgctcagctggccaaagtgcaggagaacactattgcctccttgcggaacgccgcatctcatggagctgccttcgtagagttcgatgtccatctgagcaaagacttcgtgcccgttgtgtatcatgacctgacatgttgtctgactatgaagaaaaagtttgatgcggacccagtcgagcttttcgagatcccggtgaaggagttgactttcgaccagctacaactgctgaagctcacccatgtcaccgctcttaagtcaaaagacaggaaagagtccgtggttcaggaagaaaacagcttttctgagaatcaaccctttccttctctgaagatggtactcgaatctctgccagaagatgtaggatttaatattgagatcaagtggatctgtcagcagcgggatggtatgtgggacggtaatctgtctacatactttgatatgaacctgtttctggacatcatacttaagacagttctagagaattctgggaaaaggcgaatcgtgttttcttcttttgacgcggacatctgcaccatggtccggcagaagcagaacaaatatcctatcctcttcctgacccagggaaagtccgagatctacccagagttgatggacttgcgttccagaactacacctatcgcgatgtcattcgcccagtttgaaaatctgctgggtataaacgttcatacggaagacctactcaggaacccatcctacatacaggaggccaaggccaaagggttagttattttctgctggggagatgacacaaacgatcccgaaaataggagaaagcttaaggagcttggtgttaatgggcttatttatgatcgcatttacgattggatgcctgagcagccaaatatcttccaggtggagcaattggagcgcctgaaacaggagcttcccgaactgaagagctgtctgtgtccaacggtgtcccgcttcgtcccgtcttccttatgcggcgagagcgacattcatgtggacgcaaatgggatcgataatgtcgaaaacgcttag

SEQ ID NO: 189567 - DNA, 795 bp, synthetic construct
  misc_feature 1..795: note = Description of Artificial Sequence: Synthetic coding sequence
  source 1..795: mol_type = other DNA
tgatgcgacatgaagagcagcttcagcaagtactggaagccccggataccactggacgtgggtcatcgcggtgctggaaactcgacaacaacagcccagcttgcaaaggtgcaggaaaataccatcgcctctcttcgcaacgcggcttctcacggggctgcctttgtggagttcgacgtccatttgtctaaggattttgttccagtggtgtaccacgatctgacctgctgccttaccatgaaaaaaaatctgtggttccggagaaaaattccttttcagaaaattagccactttctgctgctcagatgggtcagacagaagcagaataaataccctattcttttcctgactcagggtaaatctgagatctatccggaactaatggatctgaggagcaggacaacaccaatcgcaatgagcttcgctcagtttgaaaacctattgggaattaacgtccataccgaggacctgctgcgaaacccaagctatattcaggaagctaaggctaaaggtttagtcatattctgctggggggacgacaccaacgacccagagaacaggagaaaactgaaagagctaggcgtgaacgggttaatctacgataggatatacgactggatgcccgaacagccaaatatcttccaggtagagcagctcgagaggctgaagcaagaactgcccgagctgaagtcttgcttgtgtcccactgtaagccggtttgttccctcctccctctgcggtgagagcgatattcatgtcgatgccaatggcatcgataatgtggaaaatgcctag

SEQ ID NO: 189568 - DNA, 996 bp, synthetic construct
  misc_feature 1..996: note = Description of Artificial Sequence: Synthetic coding sequence
  source 1..996: mol_type = other DNA
atgtggctgtgggaggaccagggcggcctgctgggccccttcagcttcctgcttctagtcctgctgcttgtcacaaggtcacctgtgaatgcctgtttgcttacaggatcccttttcgtgctgcttagagtattcagttttgaaccagtgccctcttgcagagccttacaggtgctgaaacccagagaccggattagcgccatcgcccatcgcggcggatctcacgacgcgccagagaataccctggccgccatacggcaagcagcgaaaaatggcgccaccggagtcgaacttgacatcgagtttacttcagacggaattcccgtgttaatgcacgataacactgtggacaggaccactgatggaacagggcgtctctgtgatctgacctttgagcagatccgtaagctcaatcccgcggccaaccacagactgaggaatgactttccagacgaaaagattccgactctcagggaggccgttgcagaatgtcttaatcacaatctcacaattttctttgatgttaagggccacgcccataaagccacagaggctctcaagaaaatgtatatggagttcccccagctgtataataactccgtcgtgtgttcctttctgccagaagttatatacaaaatgcgacaaaccgaccgtgatgtcataacagctctcacccaccgcccctggtcccttagtcacaccggggacggaaaacctagatacgacaccttctggaagcacttcatttttgtgatgatggatatcctgttggactggagcatgcacaatattctctggtatctatgtgggatctctgcatttctcatgcaaaaggactttgttagtcctgcatatctgaaaaagtggtctgccaaaggaatccaagtggtcgggtggactgtgaatacctttgacgaaaagtcgtactatgagagccatctgggatcttcctacataaccgattcaatggtcgaggattgcgagccccacttttag

SEQ ID NO: 189569 - DNA, 1818 bp, synthetic construct
  misc_feature 1..1818: note = Description of Artificial Sequence: Synthetic coding sequence
  source 1..1818: mol_type = other DNA
atggtgcggcaccagcccctgcagtactacgagccccagctgtgcctgagctgtctcacaggcatttatgggtgccggtggaaacgataccagcgatcccatgacgacactacgccttgggagagactctggtttctgctgctgacattcaccttcggtttgactctaacatggctgtacttctggtgggaagtgcacaatgattacgacgagttcaactggtatttgtacaaccgcatgggctactggagcgactggcctgttccaatactcgtgactactgctgccgcgttcgcctatattgccggccttctggtgctggcgctgtgtcacattgcggttggccagcaaatgaacctgcactggctgcacaagatcggcctcgtagttatcctcgctagcaccgtggttgccatgagcgccgtggcccagctctgggaagacgaatgggaagtcttgttgatatcactgcagggcaccgcgcccttccttcatgtgggcgcagttgccgcggtgacaatgctgtcctggatcgttgccggacagtttgcccgggctgagcgtacgtcctcccaagtcaccatactttgtaccttcttcactgtagtgtttgcactctatttagcgcccctgacaatttctagtccatgtattatggagaaaaaagacctgggccccaaacccgccctgatcggccataggggtgcaccgatgctcgctcccgagcatactctcatgagctttcggaaagctctggaacagaagctgtatggactgcaggctgacatcacgatatctctggatggggtcccattcctaatgcacgataccacactccgcaggacaactaacgtggaagaggagttcccagagctggcccgaaggcccgcgtcaatgctcaactggacaaccctgcagaggctgaatgcaggccagtggttccttaaaaccgaccccttctggaccgctagctcactttctcccagcgaccatagagaggctcagaaccagtccatctgctctcttgccgaactgttggagctcgctaaaggtaacgccaccttgcttctcaacttgagggatccacctagggagcatccatatcgatcttccttcatcaatgtaaccctggaggccgtccttcacagcggcttccctcagcaccaggtcatgtggctccccagtcggcaacgcccactggtgcgcaaagtggcccccgggttccaacagacctctggcagcaaggaggcagtggcatccttgcgccggggtcacatccagaggcttaatttaagatacacacaggtgagcagacaagaactcagagattacgcctcttggaatttgagcgttaacctctacacagtcaatgctccttggctgttcagccttttatggtgtgctggagttccgtctgtcacctcagacaatagccacgcgctttctcaagtacctagccccctctggattatgccacctgacgaatactgtttaatgtgggtgactgcagacctcgtaagtttcacattaatcgtggggatctttgtgctccagaagtggcgtttggggggcatacgctcctacaatcccgaacagatcatgttgagcgctgctgtgaggaggaccagtagagatgtatccattatgaaagaaaagctgattttctccgaaatctccgatggggtcgaagtctctgacgttctcagcgtgtgctctgacaacagttacgatacatatgcgaactccactgccactcctgtcggacctagaggtggaggcagtcacacaaaaaccctgattgagcgcagcggccgctag

SEQ ID NO: 189570 - DNA, 1461 bp, synthetic construct
  misc_feature 1..1461: note = Description of Artificial Sequence: Synthetic coding sequence
  source 1..1461: mol_type = other DNA
atggtgcggcaccagcccctgcagtactacgagccccagctgtgcctgagctgcctgaccggaatctacggatgccggtggaaacgttatcagcgctctcacgacgacaccacccctggtaccgcacctttcctccacgtgggtgcagtcgcagcagtgactatgctgtcttggattgttgccggtcagtttgctcgggcggagcgtacatctagtcaggttactatcctatgtacctttttcacggtggtgttcgccttgtaccttgccccacttactatctcatctccgtgcatcatggagaaaaaggacctgggccccaagcccgctctgatcggacacagaggcgcccccatgctagcccctgaacacacacttatgtcattccggaaggctttggagcaaaaactgtatgggttacaagccgacattacaatttccctggacggggtccccttccttatgcacgacactacacttcggagaactacaaacgtggaggaggagtttcccgagctggctcgccgccctgcctcgatgctgaattggaccaccttacagcgcctgaatgccgggcagtggtttctgaaaacggatccgttctggaccgctagcagtttaagcccttctgaccatagagaagcccagaaccagtccatatgctcactggcagaactgctggaactagctaagggaaacgctactctgcttctcaatctaagggaccccccgcgcgagcatccctatcggtcctcttttattaatgtcaccctggaagctgtcttacactcaggttttccgcaacatcaggtcatgtggctgccttcaaggcagcggccactggtccggaaggtcgcacctggttttcaacagacttccggcagcaaggaggcagtcgcgtcactgaggcgtggacatattcagaggctgaatttgagatatactcaggtgtcacgccaagagcttagggattatgcatcctggaacctgtctgtgaacctgtacaccgtcaacgcaccttggctcttctcactgctgtggtgcgccggggttccctctgtgacaagcgataattctcatgccctctctcaggtgcccagccctctctggatcatgccacctgacgaatattgtctcatgtgggtaaccgccgatttagtgtcctttaccctcatcgtggggattttcgtgctccagaaatggcggcttggcgggattcggtcctataatcccgaacaaattatgttgtctgcagctgtgcgccgaacctctagggatgtgtccatcatgaaagaaaagctaattttcagtgaaatctcagatggcgttgaagtatcagacgttctaagtgtctgctctgataattcttacgacacatacgcaaattccacggcaacacccgtgggaccacggggcgggggctctcatacaaaaacattaattgagcgctctggcagatag

SEQ ID NO: 189571 - DNA, 408 bp, synthetic construct
  misc_feature 1..408: note = Description of Artificial Sequence: Synthetic coding sequence
  source 1..408: mol_type = other DNA
atggtgcggcaccagcccctgcagtactacgagccccagctgtgcttgtcatgcctgactggcatctatgggtgcaggtggaaacgttatcagagaagccacgacgatacgactccatgggaacggttatggttcttactgttgactttcacattcggactgaccttgacatggctctatttttggtgggaggtgcataatgattatgatgaatttaattggtatctgtacaacagaatgggatactggtcagattggccagtgcccatactggtaaccactgcggcagccttcgcttacattgccggcttactcgtgctcgccctgtgtcatatcgctgtgggtcagcagatgaatttgcactggctccacaaggcctcttccggtctgcctctgtctcccctgtag

SEQ ID NO: 189572 - DNA, 1404 bp, synthetic construct
  misc_feature 1..1404: note = Description of Artificial Sequence: Synthetic coding sequence
  source 1..1404: mol_type = other DNA
atgagcgccgtggcccagctgtgggaggacgagtgggaggtgctgctcataagcctccagggcaccgctccatttctgcacgtaggagccgtggcagccgtgaccatgctttcttggatcgtggccggccagttcgcccgggcagagaggacttcgagccaggtgaccatactttgcactttcttcactgtagtttttgccttgtaccttgcgccactgaccatctccagtccatgtataatggagaaaaaagatctagggcccaagccagctcttattggacataggggcgcgcccatgttagctcccgagcacactttaatgagcttcaggaaggcactggaacaaaaactgtacggcctgcaggccgatattacaataagcttggacggggtacccttccttatgcacgacaccaccttgcgcaggacaacgaatgtagaggaagagttcccagagctagccaggaggcccgccagcatgctgaattggactacactgcagcgtctcaatgcgggccagtggttcctgaagactgacccgttttggaccgcaagctctctgtcgccttctgatcatagagaagcacaaaatcagtccatctgttccctggccgagctgctcgaacttgcgaaagggaacgccacactgcttttgaatcttagagatcccccgcgggagcatccataccgttcatcgttcataaatgtcacattggaagcagtgcttcacagtggcttcccccaacatcaagtgatgtggctgcccagcagacagagaccactggtccggaaggtcgcccccggcttccagcagaccagtgggagtaaggaagctgtggcgtctttgcgtcggggccacatacagcgtctgaatctgagatatactcaggtgtcacgacaggagctgagagactatgcgtcttggaatctgagtgttaacctgtatacagtgaatgcaccatggctgtttagcttgctgtggtgtgctggagtaccgagcgtcaccagcgataattcgcacgcactctcccaagtgccaagcccactttggatcatgcctcccgatgagtactgtctcatgtgggtaactgcagacctcgttagtttcaccctaatcgtcggtatatttgtgctgcaaaaatggaggctgggaggcattcgctcttacaacccggaacaaatcatgctgagcgctgcagtacggcgtacctcgcgtgacgtgtcaatcatgaaggagaaactcattttctcagaaatttctgacggagtggaggtgagcgacgtgttaagcgtgtgttccgacaactcctacgacacctacgctaattctacagccacccctgtggggccccgcggcgggggctcccataccaaaacgctgatcgagcgaagtgggcggtag

SEQ ID NO: 189573 - DNA, 1818 bp, synthetic construct
  misc_feature 1..1818: note = Description of Artificial Sequence: Synthetic coding sequence
  source 1..1818: mol_type = other DNA
atggtgcggcaccagcccctgcagtactacgagccccagctgtgcttgtcatgtctgactggaatctacgggtgcaggtggaaaaggtatcagcgcagccatgacgacacaaccccctgggagcggttgtggttccttctgttgacctttacgttcggcctcacgctcacctggctatatttttggtgggaggtgcacaacgattacgacgagttcaactggtatctctataaccgcatggggtattggtctgactggcctgttcctatcctcgttactacggccgccgcctttgcgtacatcgccgggctgttggtgctggcattgtgtcatatcgcagtgggccagcaaatgaatctccactggcttcataaaataggcctggtggtgatacttgcctccacagtggttgcaatgtccgccgtggctcaactgtgggaggacgagtgggaggtgctacttatttccctgcagggaacagcccctttcctccacgtcggcgccgtggccgccgtcacaatgctctcttggattgtggctggccagtttgcgcgcgcagagcgaacttcgagtcaggtgaccatactctgcacctttttcactgtggtgttcgccctctatctcgccccactcacaatcagtagtccatgcattatggagaagaaggatctggggccgaaacccgccctgataggccaccgaggagcgcctatgctcgccccagagcacacgctgatgtcttttaggaaagccttagagcagaaactctacggcttacaggctgatatcaccatctccctggacggcgtaccttttttgatgcatgatactaccctccggcggacgactaatgtggaagaagagtttccagaacttgcacgccgcccagccagcatgctcaattggactacactgcagaggctcaacgccggtcagtggttcttaaagacagacccattttggaccgcttccagcctgtccccatcagaccaccgagaggcccaaaatcagtctatttgcagcctcgccgaactccttgagttggccaagggaaatgcgaccctgttgctgaatctgcgcgaccctccccgcgaacatccttaccgaagctctttcattaacgtcactctggaggctgtgctgcatagtggattccctcagcaccaagtgatgtggctcccatcacgacagcgcccgctggtccggaaagtagctcctggtttccagcagacctccggctctaaggaggccgttgctagcctgcgacgtggacatatacaacgcttaaatttgcgatacactcaggtgtcacgacaggagctacgagactacgcctcttggaacctgtccgtgaatttgtacacagtgaatgctccttggctgtttagcttgctgtggtgtgccggcgtgcctagtgtcacatccgacaactctcacgccctcagccaggtcccaagcccgctgtggatcatgccaccagatgaatattgcctgatgtgggtcaccgccgatcttgtgagcttcacactgattgtcggaatttttgtgctgcagaaatggcgtctgggcggtatccgatcttataacccagagcaaataatgctgtcggctgccgttcggagaacttctagagatgtctccattatgaaggaaaaattgatcttcagcgagattagtgacggtgtcgaggtgagcgacgtattgtcagtatgctccgataactcttatgatacctacgcgaattcaacagcaactccagttggacctcggggcggcggaagtcatactaagaccctcatcgagagatctgggcgctag

SEQ ID NO: 189574 - DNA, 222 bp, synthetic construct
  misc_feature 1..222: note = Description of Artificial Sequence: Synthetic coding sequence
  source 1..222: mol_type = other DNA
atggtgcggcaccagcccctgcagtactacgagccccagctgtgcctttcatgtctgaccggaatatatggttgtagatggaagcgttaccagaggtcccacgatgatactaccccctgggagcggctgtggtttctgctgctcactttcactttcggcctgacgctgacgtggctgtacttctggtgggaagttcacaacgactacgacgagttcaactag

SEQ ID NO: 189575 - DNA, 1461 bp, synthetic construct
  misc_feature 1..1461: note = Description of Artificial Sequence: Synthetic coding sequence
  source 1..1461: mol_type = other DNA
atggtgcggcaccagcccctgcagtactacgagccccagctgtgcctgagctgccttaccggaatttacggctgcagatggaagcgctaccagaggagccacgatgacacgacgcccggcacagcccccttccttcacgtgggggcggtggccgcagtcacaatgctgtcgtggatcgtcgcaggccagttcgctcgcgcggagcgaacatcctcccaggtcactattttgtgtacattttttaccgtggtgttcgctctgtatctagctccccttaccatctcctcaccgtgcatcatggagaagaaagacttggggcccaaacctgccctgatcggacatcggggagcacctatgctggcccccgagcacacactcatgtctttccggaaggcgctagagcaaaagttatacggacttcaagccgacatcacgatttctcttgatggggttcctttcctcatgcatgatactacactcagaaggactacgaacgtggaggaagagtttcctgagctggcccgcaggcctgcctctatgctcaattggactacattgcagcgcctgaacgcgggccagtggttcttaaagaccgacccattttggactgcatctagtctttcccccagcgatcaccgtgaagcacaaaaccagagcatttgttctctagccgagctactggaactggccaaggggaacgccacactgctgcttaatctgagggaccccccacgagagcatccctatagatccagcttcatcaatgttactctagaggctgttcttcactcagggtttcctcaacatcaggtcatgtggctaccatcccgccaacgccccttagtgcgcaaggttgctcccggcttccaacagacaagtggatccaaagaggcagtcgcctctcttcggcgcggacacatccaaagacttaacctgcgttacacacaggtgagccggcaggagctcagagattatgcttcttggaacctatccgtcaatctctacacagtgaacgccccctggctgttcagtctgctgtggtgtgctggcgtgcccagcgtgacatcagacaactcacacgccctctctcaagttcccagcccgctctggatcatgcctccagacgagtactgtctcatgtgggttacagcggacttggtgtcattcacactgatcgtggggatattcgtgctccagaaatggcgactggggggcattagatcatacaaccctgagcaaatcatgctgtccgctgctgtgaggcggaccagccgggacgtcagcatcatgaaagagaagctcattttcagcgagatcagtgatggcgtcgaagtgtccgatgttctttctgtgtgttctgacaactcttacgatacttacgccaattcaaccgccacccccgtcggtccccgggggggaggatcacataccaagaccctgatcgaaagaagtggccgctag

SEQ ID NO: 189576 - DNA, 1083 bp, synthetic construct
  misc_feature 1..1083: note = Description of Artificial Sequence: Synthetic coding sequence
  source 1..1083: mol_type = other DNA
atgagcttccggaaggccctggagcagaagctgtacggcctgcaggctgacatcacgatcagcctcgacggagtgccattcctaatgcacgacactacactccgtcgaaccaccaatgtggaggaggaattccctgagttggcgaggagacccgcctcaatgctcaattggaccaccctgcagagattaaacgctggtcaatggttcctcaaaaccgacccattttggaccgcctcctctctgtctccaagcgatcaccgagaagctcaaaatcagagtatttgcagtctggccgaactactggagctcgccaaaggcaacgccactctgctcctgaatctccgcgatcccccacgggaacatccttaccggagttcgttcattaacgtgaccctggaggccgtgctgcactctggtttccctcagcaccaggttatgtggctgccctcacgccagagacctctggttagaaaagtcgccccaggtttccagcagacatctgggtcaaaggaagcggtagcctctctgagacgagggcatattcaacggctcaatttgagatatacgcaggtgagcagacaggagctccgggactacgccagttggaatctgtctgttaacctttatacagtgaatgccccatggctcttctccctgctgtggtgtgccggggtgccaagcgtcacaagcgacaattctcatgcactctcgcaagttccctctcctctatggatcatgcctcctgacgaatattgccttatgtgggtaacggcagacctggtcagctttaccctcatagtgggtatattcgtgcttcaaaaatggcgactaggggggatcagaagctacaatccagagcagataatgctgagtgctgcggttaggcggacctcacgggatgtgagtataatgaaggaaaagctcatatttagcgaaatttctgatggcgtcgaagtgtcggacgttctgtcagtgtgctcagacaattcgtacgatacctatgccaattctaccgcaactcccgtgggacctcgaggaggcggctcgcacacgaagaccctcattgagagatctggccgctag

SEQ ID NO: 189577 - DNA, 1272 bp, synthetic construct
  misc_feature 1..1272: note = Description of Artificial Sequence: Synthetic coding sequence
  source 1..1272: mol_type = other DNA
atgctgcgggtgcggtgcctgcggggcggcagccggggcgccgaggccgtccattacattggatctaggctaggcagaacactgacggggtgggttcaacggacttttcagagcacacaggctgcaaccgcaagttctcgtaactcttgcgccgctgacgacaaagcaacggaaccactgccaaaagactgtccggtgagcagttacaatgaatgggatccacttgaggaagttattgtcggccgggctgagaacgcatgtgttcctccatttacgatcgaagttaaggcaaatacttatgaaaaatactggcccttctaccagaagcagggaggacattactttcccaaggatcacttgaaaaaagctgtcgctgagatcgaagaaatgtgcaacatactgaagactgagggcgtgacagttagaagacccgatccgatcgattggagcttgaaatacaagactccagacttcgaaagtacagggctgtatagtgccatgccccgagacatcctgatcgtggtgggaaacgaaatcattgaggcccctatggcctggcgcagcaggttctttgagtacagggcttatagatctataatcaaagattacttccatcggggtgccaagtggacgacggcgccgaaacctactatggctgatgaactgtacaatcaggactacccaatccactctgtggaggacaggcacaagcttgctgcacagggtaagtttgtgaccactgaatttgaaccgtgtttcgatgccgccgattttattcgcgccggtcgagacatcttcgctcagcggagccaagtcactaattacctgggcatcgaatggatgcggcgccacttggcccccgactacagggtgcacatcatctccttcaaggacccaaacccaatgcatatcgacgctacgtttaacataattggacccggcatcgttctttctaacccagatcgcccgtgtcaccagatagacctcttcaagaaagccgggtggaccattattacacctccaacccctattattcccgatgatcaccccctgtggatgtcctcaaagtggctgtcaatgaacgtcctgatgttggatgagaaacgcgtcatggtcgacgcaaacgaggtccctatacaaaaaatgttcgaaaagctgggcatcacgaccataaaagtgaacatcagaaatgcaaattctttggggggcggatttcactgttggacgtgcgacgtgcgcaggcggggtactctgcagagctatcttgactag

SEQ ID NO: 189578 - DNA, 1176 bp, synthetic construct
  misc_feature 1..1176: note = Description of Artificial Sequence: Synthetic coding sequence
  source 1..1176: mol_type = other DNA
atgctgcgggtgcggtgcctgcggggcggcagccggggcgccgaggctgttcactatatcgggtccaggctgggacgcacgttgacaggctgggttcaacgtactttccagagtacacaggccgccacagcctcctccagaaattcctgcgccgctgatgataaagcgaccgagcctctgcccaaggactgtccggtatcaagttacaacgagtgggatccattggaggaggtcatcgttggcagggctgagaacgcctgtgttccaccatttactatcgaagtcaaagccaatacctacgagaagtactggcctttctaccagaagcaaggtggacactactttcccaaagaccatcttaaaaaggccgtggccgagatagaggaaatgtgtaacattctgaagactgagggggtgaccgtaagacgacccgatccgattgactggtcccttaagtataagaccccggacttcgagtcaacgggtctgtattccgcaatgcccagagatatactgatcgtcgtggggaatgagatcatcgaagctccaatggcctggcggtccaggttcttcgaatatcgagcctacaggagtataatcaaagactacttccatcgtggggccaagtggacaaccgctccaaagcctactatggccgacgaactctacaaccaggattatccaatccacagtgttgaagaccgtcacaagttggctgcacagggaaagttcgtgaccaccgagtttgaaccatgcttcgatgctgccgactttataagagctggaagggacattttcgcgcagagatcacaggtgaccaactaccttggcatcgagtggatgagaaggcatctcgctccagactatcgcgtgcacatcattagctttaaggatcccaatccaatgcatatagacgctacgtttaacattatcgggccaggaatagtcctctcgaatcccgatcggccatgtcatcagattgatctcttcaagaaagccggatggaccatcataacgcctcccactcctatcatccctgacgaccaccccttgtggatgtcctccaagtggctttccatgaacgttctcatgctggatgagaaacgagttatggtcgatgccaatgaagtgcccatccagaagatgtttgaaaagctcggcatgtataataagtag

SEQ ID NO: 189579 - DNA, 1260 bp, synthetic construct
  misc_feature 1..1260: note = Description of Artificial Sequence: Synthetic coding sequence
  source 1..1260: mol_type = other DNA
atgtggcccggcaacgcctggcgggccgccctgttctgggtgccccggggtcggcgagcacagtctgctctggcacaattaagggggatcctagagggcgaacttgaaggcatccggggagctgggacctggaaatccgagagagtgataaccagtcgacaagggccccatatcagagtcgacggagtgtccggcggaattctcaatttctgtgccaacaactaccttggcctctcttcacatccagaggtgatccaggctggcctccaggcattggaggagttcggtgccggtctgagctctgtgcggtttatttgtggcacccagtccattcataaaaacctggaggcgaagattgcacggttccaccagagggaagatgcgatactgtatcctagctgctacgatgcaaatgctggactgtttgaagccctgttaacacccgaagatgcggtactgtccgacgagctcaaccacgccagcatcatcgatggaattaggctatgcaaggcccacaaatatcggtatcgtcacctggacatggccgacctggaagctaagctccaggaggctcagaagcataggctgcgcctagtggccaccgacggagcattcagtatggacggggatatcgcccccctccaagagatctgttgcctggcttcgcgttatggggccttagttttcatggatgaatgtcacgccacagggttcttgggccctacaggcaggggtacagacgaactgttaggtgtcatggatcaagtaactatcattaattctactcttgggaaggccctgggaggagctagtggaggatataccacagggcctggccctcttgttagccttctgcggcaaagggcccgtccttaccttttcagtaactccctgcccccagcggtcgttggctgtgccagcaaagctctggatctgctgatgggttcaaacactatcgttcagagtatggccgctaagacgcaacggttccggtcaaaaatggaggccgcggggttcaccatttctggagcctcacatccaatctgccccgtgatgttaggcgacgccagactggcatctaggatggcagatgatatgcttaagaggggcattttcgtgattggtttttcttatcccgtggtgccgaagggcaaggcccggatccgcgtgcaaatctcagctgtgcatagcgaagaggacatcgaccggtgtgtcgaggcttttgttgaggtagggagactccatggagcactgccatag

SEQ ID NO: 189580 - DNA, 1338 bp, synthetic construct
  misc_feature 1..1338: note = Description of Artificial Sequence: Synthetic coding sequence
  source 1..1338: mol_type = other DNA
atgtggcccggcaacgcctggcgggccgccctgttctgggtgccccgcgggcggagggcccagtccgccctggctcagttgcgcggaatccttgagggtgagctagagggaatccggggagcaggcacgtggaagagtgaacgtgtcattacgagcagacagggcccacatataagagtggacggcgtaagcggtggacccggaaccgttatattcccaggcctcccgttgccccatctcagctgctgcattcacctgctctctttcaccagcggtatccttaacttctgtgccaacaattatctgggactctcgtcgcatcccgaagtgattcaggcaggtctccaagccttagaggagtttggagctgggctgagttctgtccgtttcatctgcggcacacaatccatccacaaaaacttggaggcgaagatcgctcggttccatcagcgtgaagacgccatactttatccctcatgctatgatgccaacgcagggctctttgaggctctcttaacccctgaagatgctgttttgtccgacgagttgaatcatgcaagtattattgacggaatccggttgtgcaaggcccataaatatcgttatcgccatctggacatggccgacttggaggccaaactgcaggaggcgcaaaagcatcgactcaggcttgtggctacagatggggctttttccatggatggcgacattgcccctcttcaagaaatctgttgtctggcttctcgctacggcgccctggtctttatggatgaatgtcacgccactggatttctgggtcccactggtcgaggtaccgacgagctgcttggcgtaatggaccaggtcaccattattaattctacactgggcaaggccttgggaggtgcttcaggcggatacaccactgggccgggccctctcgtgtctttgctgcgccagcgagcgagaccctatctattctccaactcactgcctccagcagttgtcggctgtgcctctaaggccctggacttactgatgggatcgaacacaattgtccagtcaatggctgccaagacgcaacggttccgctccaaaatggaggcagctgggtttacgatctctggagcatctcaccccatctgtcctgtcatgctaggcgatgctcggctggcctctagaatggctgacgacatgctgaaacgtgggattttcgtgattggtttcagttatcccgtggtgcctaaaggaaaggctcgcattcgagttcaaatttccgccgtgcactcagaagaagatattgatcggtgcgtggaggcctttgtggaagtaggacgtctgcacggggccctcccctag

SEQ ID NO: 189581 - DNA, 744 bp, synthetic construct
  misc_feature 1..744: note = Description of Artificial Sequence: Synthetic coding sequence
  source 1..744: mol_type = other DNA
atgtggcccggcaacgcctggcgggccgccctgttctgggtgccccgaggccgacgggcacagagcgcactggcccagctgagaggaatcctagaaggagaactggagggaataagaggtgcggggacttggaaatccgagcgcgtcattaccagtcgacaggggccacacatcagagtcgatggcgtctctggtggccctgggacagtcatattcccggggcttccactgccccacctttcttgctgtatacaccttttgtcttttacttctggcatcctgaatttttgtgcaaacaactacctggggctgtcgagtcacccagaagtgatccaggccggactacaagctctagaagaatttggagctggattatcctctgtgcgcttcatatgcggtactcagtcaattcataaaaatttggaagcgaagatcgctaggttccaccaacgtgaggatgctatcctgtacccatcatgctatgatgccaatgcagggttgtttgaggcgctgctgactcccgaggacgcagtgttgtcagacgagctcaaccatgcctctatcattgacggtatcagactatgcaaagcgcacaagtacagatacagacacctcgacatggccgatctcgaggccaaactgcaggaagcccaaaagcatcgattacgactggtcgccactgacggcgccttccacggttggcgccacagaacccctgccggcgaccttctgcccaggttatag

SEQ ID NO: 189582 - DNA, 522 bp, synthetic construct
  misc_feature 1..522: note = Description of Artificial Sequence: Synthetic coding sequence
  source 1..522: mol_type = other DNA
atggccctgcgggtggtgcggagcgtgcgggccctgctgtgcaccctgagggccgtgcccagtcccgccgctccatgtccacccaggccatggcagctaggagtcggggccgttcggacgctcaggacgggaccagccctgcttagcgtacgcaagttcaccgagaagcacgaatgggtgacaactgagaatggcatcgggaccgtcggcattagtaattttgcccaagaagcactcggagacgtggtgtactgctctctgcctgaagtcggaaccaagctgaataagcaagacgagtttggagctttggaaagtgtgaaggcagcatccgaactgtactctcccctcagcggagaagtgacggaaatcaatgaagcgttagctgaaaaccctggactcgtgaacaaaagttgctacgaagatggctggcttattaagatgacactgagcaacccatctgagctcgacgagttaatgtcagaggaggcctatgagaaatacatcaaaagtatcgaagagtag

SEQ ID NO: 189583 - DNA, 3063 bp, synthetic construct
  misc_feature 1..3063: note = Description of Artificial Sequence: Synthetic coding sequence
  source 1..3063: mol_type = other DNA
atgcagagctgcgcccgggcctggggcctgcggctgggccggggcgtcgggggtggacgaagactggcagggggatcaggcccctgctgggctcctagaagtagagacagttcctccggcggcggggatagtgcagccgcaggcgcttcgcggcttctggagcggctgcttccaagacatgatgacttcgcccggcgccatataggccccggcgataaggatcagcgagagatgctgcaaactcttggactggcttctattgacgagctcatcgagaaaactgtgccagccaatatccggcttaagagacccctgaaaatggaggaccccgtctgcgaaaacgagatcctggccactctccacgcaataagcagcaagaaccaaatttggagatcgtatattggcatgggttactacaattgttctgttccacagactatactgcgcaacttgttggagaacagtggctggatcacccaatacactccttaccagcccgaggtcagccaggggcgtctggagtcactcttgaattatcaaaccatggtgtgcgatattacagggctggacatggctaatgctagcctgctggacgaaggcacggctgccgcagaagctctccagctgtgttatcgccataacaagaggaggaagttcctggtcgatcccaggtgccatccacagactattgccgtcgtgcagacccgggcaaagtatacaggagtgttaactgaactcaaacttccatgcgaaatggacttttctgggaaagacgtatccggggtactattccagtaccccgatacggaaggaaaggtggaggatttcacagagctggtagaacgtgcacaccagagtggctctctcgcatgctgtgcgacagatctgctggccctctgcatccttcgaccccctggggaattcggcgttgacattgcactcgggtctagtcaaaggttcggtgttccacttggatacggaggacctcacgcagccttctttgccgtgcgggagtctttagtgagaatgatgcccggacggatggtcggggtgactcgtgatgccactgggaaggaagtataccgattggccctccaaactagggaacaacatatacggcgcgacaaagccacatcaaatatctgtacagcacaggccttactcgccaatatggcagccatgtttgctatatatcacggcagccatggcctcgagcacattgccaggagagtccataacgcaactctcatcctctctgagggtttgaaaagagcgggccatcagttgcagcatgatctgttctttgacactttgaagattcagtgtggctgttctgttaaggaagttttggggcgcgccgcccagagacagataaacttccggcttttcgaagacggaactttaggaatatcccttgacgagaccgtgaacgaaaaagatcttgatgatctcctgtggatatttggctgtgaaagcagcgcagagttggtcgcggagtccatgggcgaggagtgtagaggtatccctgggtccgtcttcaaaaggacatccccctttttgacgcaccaggtcttcaattcctatcacagcgagacgaatattgtacgctatatgaagaaactcgaaaacaaagatatcagccttgttcattccatgattcccctgggaagttgtacaatgaagctcaatagcagtagtgaactggcacccatcacatggaaagaatttgccaatatccatcccttcgttcccctggatcaggctcagggctaccagcagttgttccgcgagctcgagaaggatttgtgcgaattgacaggatacgaccaagtgtgtttccagccaaatagtggagcccagggcgagtacgctggcctggccacaattcgcgcctacctgaaccagaagggcgagggtcaccgaactgtatgtctcatccccaagagcgcacatgggactaatcccgctagcgcccacatggccgggatgaaaattcagccagttgaagtcgacaaatacggaaatattgatgcagttcacctgaaagccatggtggataagcacaaggagaatctcgccgctattatgataacctacccatccacaaatggcgtgtttgaagaaaatattagcgacgtgtgcgatctgattcaccagcatggcggccaagtgtacctggacggagcaaacatgaacgcccaggtgggcatttgcagaccaggcgatttcggcagcgatgtctctcatttgaatctgcacaagacattttgtattccccacggcggagggggacctggtatgggccctattggagtgaagaagcaccttgctccattcctgcctaatcatccagtgatctcactgaaaagaaacgaggatgcttgtcctgtaggtacggtctccgccgctccttgggggagcagtagcatcctgccgatttcctgggcctatattaagatgatgggaggtaagggactgaagcaagccactgagacagctattcttaacgctaattacatggccaaacgccttgaaactcactatagaatcctgttccgcggcgcacgcgggtatgtcggtcatgagttcatcctggatactaggcccttcaagaagtctgcgaacattgaggcagtggatgtggccaaacggttgcaagactacggattccatgcccccacaatgtcatggccggtcgcagggaccttgatggtggagcccacagagtccgaagacaaagccgaactggaccgattctgtgacgctatgatcagtatccgccaggaaatagcggacatagaagaaggacgtatagaccctagggttaatcccttgaagatgtcccctcacagtctcacatgcgtcacgtctagccattgggacaggccatattcccgagaagttgctgccttcccccttccgttcgtcaagccagagaacaagttctggccaacgatcgcccgcatcgacgacatatatggggaccagcacctggtctgcacatgtccccctatggaggtatacgagtcacctttttcagagcagaagagggcctctagctag

SEQ ID NO: 189584 - DNA, 888 bp, synthetic construct
  misc_feature 1..888: note = Description of Artificial Sequence: Synthetic coding sequence
  source 1..888: mol_type = other DNA
atggtggacagcgtgtaccggacccggagcctgggcgtggccgccgaagggctccctgaccaatacgcagacggagaggccgcacgagtttggcagctgtatataggtgacacgaggagccgaacggccgagtacaaggcttggttactgggccttcttagacaacatggatgtcagcgtgtgttggatgttgcttgcggtacaggagtggattcaatcatgctggtggaagaggggttctccgttacaagcgtagacgccagtgataagatgcttaaatatgctcttaaagagcgttggaatcgacgtcacgaaccagcattcgacaaatgggtcatcgaggaggccaattggatgacactggataaggatgtgcctcaatctgctgagggcggatttgatgcagtgatctgcctggggaactcatttgctcatctgccagattgtaagggcgaccagtcagaacacaggcttgcactgaagaacatcgccagtatggtgagggcaggcggattactagtcattgaccatagaaactatgatcacatcctctccacggggtgcgcacccccagggaagaatatttattacaagtccgatctgacaaaggacgtcactacctcagtgctgatcgtgaataataaagcgcacatggtgacactggactatactgttcaggtacctggggccggacaggatgggtcccccggcctctccaaattccgtctgagctattaccctcactgccttgcctcctttacggaattactgcaagcagccttcggcgggaagtgccaacacagcgtcctgggcgattttaagccctacaaacctgggcagacgtacataccatgctactttatccacgttctcaagcggacggactag

SEQ ID NO: 189585 - DNA, 1350 bp, synthetic construct
  misc_feature 1..1350: note = Description of Artificial Sequence: Synthetic coding sequence
  source 1..1350: mol_type = other DNA
atgtacagcttcaacaccctgcggctgtacctgtgggagaccatcgtgtttttcagcctggcagcctcgaaggaggcagaggccgctcggtccgcccctaaacccatgtctcccagtgatttcctggacaagctgatgggcaggacttctggttatgacgcccgaattcgcccaaatttcaagggccctccggttaatgtcagctgcaacatctttattaattctttcgggtcgatcgccgaaacaacaatggattaccgggtgaatatctttctccgccagcagtggaacgatcctcgcctggcatataacgagtatcccgatgactcgttggatctggacccttctatgctagattctatctggaagcccgacctgttttttgctaacgagaagggcgctcattttcatgagatcacaaccgacaataaactcctccgtatatcaaggaacggcaatgtactgtatagcattagaattaccttgaccctggcttgtcccatggacctgaagaactttccaatggatgtgcagacttgtattatgcaattggagtcctttggatataccatgaatgacctcatcttcgagtggcaggagcagggagcagttcaggttgcggacggcctgacacttccccagttcattctgaaggaagagaaggatcttaggtactgtacaaagcactacaatacaggtaagttcacctgcatagaggctaggtttcacttggaacggcagatggggtattatctgatccaaatgtacatcccctccttacttatcgtgatccttagctggatctcattctggatcaatatggacgctgccccagcccgcgtgggcctcggcatcaccacggtactgacaatgacaacacagtcctccggttctagggcgagtctgcctaaggttagctacgtgaaagccatagatatctggatggcagtgtgcctgctgttcgtctttagtgcactcctcgagtacgccgccgtaaacttcgtaagccgccagcacaaagagctgctgaggttcaggcggaagagacgacatcataaggaggacgaagcgggggaaggccgcttcaatttctccgcctacggaatgggccctgcatgcctccaagcaaaggatggaataagtgtcaaaggggcaaataatagcaacacaactaacccccctcctgccccgagcaaatcacccgaggaaatgcgtaagctgttcattcagcgcgccaagaagatagacaagataagtcgtatcggtttcccaatggcatttctcatattcaacatgttttactggatcatatataaaatagtccgaagggaggatgtccataaccagtag

SEQ ID NO: 189586 - DNA, 1374 bp, synthetic construct
  misc_feature 1..1374: note = Description of Artificial Sequence: Synthetic coding sequence
  source 1..1374: mol_type = other DNA
atgtacagcttcaacaccctgcggctgtacctgtgggagaccatcgtcttcttcagcctggccgcctcgaaggaagctgaagccgccagaagcgcccctaaacctatgtccccatcagattttcttgataagttgatgggtcggacctccggttacgatgcacgcattaggcccaacttcaagggcccccccgttaacgtgtcttgcaatattttcatcaactccttcggctcaattgccgagacaactatggactaccgagtcaacattttcctccgtcagcaatggaacgatcctcggcttgcctacaatgaatatcccgatgacagtctggacctcgacccgtcaatgctcgacagcatttggaaacctgacctatttttcgccaacgagaagggggcccacttccatgagataactaccgataacaaactgctgcggatctccaggaatggcaacgtactctattcaattcgcatcactctgactctggcatgccccatggatctgaaaaattttcctatggacgtccagacctgtattatgcaacttgaaagcttcggatacacaatgaacgatctgatttttgaatggcaggaacagggtgcggtgcaggtagctgacgggcttaccctgcctcagtttattctcaaagaggagaaggatctgcgctattgcacgaagcactacaacaccggcaaatttacttgcatagaagcccgcttccacctcgagcgtcagatgggttattatctgatacagatgtatatcccttctctgttgatcgtgattctgagctggattagcttttggatcaacatggatgccgcacctgctagagtgggcctcggcataacaaccgttctgaccatgacgacacagtctagtggaagtcgggcgtcactgcccaaagtgagctacgttaaagccattgatatctggatggctgtatgcctcttgttcgttttctcagcattgttagaatacgccgccgtaaatttcgtttcccggcaacacaaggagctgttgcgattccggcgcaagaggaggcaccataagtcaccaatgctgaacctgttccaggaggacgaggccggggaagggcgatttaatttctctgcatatggcatgggacctgcatgtcttcaagccaaagatggtatatcagttaaaggagccaataattcaaatacgaccaatcctcctcccgccccgtccaaaagtcccgaggaaatgagaaaactgttcatacagcgcgctaagaagattgacaaaatctccagaattgggttcccaatggcttttctgatttttaacatgttctactggatcatctacaagattgtgcgcagggaagatgtacacaaccagtag

SEQ ID NO: 189587 - DNA, 1101 bp, synthetic construct
  misc_feature 1..1101: note = Description of Artificial Sequence: Synthetic coding sequence
  source 1..1101: mol_type = other DNA
atggactaccgggtgaacatcttcctgcggcagcagtggaacgaccctcgactggcctataatgaatacccagacgacagcctggacttggacccctccatgttggatagcatttggaagccagacctgtttttcgctaatgaaaagggagcccacttccacgagatcactactgacaataaactgctgaggataagccgaaacgggaacgtgctatactcaatccggatcaccttaacgctggcctgcccgatggacctcaagaattttcccatggatgtgcagacctgtattatgcagttagagagttttggatatacgatgaatgatttaatttttgagtggcaggagcagggagcggttcaggtcgcagatggcctgactctcccccagttcatccttaaagaggagaaggacctccgatactgcacaaaacattataacactggcaaattcacttgcatagaagccagatttcacttggagaggcagatggggtattatttaatacagatgtacatccctagtctgctcatcgttatactgagctggatctccttctggattaacatggacgcagcccccgcacgcgtgggcctggggattacaacagtactaacgatgacgacccagtcgagtggctctagggccagcttacctaaagtctcatatgttaaggccatcgacatatggatggcggtttgcctgcttttcgtgttcagtgccttgctcgagtacgccgctgtcaattttgtatcccggcagcacaaagaactgcttcgtttccgcagaaaacggcgccatcataaagaggatgaggctggggaggggcggttcaatttttctgcatacgggatgggacctgcttgtcttcaggccaaggacggcatctctgtcaaaggtgccaacaattctaatactactaatcctcctccagccccctccaaatctcccgaggagatgcggaagctcttcatccagcgtgccaaaaaaatagacaagatttcccggattggcttccctatggcctttctgatcttcaatatgttttactggattatctacaaaattgtgcgaagggaggacgtccacaatcaatag

SEQ ID NO: 189588 - DNA, 309 bp, synthetic construct
  misc_feature 1..309: note = Description of Artificial Sequence: Synthetic coding sequence
  source 1..309: mol_type = other DNA
atgagcgcccgggtgcggagccggagccggggccggggcgacggccaagaagctccagacgtcgtcgccttcgtggccccaggggagtctcagcaagaagagcccccgaccgacaatcaggatattgagcccggccaagagagagaaggcactcctcccatcgaggagcggaaggtagagggcgattgtcaggaaatggatttggaaaaaactcgttcggaaaggggggacggaagcgacgtcaaagaaaagaccccaccgaacccaaaacacgcaaagacaaaggaagctggagacggccagccgtag

SEQ ID NO: 189589 - DNA, 1359 bp, synthetic construct
  misc_feature 1..1359: note = Description of Artificial Sequence: Synthetic coding sequence
  source 1..1359: mol_type = other DNA
atgaaccggcagctggtgaacatcctgaccgccctgttcgccttctttttggaaacaaatcactttagaaccgctttttgtaaggaccacgatagccgcagcggaaagcaacccagccaaacgttatcgccaagcgactttctcgacaaactgatggggcgcacctccggatacgatgcccggatcaggccaaatttcaagggcccccctgtgaatgtgacttgtaatatcttcatcaacagcttcgggtccatagctgagacaacgatggattacagggtgaacatttttcttaggcagcagtggaacgacagtaggctagcctattccgagtaccccgacgacagcctcgatctggatccgtctatgttggatagcatttggaaacccgacttattcttcgccaatgagaagggcgccaatttccatgatgtgaccacggacaacaagcttcttcgcatttccaagaatggcaaggtcctgtacagtattcgtttgaccctgacactgtcctgccccatggatctaaagaactttcctatggatgtccagacttgtacaatgcagctggagtcttttgggtatactatgaacgatttgatctttgaatggctgtctgatggcccagttcaggtggccgagggactgacactgccccagttcatcttaaaggaagagaaagaattaggctattgcactaaacactacaatacgggtaagtttacatgcattgaggttaagtttcatttagagagacagatgggatattacctgatacagatgtatattccaagcttactgatcgttattctcagttgggtctctttttggataaacatggacgctgcccctgcacgagtggcactgggcatcacgactgttcttaccatgaccacgcagagttcaggctcacgcgcttcgttgcccaaggtctcatacgtgaaagctattgacatctggatggcagtgtgcctgctgtttgtgtttgcagccctattagaatatgccgccgtcaatttcgtgtctaggcagcacaaagagtttttgagattgcggcgaaggcagaagcgccagaacaaagaggaggatgtcacccgcgagtctcgattcaatttctccggatacggaatggggcactgcctgcaggtgaaggatggcacggcagtgaaagccactccggccaaccctctgccccagcccccgaaagatggcgacgctatcaagaaaaagttcgtggacagagcaaagaggatcgacacaatctcccgagcagcttttcccttggctttcctcatctttaacatcttttattggataacatacaagataattcggcacgaagacgtccataagaaatag

SEQ ID NO: 189590 - DNA, 648 bp, synthetic construct
  misc_feature 1..648: note = Description of Artificial Sequence: Synthetic coding sequence
  source 1..648: mol_type = other DNA
atgaacctgcacatgcggatgaccgccttctgcaaggaccacgactcccgctccggcaaacagcctagccagacactctcgccaagcgattttttagacaagctaatgggaaggacctctgggtatgacgcccggattaggcctaatttcaagggaccacccgtcaacgtcacatgcaacatcttcattaattcttttggaagtgttaccgagaccaccatggactatcgtgtgaacatcttcctgcgccagcaatggaacgactccagactcgcttactctgagtatcctgatgatagcctggatcttgacccgagtatgttagattccatatggaagcccgatcttttctttgccaacgagaaaggtgccaactttcatgacgttacaaccgacaataagctcctgaggatcagtaaaaatggaaaggtcctgtacagtatccgcttaacgctgaccctgagttgccccatggatctgaagaattttcccatggatgtccagacctgtaccatgcaactggaatctttcgggtatacgatgaatgatctgatctttgagtggttgtccgacggaccggtacaggtggccgaaggcctgacccttccacagtttattctcaaggaagagaaggagctcggctattag

SEQ ID NO: 189591 - DNA, 1092 bp, synthetic construct
  misc_feature 1..1092: note = Description of Artificial Sequence: Synthetic coding sequence
  source 1..1092: mol_type = other DNA
atggactaccgggtgaacatcttcctgcggcagcagtggaacgactccaggctggcatattctgaatacccagatgatagcctcgatttagacccctcaatgctagatagtatctggaaaccagatctctttttcgctaatgaaaagggtgctaactttcatgatgttacaaccgacaataagctgttaagaatctctaagaacggcaaggtcctgtatagcatcagactaactctgaccctgtcatgccctatggatctcaaaaatttccctatggatgtccagacctgtactatgcagctcgaatcatttggatataccatgaacgacctgatctttgaatggctaagcgatggaccagttcaggttgccgagggccttacgctgccgcagtttattctgaaagaggaaaaagaacttgggtactgtaccaagcattacaacacgggcaaatttacctgtatcgaggttaagtttcacctcgaacggcagatgggctactacctcattcagatgtatattccaagtctgctgatcgtgattctgtcgtgggtgagcttttggattaacatggacgcggccccagctagggtggcgctgggcatcactacagtgcttacaatgacaacccagagcagcggctctcgcgcctctttacccaaggtctcttatgtgaaagcaatagacatttggatggcggtgtgtctgctctttgtattcgccgctttgctcgaatacgctgccgtgaatttcgtttccagacagcataaggagtttcttcgcctgcgccgccggcagaaacgtcaaaataaagaggaggacgtgacgcgggaatcgaggttcaatttctcagggtatggaatgggtcattgcttgcaggtgaaggacggcaccgcagtgaaggccacgcctgccaatcctctgccccagcccccaaaggacggggatgcgattaaaaagaagtttgttgaccgggccaaaagaattgatacaataagcagggcggcatttccactggcatttctgatcttcaacattttttactggataacctacaagattatcaggcatgaagacgtccataaaaaatag

SEQ ID NO: 189592 - DNA, 1395 bp, synthetic construct
  misc_feature 1..1395: note = Description of Artificial Sequence: Synthetic coding sequence
  source 1..1395: mol_type = other DNA
atggcccacgtgcggcacttccggaccctggtgagcggcttctacttttgggaagccgccctcctgctctctctggtggcaaccaaagaaaccgactctgcaagaagccgatcagcccctatgtcacctagcgactttctggacaagctaatgggccgcaccagcgggtatgacgctaggatcaggccaaactttaaggggcctcctgtcaacgtgacttgcaacatcttcatcaactcttttggctccatcgctgagactactatggactatcgggtgaatatttttctccggcaaaaatggaacgatcccaggctggcatatagcgagtatcctgacgacagtctggacttggatccatctatgctggattccatctggaaacccgatctgttttttgctaatgaaaaaggggccaacttccacgaggtgactacggacaataaattgctacgaatttttaaaaatggcaacgtgctctatagtatccgcctgaccctgaccctgtcctgccccatggatctgaagaactttccaatggatgtccagacgtgcattatgcagttagaaagcttcgggtatacaatgaacgatttgatcttcgaatggcaagatgaagctccggtgcaagtggctgagggacttacactgccacaatttctgctgaaggaggagaaggatctgaggtactgtactaagcattataatacagggaaatttacctgcatcgaggttcggttccacctggagaggcagatggggtactacctgatccagatgtacatcccaagtctgttgattgttattctttcttgggtctccttctggataaacatggacgccgcccctgcccgagtggctcttggcattaccaccgtgctgacaatgaccacgcagtccagcgggtctagggcaagtctccccaaggtgagctacgtcaaggctatagatatttggatggctgtctgtttactctttgtcttctcagcactgctggagtacgcagccgtaaatttcgtctcgagacagcataaagaacttctgcgattccgccgtaagcgcaaaaacaaaactgaagcttttgcgctggagaaattctatagatttagtgacatggatgatgaggtcagagagagccgattcagttttactgcttacgggatgggcccatgcctccaggctaaggatggcatgaccccgaaaggccctaaccaccccgtgcaggtaatgccaaaatccccagatgagatgagaaaggtgtttattgatagggcaaagaagatagacactatctccagagcctgttttccactggccttcctgatatttaacatattctattgggtgatctacaagatcctgagacacgaagatatacaccagcaacaggactag

SEQ ID NO: 189593 - DNA, 1350 bp, synthetic construct
  misc_feature 1..1350: note = Description of Artificial Sequence: Synthetic coding sequence
  source 1..1350: mol_type = other DNA
atggcccacgtgcggcacttccggaccctggtgagcggcttctacttttgggaagcagcgctgctgttatcactcgtggcaaccaaggaaaccgactccgcacggagtcgcagcgcccccatgtccccctccgatttccttgataaattaatggggcgcacttctgggtatgacgctcggattaggcccaattttaaagggccccctgttaacgtaacttgcaacatatttattaatagcttcggctcaatcgccgagacaacaatggactaccgggtcaacatcttcctgaggcagaagtggaatgaccccaggctcgcatatagtgaatatccagacgactcattggatctcgatcctagtatgctggattccatatggaaacccgacctgttcttcgccaacgagaaaggcgctaacttccacgaggttacaacagataataaattgctcaggatattcaagaacggaaatgtgctgtacagtatcagacttaccctgacgcttagttgccccatggacctgaagaacttccccatggacgtgcagacttgtattatgcagctggaatcttttggctatactatgaacgacttgatcttcgagtggcaggacgaagctcccgtgcaggtcgccgaaggcctgacgttgccgcagtttctgcttaaggaagaaaaagacctgcgttattgtactaagcactataacacaggaaagttcacatgcatcgaggtgcgttttcatctggaacgccagatggggtactatctgatccaaatgtatatcccttccctactgatcgtaatcctgagttgggtgtccttctggattaacatggacgctgccccggccagagtcgccctcggcatcacgactgtgctcactatgactactcagtcctccggatctagggcaagcctccccaaggtcagttatgtaaaggctatagatatatggatggcagtttgcctgctgttcgtgttttcagctctgctcgaatatgccgcagtgaacttcgtgtctcggcagcacaaagagctgttaagatttcggcgtaaaagaaagaacaaagatgacgaagtccgggaaagcaggttcagctttacggcttacggcatgggcccttgcttacaagccaaagatggcatgacccccaaaggccccaatcaccctgtgcaagttatgcctaagtcccccgacgaaatgcggaaggttttcatagatagggcaaagaagatcgacacaattagccgcgcttgtttccctctcgcctttttaattttcaatatattttattgggtcatctataagattctgagacatgaggacattcaccagcagcaggattag

SEQ ID NO: 189594 - DNA, 1494 bp, synthetic construct
  misc_feature 1..1494: note = Description of Artificial Sequence: Synthetic coding sequence
  source 1..1494: mol_type = other DNA
atgaagttcctgctgaccaccgccttcctgatcctgatcagcctgtgggtggaggaagcatactcaaaagaaaaatctagtaagaaaggcaaggggaagaaaaaacaatatctttgtccctcccagcagtccgctgaggatctagcccgtgtgccggcaaactccacctctaatatattgaaccgcctgcttgtgagctatgaccccagaataagacccaacttcaaaggcattcctgtagatgtcgttgttaatatcttcataaattcatttggaagcatacaggaaaccacaatggactatagggtcaatatttttttgcgtcagaagtggaatgaccctcggctgaaattgccatcagacttccggggtagcgatgcccttacagtggaccccaccatgtacaaatgtctgtggaaacctgacctgtttttcgccaatgagaaaagtgctaacttccatgacgtgacacaagagaacatactcctgtttatatttagggacggggacgtgcttgtttctatgcggctcagcataaccctgtcctgtcccttagatcttaccctgtttccaatggatacccagagatgcaagatgcagctggagtcttttggatatacgactgacgatctccgttttatttggcagtccggagaccctgtgcaactcgaaaagatcgctttgcctcagttcgatatcaaaaaggaagacatcgagtatggaaactgtactaagtactataagggaacagggtactacacatgcgtggaagttatcttcaccctccgccgacaggtcgggttctatatgatgggcgtttatgccccaactctgctgatagtggtcctgtcctggctgtctttctggatcaatcctgatgccagcgccgcaagagttcccctcggcatcttctccgtgctatctctggcgtcagaatgtacaaccttggctgctgagttgcctaaagtctcctatgtgaaggcgcttgatgtatggctcattgcgtgtcttctgtttggatttgccagtttggtagagtatgccgtcgttcaggtgatgttgaataatcccaagagagtcgaggccgagaaagccaggatcgctaaggcagagcaagcggatgggaaggggggcaacgttgcgaagaagaacaccgtgaacgggactggtacccccgttcacatttccactttacaagtaggcgaaactcgttgcaagaaggtatgtactagtaagtcagatttaaggtctaacgatttttccatcgtgggttcactccccagagactttgaattgtcaaattatgactgctacggcaagcctatcgaggtgaataatgggctgggcaagtcccaggcaaagaataataaaaagccacctcccgcgaaacctgttatcccgacagccgcaaagcgtatagacctgtatgcacgggcattatttcctttttgctttttgtttttcaacgtaatttattggtctatctacctgtag

SEQ ID NO: 189595 - DNA, 1494 bp, synthetic construct
  misc_feature 1..1494: note = Description of Artificial Sequence: Synthetic coding sequence
  source 1..1494: mol_type = other DNA
atgaagttcctgctgaccaccgccttcctgatcctgatcagcctgtgggtggaagaggcttattctaaagagaaatcgagtaagaaggggaaaggcaagaaaaagcaatatctgtgtccctcacagcaatccgctgaagacctagctcgcgttccggccaattccacatctaatatcctgaacaggctgctcgtctcttatgacccgagaataagacccaattttaaagggattcccgtcgacgttgtagtgaacatctttatcaatagcttcggctctatccaggagaccacaatggactatagggtaaatatattcctgagacagaagtggaacgatccacgcctcaaactgccttctgattttcgcggcagtgacgcactcactgtggacccaaccatgtacaagtgcctatggaagcccgacctgttctttgctaatgagaaatctgccaatttccacgatgtgacccaggagaacatactgttgttcattttccgagatggtgatgtacttgtctcaatgcgcctttcaatcaccctttcctgccctctggaccttacactattcccaatggacactcagcgctgcaagatgcagcttgagagtttcggatacactaccgacgaccttaggttcatatggcaaagcggggatcctgtgcagctcgagaagatcgccctcccgcagttcgacataaaaaaggaggatatcgagtatggcaactgcacaaagtactacaaggggactggctattacacgtgtgtagaggtgattttcacacttagacgccaggtgggcttctatatgatgggtgtgtatgctccgaccctgcttatcgtggtgttgagttggctgagtttttggatcaacccggatgctagtgcggcacgagttccactggggatcttctcggttctgtctttggcaagtgaatgcactaccctcgcggctgaacttccaaaggtgtcatacgtgaaggccctcgacgtgtggctaatcgcgtgcctactttttggattcgcatccctggtggaatatgctgttgttcaggtgatgctgaacaatccaaagagggtcgaggccgagaaggctcggatagctaaggctgagcaagcggatggtaagggaggcaacgtggctaaaaagaataccgtgaacggcacgggaactccggtccacatttccactctgcaggtaggcgaaacacggtgtaaaaaggtgtgcacctcaaagagcgacctgagatcgaatgacttttccatcgtgggttctctaccacgcgattttgaactatcaaattacgattgttatggcaaacccatagaagtcaacaacggcctgggaaaatcacaggctaagaataataagaagccgcctcctgcaaagcccgtcattcccacagcagcgaagcgcatagacctgtacgcaagggcattgttcccattctgctttttgttctttaatgtgatctattggtcaatttatctatag

SEQ ID NO: 189596 - DNA, 912 bp, synthetic construct
  misc_feature 1..912: note = Description of Artificial Sequence: Synthetic coding sequence
  source 1..912: mol_type = other DNA
atgaagttcctgctgaccaccgccttcctgatcctgatcagcctgtgggtggaagaagcttattctaaggagaagtctagcaaaaaaggaaaggggaaaaaaaagcagtatctctgccctagccagcaatctgccgaagacctcgctagggttcctgctaatagcacctctaatatcctcaatagacttctagtgtcctacgaccctaggatcagacccaactttaagggcattccagttgacgtggtggtgaacatattcattaactctttcggatccattcaagaaacaaccatggactaccgggtgaacatctttctgcgccagaagtggaatgatcccaggcttaagctgccctctgacttccgcggcagcgatgcactgaccgtggacccaacgatgtacaaatgtctgtggaaacctgatctgtttttcgcaaatgaaaaaagtgctaacttccatgatgtcacccaggaaaacatcctgttgttcatttttcgcgatggcgacgtgctggtcagcatgcgactatctattaccctgagttgtccgctggacctcactctgtttccgatggatacccagaggtgtaaaatgcagttagaatccttcggttatactactgatgacctccgcttcatctggcaaagcggcgatcccgtgcagctggaaaaaatagccttgccacagttcgatatcaaaaaagaagacatcgaatacggcaactgtaccaagtattataaaggcactggctactatacatgtgtcgaagtgatcttcacgttgcggaggcaggtcgggttctatatgatgggagtctacgcaccaacactgctgattgttgtactcagctggctcagcttctggatcaatcccgacgcatccgccgcacgcgttcccctggggtggtag

SEQ ID NO: 189597 - DNA, 492 bp, synthetic construct
  misc_feature 1..492: note = Description of Artificial Sequence: Synthetic coding sequence
  source 1..492: mol_type = other DNA
atgatgctgcccctgcagggcgcccagatgctgcagatgctggagaagagtcttcgaaagtcccttcctgcttccttgaaggtgtacggaaccgtcttccatatcaatcatggtaaccccttcaatttgaaagcagtggtggacaaatggccagacttcaacactgtggtcgtgtgcccacaggaacaagacatgaccgacgaccttgaccattatacaaacacctatcagatatactctaaagacccgcagaactgccaggagtttcttggctcccccgagcttattaattggaagcagcacttgcagatccagagttcacagccatccctgaatgaggcaattcaaaatttggcggccatcaaatctttcaaagtcaaacagacacagagaattttgtatatggctgctgagacagcaaaggaattaactccttttttgttgaaaagtaaaattctctccccgaacgggggtaaacctaaagcaatgtag

SEQ ID NO: 189598 - DNA, 891 bp, synthetic construct
  misc_feature 1..891: note = Description of Artificial Sequence: Synthetic coding sequence
  source 1..891: mol_type = other DNA
atgatgctgcccctgcagggcgcccagatgctgcagatgctggagaagtctctgagaaagtcgttgccagcttctctcaaggtctatggtaccgtgttccatattaaccatggtaacccattcaacttgaaggccgttgttgataaatggcctgatttcaatactgtggtcgtgtgccctcaggagcaggacatgacagatgatttggatcattatacaaacacttatcagatctatagcaaggacccgcagaactgtcaggagttcctgggttctcctgagctgatcaattggaaacagcatttgcagattcagagctcacagccttccttgaacgaggccattcagaacctagcagcaattaagtcctttaaagttaagcaaactcagcgcattctatacatggcagctgaaactgctaaagaattgacgccgttcctgctgaagtctaagatcctgtcaccaaacggagggaagcctaaagctataaaccaggaaatgttcaagttgagcagcatggacgtcactcacgcacacttggtgaacaaattctggcacttcggcggcaacgaacggagccagcggttcatagagagatgcatccagacctttcctacttgctgcttgctagggccagagggcaccccagtgtgttgggacctcatggatcagaccggagaaatgaggatggccggaacgcttcctgaataccgcctgcatggcttagtcacctatgtgatctacagccacgcccagaaactgggcaaattagggtttcccgtgtattcccacgtggattacagtaatgaggctatgcagaaaatgtcttacacactgcagcacgtcccaataccgcggtcttggaaccagtggaactgcgttcccctctag

SEQ ID NO: 189599 - DNA, 891 bp, synthetic construct
  misc_feature 1..891: note = Description of Artificial Sequence: Synthetic coding sequence
  source 1..891: mol_type = other DNA
atgatgctgcccctgcagggcgcccagatgctgcagatgctggagaaatctttgagaaaatcgctgccagcatcactaaaggtgtacggtaccgtgtttcatattaaccacgggaacccgtttaatttgaaggccgtggtcgataagtggcccgacttcaacaccgtggtagtctgccctcaggagcaagatatgactgatgacctggaccattatacgaatacttaccagatctactctaaggaccctcagaactgccaagagtttctgggatctccggaactaattaactggaaacagcacctgcagatccagtcaagccaaccatcactgaatgaggccatccaaaacctagccgccattaaatccttcaaagtgaagcagactcagaggattttgtatatggctgccgaaacagccaaggaactgacccctttccttctgaaaagcaaaatccttagccccaacggaggtaaacctaaagcgattaaccaagaaatgttcaagcttagctctatggacgtgacccacgcccatttggtcaataagttttggcatttcggcggcaatgagcggtctcagcggttcatcgaaagatgtatccagacctttcccacttgctgcctgctaggaccagagggcactcccgtctgttgggatctgatggatcagacaggcgaaatgcgaatggccggcaccctccccgaatacaggctgcacgggctggttacttatgtgatctacagccatgcccaaaagcttgggaaactgggcttcccagtctacagccacgtggattacagcaatgaagcgatgcaaaagatgtcttatacgctgcagcatgtgcccattcccaggtcttggaatcaatggaattgcgtgcccctgtag

SEQ ID NO: 189600 - DNA, 2022 bp, synthetic construct
  misc_feature 1..2022: note = Description of Artificial Sequence: Synthetic coding sequence
  source 1..2022: mol_type = other DNA
atgcccctgaaccggaccctgagcatgagcagcctgcccggcctggaggactgggaggacgagtttgacttggaaaatgctgtactgttcgaggtggcctgggaggtggccaacaaggtgggtggcatctatactgtgctgcagacaaaggcgaaagtgacaggagacgaatggggggacaattactttttagtggggccctacactgaacagggcgtgaggacacaggtggagctgctggaggcaccaacacctgctttgaagcgcacactagattctatgaactccaaggggtgcaaatttctagcacagtctgaggaaaaacctcacgttgttgcacactttcacgagtggctggccggggtcgggctctgcctgtgcagagcccgccgcttaccggtggctaccattttcactacccatgctaccctcttggggcgctacctttgcgccggggctgtggacttctataataacttagaaaacttcaatgtcgacaaggaagctggcgaaagacaaatctatcacagatactgcatggaacgcgccgccgctcactgtgctcacgtattcaccacagtatctcagataactgcaattgaggcgcaacacttactgaaacgcaaacctgacatcgtcacgccaaatggcctgaacgttaaaaaattctccgccatgcacgagttccagaacttgcacgcccagtctaaggctcggattcaggaatttgtcaggggtcacttctacggccaccttgacttcaatcttgataagacactgtacttctttatcgcaggacggtacgaattttccaacaagggcgcagatgtattcttagaagcactcgcacggttgaactacctgctgagggtgaatggatcagagcagaccgtcgtggcatttttcattatgcctgcgcgcactaacaactttaacgtggaaaccctgaaaggacaagcggtccgaaagcagctatgggacacagctaataccgtcaaagaaaaattcggcagaaagttatatgagtctctgcttgtggggtctctgccggatatgaataaaatgctagataaagaagatttcaccatgatgaagagagcaattttcgccacgcaacggcagtccttcccaccagtgtgcacccataatatgctcgatgattcatcggacccgattttgactactattagacggataggactttttaacagttctgcagacagggtgaaggttatcttccaccctgaatttctgagttccacgtctcctttactccccgtggattacgaagaatttgtgcgcggctgtcacctgggcgtcttcccctcctattatgaaccctggggatatacaccagccgagtgtacagtgatgggtataccctctatctctacaaacctgtctgggtttggatgcttcatggaagaacacatcgcagatccttccgcctatggtatttatatcctggacaggcgctttcggagtctggatgattcctgttcacagcttacatctttcctgtattcattttgccagcaatcccggcgccagcgaatcattcaaagaaatagaaccgaacggctgtccgacttgctggactggaagtacctggggagatactatatgtctgctagacacatggccctgagcaaggcatttcctgagcactttacctatgaacctaatgaggctgacgcagcgcaaggttacaggtatcccagaccagcctctgtcccgccatcccccagtctgagcaggcactcatcgccccatcagagtgaggatgaggaggatcccagaaatgggcccctcgaagaagatggtgaacgatatgacgaagacgaggaagccgccaaagatcgaagaaatatccgggcccccgaatggccacgtagagcctcttgtacgtcttccacgagcggcagcaagcgcaattcagtagacaccgctacctcttcaagcctttctactccatccgaaccattatcaccaacatcgagtctgggagaagaaagaaattag

SEQ ID NO: 189601 - DNA, 2214 bp, synthetic construct
  misc_feature 1..2214: note = Description of Artificial Sequence: Synthetic coding sequence
  source 1..2214: mol_type = other DNA
atgcccctgaaccggaccctgagcatgagcagcctgcccggcctggaagactgggaggacgaatttgatctagaaaatgccgttctgttcgaagtagcatgggaagtcgcaaacaaggtgggaggaatctatactgtcttacagacaaaagctaaagtaaccggcgacgaatggggagacaactacttcctggtggggccatacacagagcagggcgtgcgcacccaggttgagctgctcgaagcaccaacgccggccttaaaaagaactcttgatagcatgaattcaaagggatgcaaggtgtattttggcaggtggctgattgagggagggccgctggttgtcctgctcgatgttggagcctccgcctgggcccttgaacggtggaaaggggaactgtgggatacttgcaatatcggcgtcccatggtatgatcgcgaggcaaacgatgcggtgctgttcgggttcctgacgacctggttcttaggggagttccttgcccagagcgaagaaaagccacacgttgttgcccactttcacgaatggttggctggtgttgggctgtgtctctgcagagccaggcgacttcccgtggcaaccatcttcaccacacatgccacgctgttgggaaggtatctatgtgcgggcgctgtggacttttacaacaacttggaaaatttcaatgtggacaaagaagccggcgaacgccaaatctatcaccgatactgcatggagagagctgcagcccattgcgcgcatgtgttcaccaccgtctcacagatcacggctattgaagcccaacacctgcttaagcggaagcccgatatcgtcacaccaaacggattgaatgttaagaagttctcggctatgcatgagttccagaacctgcatgcccaatctaaggcccgaatccaggagtttgtccgaggtcacttttacggacatctggactttaatctggataagacattatattttttcatcgcgggccgttacgaattttcaaacaaaggggcagatgtgttccttgaagctcttgcacgactaaattatctgctcagagtaaacggtagtgaacagacggttgtcgcattcttcatcatgcctgctagaacgaataactttaacgtcgagacgctcaaaggacaggccgttcgcaagcagctgtgggatactgccaatacagtgaaagagaaattcggaagaaagctctacgaaagcctgctagtcgggtccctgcccgatatgaataagatgttggacaaggaggatttcacgatgatgaagagagcaatcttcgccacacagcgccagagctttccacccgtctgtactcacaacatgctggacgacagttcagaccctattctgactaccattaggagaatcggcctgtttaattcctctgcggaccgagtgaaggttatctttcatcccgagttcctgagcagtacgtccccactcttgccagtggattacgaggagttcgtgagagggtgccacctgggggtttttccttcctactacgagccatggggctacacccctgccgagtgtacggtgatggggatcccctctatcagcaccaacctgtcaggattcggatgttttatggaggaacatatagccgatccttccgcatacgggatttacatcctcgataggagattccgcagcttggatgatagctgcagtcagctcacgagctttctttactcgttttgccagcagagcagacggcaaaggattatccagcgtaacaggaccgaaaggctgagcgacctgctagattggaagtacctggggaggtactatatgagtgcccggcatatggctttgtctaaagcgttcccagagcacttcacatatgagcccaacgaggccgatgcggctcagggataccgctatccacgcccagccagcgtgcctccgagcccatccttgtcccggcatagtagcccacaccagagcgaggatgaagaagacccaagaaatgggcccctggaagaggatggtgagcgctatgacgaggacgaggaagcagcaaaggacagaagaaatatcagggcacccgagtggcctaggagagcttcatgcacttcctctacgagcggaagtaagagaaattcggtggacaccgccacatcatccagcctgtcgacgccttctgagcccttatcccctacctcctcactgggcgaggaacgaaactag

SEQ ID NO: 189602 - DNA, 708 bp, synthetic construct
  misc_feature 1..708: note = Description of Artificial Sequence: Synthetic coding sequence
  source 1..708: mol_type = other DNA
atgaacagcacctggcggacccagtgcagcagcaagtggcccggcagatggttgacaagagtttactttggtagatggcttattgagggaggaccgctggtggtcttactcgacgttggggccagtgcctgggcgcttgaacggtggaaaggcgagttatgggacacttgcaacataggggtcccatggtacgaccgcgaagctaacgatgcagtcctgtttggttttctcaccacatggttcctcggagagttcttggctcaaagcgaggagaaaccgcatgtggtggcccatttccatgaatggctagctggtgtaggtctgtgtctgtgcagagctcgtcggttgcccgtagccaccatttttactacacatgccactctcctgggacgatacttgtgcgcaggggctgttgatttttataacaacctagagaattttaatgtggataaggaagccggggaacgccagatctaccatcgttactgcatggagcgtgctgctgcgcattgtgcgcacgtttttacgaccgtctcgcagataacagcgatcgaggctcaacacttgttgaagcgcaagcccgggatctggacctctacatggacccgcccctatacatcgctgtctccagcggctatgtcatctcccactcgagtcctcaccagctcctggagacactggctaggctctacaatctgttctgagtag

SEQ ID NO: 189603 - DNA, 1974 bp, synthetic construct
  misc_feature 1..1974: note = Description of Artificial Sequence: Synthetic coding sequence
  source 1..1974: mol_type = other DNA
atgaacagcacctggcggacccagtgcagcagcaagtggcccggccggtggctgactagagtgtacttcggacgatggttgatcgagggaggccctctagtcgttctgctggatgtcggagccagcgcgtgggctttagaacggtggaaaggtgaactgtgggatacatgcaacatcggagtaccctggtacgatcgcgaggcaaatgacgccgtgctcttcggcttcctgactacctggttcctgggagagtttttggctcaatctgaagagaaaccacacgtagtggctcacttccatgaatggttggcaggcgttgggctatgtttgtgccgggcccgtcggttgccagttgctacgatctttactacacatgccacgttgctggggcgatacctctgtgccggggcagtagacttttataataatctggagaactttaacgtcgacaaagaagcaggcgagaggcaaatttatcatcggtactgtatggagagggccgctgcgcattgcgctcacgtcttcacaaccgtgtcacagattactgcaattgaggctcagcaccttctcaaaagaaagcctgatatcgtgacaccaaacggcctgaacgttaagaagttctcagctatgcacgaatttcagaacttacacgctcagtcgaaagctcggatccaggaattcgtgcgaggacacttttatggccatctagactttaacctagataaaacactgtacttcttcatcgccggcaggtacgagtttagcaataaaggagcagacgtgtttcttgaagcactggctcggctgaactacctgcttcgcgtcaatggctctgaacagacggtggtcgcattcttcattatgccagcccgcaccaataatttcaacgtcgaaactctcaaagggcaggccgtccgcaagcaactgtgggataccgctaataccgtgaaagaaaaattcggccggaagctctacgaatcccttctggtgggtagtttgcctgacatgaataagatgctcgataaggaggattttaccatgatgaaacgcgctatatttgcgacacaacgtcagtccttcccacccgtgtgcacccataacatgcttgacgactccagcgatcccatactgactactattcgccggatcgggttgttcaactccagcgccgacagagtgaaagtaattttccaccctgaattcctgtccagtaccagcccattgttgcctgtggactacgaggagtttgtccgcgggtgccacctcggtgtgttcccaagctactatgaaccttggggttatactcctgcggagtgtacggtcatgggaatcccgagcatcagcacgaatctgagtggatttggctgttttatggaggagcacatcgccgatccttccgcatatgggatttatatcctggatcgccgattccggtcgctcgatgacagctgcagtcaactaacctcttttctctatagcttctgccaacagtcacggaggcagcgtattatccagcgcaatcgcaccgaaagactgtccgatctcttggactggaaatacctaggaagatactatatgtcagctagacacatggcactgtcaaaggccttccccgaacactttacttacgagcccaatgaagcagacgctgcccagggttacaggtatcccaggcccgctagtgtacccccaagccctagcctgagtcgtcatagctctcctcatcagtccgaggatgaggaggatccacgtaacgggccgctggaagaagatggcgagcgatatgacgaggatgaggaagctgctaaggataggcgaaatattcgcgcaccggaatggccgcgaagagcctcatgcacctcctctacctctgggtctaaacgcaattcggtggatacagcgacaagctcgtcactgtctactccctctgaaccactgtctccaacatcttctttaggcgaggagagaaactag

SEQ ID NO: 189604 - DNA, 1113 bp, synthetic construct
  misc_feature 1..1113: note = Description of Artificial Sequence: Synthetic coding sequence
  source 1..1113: mol_type = other DNA
atgcccgcccggaccaacaacttcaacgtggagaccctgaagggccaggccgttcggaaacaactgtgggacactgccaacacagtgaaggagaaatttggtagaaaactgtatgagagcctgttggtgggcagcctgcccgatatgaacaagatgttggataaggaggatttcaccatgatgaagcgcgctatcttcgccacgcagcgacagagctttccaccggtttgtacccacaacatgttggacgattcgagcgatccgattctgaccactataaggcggataggcctgtttaatagctcagcggatagggtcaaagtcatctttcatccagagtttctctcttccacctccccactgctgcctgtcgactacgaggagtttgtgcgcgggtgtcacctaggtgtctttccttcctattacgaaccgtgggggtacactcccgctgagtgcacggttatggggatcccgtcaatcagtaccaacctgtccgggtttgggtgctttatggaggagcatatcgcagatccctccgcatatggaatatacattttagacaggcgctttagatccctggatgatagttgtagccagctgaccagcttcctctatagcttttgtcagcagagtcggcggcagagaatcatacagcggaacagaacagagaggttaagcgatcttctagattggaagtatcttggaaggtattacatgtctgctcgtcacatggccctgtcaaaagcatttcctgaacatttcacatatgagcccaacgaggctgacgcggcccaggggtaccgttacccccgccccgccagcgtcccaccttcccccagtctttctcgacacagttctccacaccaatctgaagacgaagaggatccacggaacggacccctggaggaggacggggagcgatacgacgaagatgaggaggcggccaaggacaggcggaacatcagagctcccgagtggccccgccgggcgagctgtactagctccactagcggttccaaaaggaacagcgtagataccgccaccagctccagcttgtctacacccagcgagccactgtcccctacttcaagtctaggcgaggagagaaattag

SEQ ID NO: 189605 - DNA, 1002 bp, synthetic construct
  misc_feature 1..1002: note = Description of Artificial Sequence: Synthetic coding sequence
  source 1..1002: mol_type = other DNA
atgaccgaccaggccttcgtgaccctgaccaccaacgacgcctacgccaagggagccctcgtgctgggttcgtccctgaagcagcacagaacaactcgccgactagtggtactggctacccctcaggtttctgactccatgaggaaggtactggagacggttttcgacgaggtcataatggttgacgttttagattctggagactcagcccatcttaccctcatgaagagacccgaactcggcgtgacattgaccaaacttcattgctggtctctcacacagtacagtaagtgtgtcttcatggacgccgacactctggtgctggctaatattgatgatttgtttgaccgagaagaactgtccgccgccccagatcccggctggcccgattgtttcaattcgggagtgtttgtatatcagccaagcgtagagacctacaatcagctgctccacctggcatctgagcagggctccttcgacggaggggaccagggtatcctgaacacattcttcagctcatgggccacgactgatatcagaaaacacctgccgtttatctacaatttaagtagcatttcgatatattcctatctccccgcctttaaagtcttcggcgccagtgctaaagtggtacattttctcggcagagtgaagccttggaattacacatacgacccaaagactaaatccgtgaagtccgaagcacacgacccgaacatgactcaccctgagttcctgatcctgtggtggaacatcttcactactaacgtgttgcctctgctgcaacagttcgggctggtgaaggacacttgttcttatgttaacgtcgaggacgtgtctggcgccatttctcaccttagcctgggggagattcctgcaatggcccagccgttcgtttcatctgaggagcggaaagagcgctgggaacagggccaggctgattatatgggagctgactcatttgacaacataaaaaggaagctggacacttatttgcagtag

SEQ ID NO: 189606 - DNA, 1053 bp, synthetic construct
  misc_feature 1..1053: note = Description of Artificial Sequence: Synthetic coding sequence
  source 1..1053: mol_type = other DNA
atgaccgaccaggccttcgtgaccctgaccaccaacgacgcctacgccaagggggctctcgtgctgggatccagtctcaagcaacatcgcaccacaagaagacttgttgtgctggccaccccacaagtctccgacagcatgcggaaagtgctggagaccgtgtttgatgaggtaattatggtcgatgtcttggacagcggagactctgcccatctcacattgatgaagaggcccgagcttggtgtcacacttactaagctccattgttggtccctgacccaatactctaaatgcgttttcatggacgccgatacgttagtgctcgcaaacattgacgatctcttcgatagagaagaactgagcgccgctccagatcctgggtggccggattgtttcaactccggggtgtttgtgtaccagcctagcgtcgaaacttataaccagctgttacatttagcctctgagcagggctccttcgacggaggagaccagggtatccttaataccttcttcagcagttgggcgacaactgacattagaaaacacctgcccttcatatacaatctgagctcaatcagtatttactcctacttaccggcttttaaagtcttcggcgctagcgcaaaagtcgtgcatttcttgggtcgcgtgaagccatggaactatacctatgaccccaaaacaaagtcagtgaaaagtgaggctcacgacccaaacatgactcaccctgaatttctaatcctgtggtggaacatttttaccaccaacgttctcccactgctgcagcagtttggtctcgtgaaagatacctgcagctacgtaaacgtcctgtccgatctggtgtacaccctcgccttctcctgcggcttctgcaggaaagaggatgtctcaggggctatctcacatctcagcttaggcgagatcccagctatggctcagcccttcgtgagctccgaagagagaaaggaacggtgggaacagggccaggccgactacatgggagccgattccttcgataacattaaacgcaagctggacacgtacctgcagtag

SEQ ID NO: 189607 - DNA, 840 bp, synthetic construct
  misc_feature 1..840: note = Description of Artificial Sequence: Synthetic coding sequence
  source 1..840: mol_type = other DNA
atgaccgaccaggccttcgtgaccctgaccaccaacgacgcctacgccaaaggggctctggtgctcgggtcatctcttaagcaacacagaacgacacgaagactcgtcgtgctggccacaccccaggtaagcgatagtatgagaaaagtcctggagaccgtttttgacgaagtgatcatggtggatgtgctggacagcggggacagtgcccacctcactcttatgaagcgccccgaactgggggtcacactcactaaattgcactgttggagtcttacccagtattccaaatgtgtttttatggatgctgacacactcgtgttggcaaatattgatgatttgtttgacagagaggagctgagtgcagccccagaccctgggtggccagactgtttcaactctggagtgtttgtctaccagccttctgtcgaaacttacaatcagcttctccacttagcttcagagcaggggagcttcgacggaggcgaccagggtatccttaatacctttttttccagttgggcgaccacagacattcgcaaacatcttccttttatctacaacctgagctccataagcatctacagctacttgccggctttcaaggttaaaatgtctcaggaaccataccacatatgcccactaggtcggagtcaactttggcatagcaggctgtacccccggaaaaacggacgtaacgatggtaatcgggcccgtctgatcatttgggaacaaattccactcactaccagcagaggcaacctgaccctaacatcaagtcggaatacagctttcttctgcgagcacatccacttcacctctcttgtgtctgatacttag

SEQ ID NO: 189608 - DNA, 1398 bp, synthetic construct
  misc_feature 1..1398: note = Description of Artificial Sequence: Synthetic coding sequence
  source 1..1398: mol_type = other DNA
atgagcgagaccgagttccaccacggcgcccaggccggcctggagctcttaaggtcgagcaactctcctacctctgcttcccagtcagccggaatgacagtcaccgatcaggccttcgtgaccttagctactaatgacatctactgtcagggcgctttggttttaggacagagtttgcgacgtcatcgcctcacaaggaaactggtggtgctgattaccccccaagtttcctcacttttgcgagttattctgtcaaaggtgttcgatgaggttatagaggtgaacctgattgatagtgccgattacatccatctggcttttctgaagcgaccagagctgggactgactttaacaaaactccactgttggacccttactcactattccaaatgcgtgtttttggacgctgatacactggtcctctccaatgtcgatgaactgtttgacagaggcgagttttctgctgcgccagaccccggttggcccgactgcttcaatagtggcgtattcgtattccagccgagcctccacacccataagctgttacttcagcacgccatggagcacgggtcgttcgatggggctgatcagggactgcttaattctttcttccggaattggagcaccaccgacatccacaaacacctcccattcatttataatctgtctagcaatacgatgtacacgtactccccggccttcaagcagttcggtagcagcgccaaagttgttcactttctgggcagcatgaagccatggaattataagtacaatccccagtctggatccgtgctggagcagggctcagccagcagttctcagcaccaggcagccttccttcatttatggtggacagtgtatcaaaataatgtgttgcccctgtataagtcggtgcaggctggcgaagccagagccagtccgggccatacactgtgtcactccgatgttggtgggccctgtgcagacagtgccagtggcgttggggaaccttgcgagaactccacccccagcgcgggtgtgccttgcgctaactcccccctgggttctaaccagccagcccagggcttgccggagcctacacagatagttgatgagacgctgtccctgcccgagggcagacggtccgaggatatgatagcctgccccgaaacagagacacctgcagttatcacatgtgatccactgtcgcaaccctcgccgcaacctgcggacttcaccgaaaccgagaccattctggttgatctggcagtatcagtcagtcagatctcaattgaagagaaggtgaaggagctctcaccagaggaggagcgccggaagtgggaggaggggagaatcgattatatggggaaggacgcattcgcccggattcaggaaaagctcgaccgcttcctacaatag

SEQ ID NO: 189609 - DNA, 1506 bp, synthetic construct
  misc_feature 1..1506: note = Description of Artificial Sequence: Synthetic coding sequence
  source 1..1506: mol_type = other DNA
atgagcgagaccgagttccaccacggcgcccaggccggcctggagctgcttcgatcctccaatagtcctacaagtgcctcccagagtgcaggcatgactgtcacagatcaagcctttgtcacacttgccacaaacgatatctactgccagggagccctcgtgctcggccagtccttgcgacgccaccgattgacacggaagctcgtggttctgatcaccccacaggtgtctagcttgctgcgggtaatcttgagcaaggtgttcgatgaggttattgaagtgaatctgatagacagcgcagattacatccacctcgcattcctaaagcggccagaactcggactcaccctcaccaagctgcactgctggacccttacgcactactctaaatgtgtctttctcgatgctgacacactagttctgtcaaacgtcgatgaactattcgatagaggcgaattctcagccgcacccgatccgggatggccagactgtttcaactccggcgtttttgtgttccagccctctcttcacacccacaagctactgctgcagcatgccatggagcatggatcattcgacggagccgaccagggccttctgaattctttttttagaaactggtctacaaccgatattcataaacacctcccgtttatttacaacctgagcagcaataccatgtatacatacagtcccgcatttaaacagttcgggtccagcgctaaggtcgtccactttctgggctccatgaaaccatggaactacaagtacaaccctcagtcggggagcgtacttgaacaaggttcagccagctcatctcagcaccaagcagcctttttgcacctttggtggacagtctatcagaacaacgtgctacctctgtacaaaagcgtgcaggccggagaggctcgcgcatccccaggacatacactgtgtcactctgacgttggggggccatgcgccgacagtgcgagtggcgtgggggagccttgcgagaatagtactcctagcgctggggtcccctgcgccaattcgccactcggcagcaaccagcctgcccagggattgccagagccaacacagatcgtcgacgagacactgtctcttccagagggcaggcggtctgaggatatgatcgcatgcccagaaaccgagactcccgccgttataacttgtgatccactttcccaaccatccccccagccggccgacttcactgaaaccgagactatacttcaaccagctaataaggtggagagcgtttccagtgaagagacatttgagccctctcaagagttaccagcggaggctctcagagaccctagtcttcaagatgctctcgaagttgatttagcagtgtccgtgagtcagattagcatcgaagaaaaagttaaggaactgtcaccggaagaggaaagaagaaagtgggaggagggcaggatcgactacatgggtaaagatgcctttgcccgcatccaagaaaagcttgacagatttcttcagtag

SEQ ID NO: 189610 - DNA, 1413 bp, synthetic construct
  misc_feature 1..1413: note = Description of Artificial Sequence: Synthetic coding sequence
  source 1..1413: mol_type = other DNA
atgagcgtgaccgaccaggccttcgtgaccctggccaccaacgacatctattgccaaggcgctctggtactaggtcagtccctgcgccggcaccgactgacaaggaagttggtggtactgattacaccacaagtctcaagccttctgcgggtcatactgtctaaggtttttgatgaagtgatagaagtgaatcttatcgactcggccgattacatccatctggccttccttaaaagaccagaattagggcttactctgaccaagctgcactgctggacactgactcactattcaaaatgtgtttttctggacgctgatacattggttctgtcaaacgttgatgaattgttcgatagaggcgaattctctgccgcgccggaccccggatggcctgactgcttcaattccggggtgttcgtttttcagccttcgcttcatacacataaacttcttctgcagcatgccatggaacacggctcctttgacggcgcggatcaagggctcctcaatagtttcttccggaactggtccacgacagatatccacaagcacttaccgttcatttacaatttgtcgtcaaacacaatgtacacctactcgcccgccttcaagcagtttggttcatcggcgaaggttgtacactttctgggatccatgaagccttggaattacaaatataatccacagtctggctccgtgctggagcaaggcagcgcctctagtagccaacatcaagcagcttttttgcatctttggtggactgtgtatcagaataacgtgctcccactgtacaagtcagtgcaggccggagaggcccgcgcttcccctggccatactctctgccattctgacgtgggaggaccgtgtgccgatagtgccagcggggtaggagagccttgcgagaattcaacacccagcgcaggtgtgccttgtgctaacagccccctgggctccaatcaaccagcccagggactgcccgagccgacacagattgtcgatgaaactctaagccttcccgaaggtcgcagatccgaggatatgattgcatgccctgagactgaaactcctgcagtgatcacgtgcgacccgctgtctcagccttccccacaacccgcagattttacagagacggagaccattctgcagcctgccaacaaggtggagagtgtctcttctgaagaaaccttcgagccctcccaggaactccctgccgaagccttacgagacccctcactgcaggacgcgctggaggtggacttggcggtgtcggtatctcaaatcagcatcgaggagaaggttaaggagctgagccctgaagaggagcgacggaagtgggaggaggggcgcattgattacatggggaaggatgctttcgctcgcattcaggaaaagctggacaggtttttacagtag

SEQ ID NO: 189611 - DNA, 417 bp, synthetic construct
  misc_feature 1..417: note = Description of Artificial Sequence: Synthetic coding sequence
  source 1..417: mol_type = other DNA
atgagcgtgaccgaccaggccttcgtgaccctggccaccaacgacatctactgccaaggcgcacttgtacttggccaaagcttgaggaggcacagacttacacgcaaattggtggtccttatcaccccacaagtcagtagcctgttgagagttatcctgtcaaaggttttcgatgaagtcattgaggtcaacttgatcgactctgcagactatattcatcttgcctttctgaaacggcctgagttaggcctgacactaacgaaactccattgctggaccctgacacactattccaaatgcgtgtttctggacgccgatactctcgtgctgagcaatgttgatgagctttttgaccgtggcgaattcagtgccgcgcctgatccaggctggcctgactgcttcaatagcggcgtgtag

SEQ ID NO: 189612 - DNA, 1293 bp, synthetic construct
  misc_feature 1..1293: note = Description of Artificial Sequence: Synthetic coding sequence
  source 1..1293: mol_type = other DNA
atgagcgagaccgagttccaccacggcgcccaggccggcctggagctcctgcggtcaagcaactcaccaacttcagcatctcagtcagctggcatgaccgtgacagaccaagctttcgtgactctggctaccaacgacatttattgtcagggagcccttgtgctgggccaatccttgcgccgacaccgtctgaccagaaaactggtcgtgctcattactccacaagtttccagtctgcttagagttatcctgagcaaagtgtttgatgaagtgatcgaagtgaatttgatcgatagcgcagactatattcacctagcgttcctgaagcgcccagagttaggtttgaccctgaccaagttgcactgttggaccctgacacattatagcaagtgcgtgttcctggacgccgacacattagtcctctcaaatgtggatgaactctttgaccggggcgaattctccgctgcacctgaccctggatggccagattgcttcaactctggcgtttttgtattccagccttcgctgcacacacataaactgctactgcagcatgctatggagcacggctcttttgacggagctgatcagggcctcctcaattccttttttcggaactggtcaacgacagacatacacaagcatctgcctttcatctataatctgtcctccaacaccatgtacacttacagccccgccttcaaacagttcggttcgagcgcaaaggtcgtgcacttcttggggagcatgaagccatggaactacaaatataacccccagagtggtagcgttctggagcaaggcagcgcctctagctctcagcaccaggcggccttcctccacctctggtggaccgtctaccaaaacaacgtgctgcccctgtacaagagtgtgcaggctggcgaggctcgcgcttcccctggacatacgttgtgtcattccgacgtcggcggtccatgcgcagactctgcatccggagtgggggaaccgtgtgagaatagcaccccttccgccggggtgccctgtgcaaactctcccttgggcagtaatcagccagcgcagggattgcctgaacccacacagatcgtggacgagaccctgagcctgcccgagggcagaagaagcgaggatgtggacttggccgtatcagtatcacagatttccattgaagagaaggtcaaagagctgtctcccgaagaggagcgtagaaagtgggaagagggccgaatagactatatggggaaggacgcctttgcacggatccaggagaagctcgatagatttctacagtag

SEQ ID NO: 189613 - DNA, 354 bp, synthetic construct
  misc_feature 1..354: note = Description of Artificial Sequence: Synthetic coding sequence
  source 1..354: mol_type = other DNA
atgtacggcaagatcatcttcgtgctgctgctgagcgacacccacaagagagacacctacgctgctaccccccgtgcccacgaggtgtcagaaatctccgtgagaaccgtttacccgcccgaggaggagacaggagaaagagttcagctggctcatcatttttcggaacccgagattactctgattatcttcggagtgatggctggagtcattgggactatcctcttgattagctacggcattcgacgactgatcaagaaaagtccctcagatgtgaaaccattacccagcccggatactgatgtgccgttatcgagcgtggagatagagaacccggaaacgtctgatcagtag

SEQ ID NO: 189614 - DNA, 453 bp, synthetic construct
  misc_feature 1..453: note = Description of Artificial Sequence: Synthetic coding sequence
  source 1..453: mol_type = other DNA
atgtacggcaagatcatcttcgtgctgctgctgagcgagatcgtgtctatcagcgcgttgagtactacagaagtggctatgcacacttcgacatcttcttcggttaccaaaagctatatttccagtcagaccaatgatacacacaagagggatacctacgcagcaacaccacgggcgcatgaggtaagtgaaatctccgtaaggacggtgtacccacccgaggaggaaaccggggagagagttcagcttgcacaccacttctccgagcccgagattaccctgataattttcggcgttatggctggggtgataggaactatcctactgatctcttacgggattcggcgccttatcaagaaaagcccttctgacgttaaaccactgcctagtcccgataccgacgttcccctatcctcggtcgaaattgaaaatcccgaaacgtccgaccagtag

SEQ ID NO: 189615 - DNA, 189 bp, synthetic construct
  misc_feature 1..189: note = Description of Artificial Sequence: Synthetic coding sequence
  source 1..189: mol_type = other DNA
atgtacggcaagatcatcttcgtgctgctgctgagcgagatcgtgtcaatcagtgctttatccacaacagaggtggcaatgcatactagtacatcctcttccgtcacaaaatcctacatctctagtcagaccaacggagaacgggtacagcttgcgcaccacttcagtgaaccagacttccacaattag

SEQ ID NO: 189616 - DNA, 357 bp, synthetic construct
  misc_feature 1..357: note = Description of Artificial Sequence: Synthetic coding sequence
  source 1..357: mol_type = other DNA
atgtacggcaagatcatcttcgtgctgctgctgagcgagatcgtgagcatcagcgccttaagtacaacagaggttgccatgcacacatcaacgtcatcatcagttactaaatcttacatttcctcgcagacaaacggtgaacgggtgcagctggctcaccacttttctgagccagagatcacactgataatctttggagtgatggccggcgtgatcgggaccattctgctgatcagttatgggatccgccgtttaatcaaaaaatcgccaagcgatgttaagcctctgccttcacctgacactgacgtacctctgagctctgtggagatagagaaccctgagactagtgaccagtag

SEQ ID NO: 189617 - DNA, 414 bp, synthetic construct
  misc_feature 1..414: note = Description of Artificial Sequence: Synthetic coding sequence
  source 1..414: mol_type = other DNA
atgtacggcaagatcatcttcgtgctgctgctgagcgagatcgtgagcataagcgcgcttagtacgacagaagtcgccatgcacacttccacttcctcctcggtaaccaagtcttacatcagttctcagaccaatgacacacataaaagagacacttatgcggccacaccacgagctcatgaggttagcgagatctcagtccgtacagtataccccccagaggaggaaacagaaataaccctgattatattcggagtcatggcgggagtaattggaaccatactgctcatcagctatgggataaggcgcctgatcaaaaaaagtccctcagatgttaaacctctgccctctcccgacacagacgtaccgctgtcatctgtggagattgagaaccctgagacttctgaccaatag

SEQ ID NO: 189618 - DNA, 258 bp, synthetic construct
  misc_feature 1..258: note = Description of Artificial Sequence: Synthetic coding sequence
  source 1..258: mol_type = other DNA
atgtacggcaagatcatcttcgtgctgctgctgagcggcgagcgggtccagctggcacaccatttttccgagccggagattacactgatcatctttggtgttatggcgggagtaatcgggaccattctgctgatctcatacggcattcgtcgactgataaagaaatcccctagtgacgttaaacctcttcctagccccgataccgacgtgcccctgtcctcagtggagattgagaaccctgaaacttccgaccaatag

SEQ ID NO: 189619 - DNA, 375 bp, synthetic construct
  misc_feature 1..375: note = Description of Artificial Sequence: Synthetic coding sequence
  source 1..375: mol_type = other DNA
atgcacaccagcaccagcagcagcgtgaccaagagctacatcagctcacagaccaatgacacacataaaagggacacttacgcggcgactcccagagcccacgaagtgtctgagattagtgtaagaacagtgtacccccccgaagaggagacgggcgagcgggtccagttggcgcatcatttctccgagcccgaaataacattgatcatttttggggtgatggctggcgtcattgggactatcttgctgatttcttatggcatcaggcgactgatcaagaaatccccttctgacgtaaagcctcttcccagtcccgataccgacgtgcctttaagttccgtggaaatcgaaaatcccgagacctctgatcaatag

SEQ ID NO: 189620 - DNA, 276 bp, synthetic construct
  misc_feature 1..276: note = Description of Artificial Sequence: Synthetic coding sequence
  source 1..276: mol_type = other DNA
atgtacggcaagatcatcttcgtgctgctgctgagcgagatcgtgtccatttctgctctctcaaccaccgaggtcgccatgcacacatccacctcctcctccgttaccaagtcctacattagcagtcagacgaacggcgagacaggccagttagtacatcggttcacagtaccggcgcccgtggtaatcatccttattatcctctgcgtaatggccggaatcattgggaccatcctgttgatcagctattccatccgcaggcttatcaaggcgtag

SEQ ID NO: 189621 - DNA, 276 bp, synthetic construct
  misc_feature 1..276: note = Description of Artificial Sequence: Synthetic coding sequence
  source 1..276: mol_type = other DNA
atgtacggcaagatcatcttcgtgctgctgctgagcgagatcgtgagcatcagcgctctctccacaaccgaggttgctatgcatacatctacaagttccagtgtgacgaaatcctacataagttctcagaccaatggtgaaaccggacagctggtacaccgtttcaccgttccagcaccagtagtgatcatcctgattatcctgtgtgttatggcaggcatcattgggacgatactgttgatctcatatagcatccgacgactgatcaaagcctag

SEQ ID NO: 189622 - DNA, 177 bp, synthetic construct
  misc_feature 1..177: note = Description of Artificial Sequence: Synthetic coding sequence
  source 1..177: mol_type = other DNA
atgtacggcaagatcatcttcgtgctgctgctgagcggcgagaccggacagcttgtgcatcggtttaccgtgccagcccccgtcgtcattatactgattatactgtgtgtaatggctggaataatcggtacaattcttctcatctcctattccatcagacggctcattaaagcctag

SEQ ID NO: 189623 - DNA, 387 bp, synthetic construct
  misc_feature 1..387: note = Description of Artificial Sequence: Synthetic coding sequence
  source 1..387: mol_type = other DNA
atgtggagcacccggagccccaacagcaccgcctggcccctgagcctggaaccagatccgggcatggcctctgcatcgactacaatgcataccacaacaatcgctgaacctgaccccggcatgtctgggtggcccgatgggcgaatggagacctcgacaccaacaataatggatatagtcgtgattgccggggttattgctgccgttgcgatagtgctggtgtccctactctttgttatgttgcgatacatgtatcgacacaagggaacttaccatacaaacgaagcaaagggcaccgaatttgccgagtccgccgacgccgctctgcagggtgacccggcactgcaggacgcaggtgactccagtaggaaggaatatttcatttag

SEQ ID NO: 189624 - DNA, 324 bp, synthetic construct
  misc_feature 1..324: note = Description of Artificial Sequence: Synthetic coding sequence
  source 1..324: mol_type = other DNA
atggccagcgccagcaccaccatgcacaccaccaccatcgccgagcccgatccaggcatgtctggctggcccgatggccgtatggaaacatcaacaccaaccattatggacatcgtggtgatcgccggagtaatcgccgcagttgccattgtgctggtttctcttctgtttgttatgctgagatacatgtatagacacaaggggacttaccatacaaatgaagcgaagggcaccgagttcgctgaaagcgccgacgcagcgctgcagggcgatcctgctctacaagatgccggagactcttcccgcaaagaatactttatctag

SEQ ID NO: 189625 - DNA, 330 bp, synthetic construct
  misc_feature 1..330: note = Description of Artificial Sequence: Synthetic coding sequence
  source 1..330: mol_type = other DNA
atgtggagcacccggagccccaacagcaccgcctggcccctgagcttggagccggaccccggtatgagcggctggcctgacgggaggatggagacgagcaccccgactattatggatatcgtcgtcatcgccggcgtgattgctgccgtggccattgtgttagtgagtctgctattcgtcatgctcaggtatatgtaccgccataaggggacataccataccaatgaagccaagggcacagaatttgcggaatcagccgacgcggcactgcagggcgaccccgcgctccaggacgccggagactctagccgaaaggagtactttatctag

SEQ ID NO: 189626 - DNA, 237 bp, synthetic construct
  misc_feature 1..237: note = Description of Artificial Sequence: Synthetic coding sequence
  source 1..237: mol_type = other DNA
atgtacggcaagatcatcttcgtgctgctgctgagcggcatcgtgtccatttctgcctcctctacaaccggagtggcaatgcatacttccacaagtagctccgtcaccaagtcctacatctcttcccagacgaatgggataacactgatcaattggtgggccatggcacgtgttatctttgaagtcatgctggtggttgtcggtatgattatactcattagttattgcatcagatag

SEQ ID NO: 189627 - DNA, 168 bp, synthetic construct
  misc_feature 1..168: note = Description of Artificial Sequence: Synthetic coding sequence
  source 1..168: mol_type = other DNA
atgtacggcaagatcatcttcgtgctgctgctgagcggcatcgtgtccatatccgccagctcaacaacaggagtagccatgcacacatctaccagtagttcggtcaccaagtcatatatcagctcccagaccaacggggagcgggggcaactggttcaccgcttctag

SEQ ID NO: 189628 - DNA, 237 bp, synthetic construct
  misc_feature 1..237: note = Description of Artificial Sequence: Synthetic coding sequence
  source 1..237: mol_type = other DNA
atgtacggcaagatcatcttcgtgctgctgctgagcggcatcgtgagcatatcggcctcgtcaacaacgggcgttgccatgcatactagcacctcatcaagtgtgacaaaaagctacatctcctctcagacaaatgggattacgttgattaattggtgggcgatggcaagggtaatttttgaggtcatgttagtggtagttggcatgattatcctgatctcctactgcatcaggtag

SEQ ID NO: 189629 - DNA, 180 bp, synthetic construct
  misc_feature 1..180: note = Description of Artificial Sequence: Synthetic coding sequence
  source 1..180: mol_type = other DNA
atgtacggcaagatcatcttcgtgctgctgctgagcggcatcgtgtccattagtgcttcaagcaccactggcgttgcgatgcatacctccacaagcagttccgtcaccaaatcctacatatcctcacaaaccaacgggtgcgtgatcggtaacattatttgctcagataagtcaaagtag

SEQ ID NO: 189630 - DNA, 1605 bp, synthetic construct
  misc_feature 1..1605: note = Description of Artificial Sequence: Synthetic coding sequence
  source 1..1605: mol_type = other DNA
atgccccacctgatggagcggatggtgggcagcggcctgctgtggctggctctagtgtcttgtatcctgacacaggcatccgccgttcagagagggtacgggaatccaatagaggcttctagctacgggctcgaccttgactgcggcgcgcccggcacccccgaagcacacgtctgcttcgacccgtgtcagaattacactctgctcgacgaacctttcagatcaactgagaactctgccgggtcccaggggtgcgataagaatatgtccggatggtaccgttttgtgggggagggcggtgtgaggatgagcgagacttgtgtacaggtgcacagatgtcaaacagacgctccaatgtggctaaatgggacacatcctgccctgggtgatgggattaccaaccataccgcatgcgcacattggagcgggaactgctgtttttggaagacggaggttctggtgaaagcctgtccaggggggtaccatgtgtatagactggagggcaccccatggtgcaacctgagatattgtaccgaccccagcacagtggaggacaaatgtgagaaggcttgcaggcctgaggaggaatgcctggcattaaattccacctggggttgcttctgtagacaggatttaaattcttcagatgtgcattccctgcagcctcagttggattgcggcccacgggaaatcaaggtaaaggtagacaaatgtctccttggaggcctgggtctgggcgaggaggtgatcgcctatctgagagacccaaattgctcctccatcctgcagacggaggaacgaaactgggtgagcgttacatccccagtccaggctagcgcctgccggaatattctggaacgcaatcagacccacgcgatttacaagaatacacttagcttggtgaacgacttcattatcagagatactatattgaatatcaatttccagtgcgcatacccccttgatatgaaggtgagcctacaggctgccctgcagccaattgtttcaagtctcaacgtgtcggtcgacggtaacggggaattcatcgtgcgtatggccttatttcaggaccaaaactatacaaatccttatgagggcgacgccgtggagctgagcgttgaatccgtgctatatgtgggagccatcttggaacagggcgatactagccgcttcaatctggtgttgcgaaattgctatgcaactcccaccgaagataaggctgacttggtgaaatacttcatcattaggaacagttgctccaaccagcgagactccacaatccacgtggaggagaacggacagtcctcagagagtagatttagcgttcagatgttcatgtttgccggccattatgacttagtgtttctacattgcgaaatccacctctgtgactctctgaacgaacagtgccaaccaagttgtagtcgcagccaggtaaggtctgaggtacccgccattgacctcgccagggtgttggacctaggacccattactaggcgtggcgcacagtcaccaggcgtgatgaatggcacgccgagcacagccggatttttggtggcctggccaatggtgctgctaacagttttgctggcctggttattttag

SEQ ID NO: 189631 - DNA, 1164 bp, synthetic construct
  misc_feature 1..1164: note = Description of Artificial Sequence: Synthetic coding sequence
  source 1..1164: mol_type = other DNA
atgccccacctgatggagcggatggtgggcagcggcctgctgtggctggcactagttagctgcatcctcacacaggcgtctgctgtacaaagagacccctccaccgtggaggacaagtgcgaaaaggcatgccgaccagaagaagaatgtctcgcactgaacagcacctggggatgtttctgcaggcaggaccttaatagctccgatgtccatagtctccagccccagctcgactgcggacctagggaaatcaaagtgaaagtggataaatgtcttctgggtggtctgggactgggggaggaggtgatagcctacctgcgggatcccaattgtagctcgatcttgcagaccgaagagcggaattgggtgagtgtgactagccctgtgcaagcctcagcgtgccgcaatatcctcgaacgcaatcagacccacgctatctataagaacactctaagccttgtgaacgattttataattagagacaccatcctcaatatcaactttcaatgcgcctatcccctggatatgaaggtcagtctgcaggcggcactgcagcccatcgtgagtagcctcaacgtgagtgtcgacgggaacggcgagtttatcgtccgaatggccctattccaggatcagaattacaccaatccttatgaaggcgacgcggttgagttgagcgtggaaagcgtgctctacgtcggtgccatcctagagcaaggtgacactagtaggtttaaccttgtgctcaggaactgctacgccactccaacagaagataaggctgatctagtgaaatactttataatacgaaatagctgttcaaatcaacgcgattctactatccatgtcgaggaaaatggtcaaagcagcgagtccaggttcagcgtgcagatgtttatgtttgcaggccactacgacctcgtgtttctgcattgtgaaatacatctgtgcgactcactgaatgaacaatgtcagccaagctgttctcgatcacaggttcggtctgaggtccctgccatcgatttggcccgggtgctggatctcgggcccatcacaaggagaggggcccaaagccccggtgttatgaatggcacaccatccacagctggctttttagtcgcctggccaatggtgctcctaaccgtcctgcttgcgtggctcttctag

SEQ ID NO: 189632 - DNA, 1173 bp, synthetic construct
  misc_feature 1..1173: note = Description of Artificial Sequence: Synthetic coding sequence
  source 1..1173: mol_type = other DNA
atgccccacctgatggagcggatggtgggcagcggcctgctgtggctggctctggtatcctgtatcctaacacaagctagcgcggtccagagggtcccccgcgatccaagtaccgtggaggataaatgcgagaaagcttgtcggcccgaggaggagtgcctggccttaaattccacctggggctgtttctgccgccaggacctcaattcaagcgacgttcacagcctgcaaccgcaactggattgcggacctagagagataaaagttaaggttgacaagtgtctcctggggggacttgggctgggtgaggaggttattgcctaccttagggaccctaactgcagttccatcctacagacggaggaacggaattgggtttccgtgacctcccccgtgcaggcatctgcctgtagaaacatcctggaacgaaatcagactcatgcaatctataaaaacacactttctctggtgaacgattttattattcgggatacaatacttaatattaacttccagtgcgcctaccccctggatatgaaggtttctttacaggctgccctgcagcctatcgtcagttcactcaatgtctccgtcgatggaaacggtgaatttattgtccgcatggccctgtttcaggaccagaactatacaaacccttatgagggcgacgccgtggagctctctgtggagtccgtcctctatgtcggcgccatactagagcagggggatacatccaggtttaacctcgtgttgagaaattgctatgccacacccactgaggataaggcagacctcgtcaagtattttattattcgcaacagttgttctaatcaacgcgattctaccattcacgtagaagagaacggacagagtagtgaatcacgtttctccgtccagatgttcatgtttgcgggccactacgatcttgtatttctgcactgcgagatccacctgtgcgacagcctaaatgaacagtgtcagccgtcatgctctcgttctcaggtcaggagcgaggtgcccgctatcgacctggcccgagtgctggacctaggaccaataacacgccggggggctcagagtcccggcgtaatgaatgggactcccagtacagcagggttcctggtggcatggccaatggtactgctcaccgtcctgttggcctggctgttttag

SEQ ID NO: 189633 - DNA, 1614 bp, synthetic construct
  misc_feature 1..1614: note = Description of Artificial Sequence: Synthetic coding sequence
  source 1..1614: mol_type = other DNA
atgccccacctgatggagcggatggtgggcagcggcctgctgtggctggccctcgtgtcttgcattttaacacaggcctctgctgttcagcggggttacggaaacccgatagaagctagttcttatggcctcgacctcgactgtggcgctccaggtacgcctgaagcacacgtttgtttcgacccctgtcaaaactacaccctcctcgatgagccctttcgctcaactgaaaactccgccggttcgcagggctgcgataagaacatgtctggctggtaccggtttgttggcgaaggaggggtgagaatgtctgaaacctgtgttcaggtgcaccggtgtcaaacagatgccccaatgtggctgaatggcactcaccccgccttaggcgacggcattaccaaccacacagcctgtgcgcattggagcggaaattgttgcttctggaagaccgaggtactggttaaagcctgtcctgggggatatcatgtataccggctcgaaggaacaccatggtgcaacctgaggtattgcaccgttccgcgtgacccgtcaaccgttgaggataagtgtgaaaaggcatgtcgccccgaggaggagtgtctcgctttgaactctacctgggggtgcttttgtaggcaggatctcaattcctctgatgtgcactccctgcagccgcaactcgattgtggtcccagagagattaaagtgaaggtggacaagtgcctcttgggtggcctaggattgggtgaagaggtcattgcatatcttcgggatcctaactgttcatcaatactgcagacagaggaaagaaactgggtgtcagtgaccagcccagtgcaggctagtgcttgccgcaacatccttgagcggaatcagacccatgcgatctataaaaataccttgagcctagtgaacgattttattatccgcgacactatcctcaacattaactttcaatgtgcctaccccctggatatgaaagtatctcttcaggctgcacttcagcccatagtctcatcgctgaacgtcagtgtggacggcaacggagagttcattgtacgcatggctcttttccaagatcaaaactataccaacccatatgagggcgacgccgttgagctctctgtcgaatcagtcctgtatgttggagccattttagagcagggagatacatcccggtttaacttagtgctgagaaattgttacgcaacaccaactgaggacaaagctgatctcgtcaaatacttcatcattcgtaactcatgctcaaatcagcgggacagcactatccacgtcgaagaaaacggccagtctagcgagtctcggttcagcgtgcagatgtttatgttcgcagggcactacgatctggtattcctgcactgcgaaatacacttgtgcgactctctaaacgagcaatgccagccgtcctgctcacgatcccaagtgcgaagcgaggtccctgcaattgacctcgcaagggttctggatctgggccctattacccgccggggggctcaaagccctggggtgatgaatggcactccatccacagcagggttcttggttgcctggccaatggtgctgctcacggtgctgctcgcctggctgttttag

SEQ ID NO: 189634 - DNA, 1548 bp, synthetic construct
  misc_feature 1..1548: note = Description of Artificial Sequence: Synthetic coding sequence
  source 1..1548: mol_type = other DNA
atgaagatcaagtgcgagaagagccggacccagagcagcgcccagcacgttcagcatagcgcccattcgaccatcgtttgccgcaagcactcacacaacgccgaaacagctggaagggtagatatcgtgcgtggaggccctttctttcaccaccccctccgcaagtggctcatttcaccccctctgaacaagccgagcgtatggcccagaacccctatcatccccgtacatcaactccgccgggatacctgggtaggaaattgcaataagaagacagctcactcccgtcttcactcgcatggctggcccgaggaagaacggtttgtattcagttccgagctgcacggcaagtctgcctattctaaggtgacatgtatgcctcacctcatggagcgcatggttggaagtgggctcctgtggctcgccctggtgagctgtatcctgacccaggcatctgctgttcagagggaccaccttgatcctagtactgtggaggataaatgcgaaaaggcctgtcgtcctgaagaggagtgcctggctctgaactccacatgggggtgcttttgccggcaggatctaaatagttcggacgtccattctttacaaccgcaactcgactgtgggccaagggagataaaggtgaaagtagataaatgtttgctggggggtctggggctgggcgaggaagttattgcttacctgagagacccaaattgcagttccattctccaaacggaagagaggaactgggtttcagtgactagtcctgtacaggctagtgcctgtagaaacatactggagcgcaaccaaactcacgcaatctacaaaaatacactgagcctggtgaacgattttatcatacgagacaccattctcaatattaactttcagtgcgcatacccactggacatgaaggtctccctgcaggccgccctccagcccattgtaagtagcttgaacgtttcagtcgacggtaatggggagtttatcgtgcggatggccttattccaagatcagaattatacgaatccgtacgagggtgacgctgttgaactgtccgtggagagcgtcctgtatgtgggcgcaatcctggagcagggcgacacatctcggttcaatctagtgttgcgcaactgttacgccacacctaccgaggacaaggctgacctggtgaaatacttcataattcgcaacagctgcagtaatcaaagagattcaacaattcacgtggaagaaaacggtcagtctagcgaatctcgttttagcgttcaaatgtttatgttcgctgggcactatgatcttgtcttcttacactgtgagatccacttatgcgacagcctgaatgagcagtgtcaaccctcgtgctccagatcccaggtcaggagcgaagtgccagccattgacctggcgcgagtcttggacttggggcccattacgagaagaggggcccagagccctggggtgatgaacggtactccttctaccgctgggtttctggtggcatggcctatggtgcttttgaccgttttgctggcctggcttttttag

SEQ ID NO: 189635 - DNA, 1959 bp, synthetic construct
  misc_feature 1..1959: note = Description of Artificial Sequence: Synthetic coding sequence
  source 1..1959: mol_type = other DNA
atgcccctgctgctgctgctgctgctgctgcccagccccctgcacccccatccaatctgcgaagtgtctaaggtcgcatcccacctggaagtgaactgcgacaagcggaatctgacagcactgccaccagatcttcccaaagatacaaccatattgcacctgtctgaaaatttgctgtacaccttctcgctcgcaactttgatgccttacacaaggctgacacaactgaacctggatcggtgcgagctgactaagttacaggtcgacggcaccctgcctgtccttggcactctcgacctttctcacaaccagctgcagagcctaccgttgttgggccagacactgccagccctgactgtgctggatgtgagttttaatagactgacaagcctcccgctaggggccctacgcgggttaggcgagttgcaggagctgtatctgaaagggaatgaattgaagaccctgccccccggactgcttactcccactcccaagctggagaagctcagtctcgcgaataataatctcaccgagctacctgctggactcctgaatggactcgaaaatctggacaccctactgttgcaggagaactcgctgtatacaatccctaagggcttttttgggtctcatctcctaccttttgcctttctacatgggaacccctggctgtgtaactgcgaaatcctctatttccgccgctggctgcaagataatgctgagaatgtgtacgtgtggaagcaaggcgtggacgtcaaggctatgacaagtaacgtggcctcagtccagtgcgataattcagataaattcccagtgtacaagtaccccggaaaagggtgtcctactctgggcgacgagggcgacacagatttgtatgactattaccctgaggaggataccgaaggagacaaggtgcgcgccacgcgcactgtggtgaaatttcctacaaaggcccatactactccatggggactcttctattcttggtctactgcatctttagatagccagatgcccagctctttacatccaacgcaggaatcgactaaggagcagactacctttccacctcggtggacacctaacttcaccctgcacatggagagtattactttctcaaagacaccaaaatccacaactgagccaacccccagcccaaccacaagcgaacccgttcccgaaccagccccaaacatgacgacacttgagcccacccctagccccactaccccagagcctacttctgaacctgcacccagtccgaccacaccagaaccaacatcagaacctgcaccaagccctacgactcccgagccaacctctgaacctgccccaagccccacaaccccagagcccaccccaatccctactatcgcaacttcaccaacaatacttgtgagcgctacttcacttattaccccaaagtctacctttctcaccacgacaaagcctgtctctcttttggagtccactaagaagactatccccgagctcgaccagcctccgaaactgcggggagtgctccaaggccatctggaaagcagcagaaatgatccatttctgcaccccgacttctgttgcctgctgcccttggggttctacgtgctcgggctgttctggctcctgtttgctagtgttgtgttgattcttctcctaagctgggtggggcatgttaagcctcaagccctcgattctggccagggtgctgcactgaccactgctacgcagactacccacctcgagctgcagagaggcaggcaagttaccgttccacgagcgtggctgctttttctaaggggctcccttcctacgtttcgatcatccctgttcctttgggtgcggcctaatggcagagtgggtcctctggtggcaggccggagaccatctgccctctctcaagggcgcggtcaggatctgctgtctacggtgtccatacggtacagcgggcattccctttag

SEQ ID NO: 189636 - DNA, 1881 bp, synthetic construct
  misc_feature 1..1881: note = Description of Artificial Sequence: Synthetic coding sequence
  source 1..1881: mol_type = other DNA
atgcccctgctgctgctgctgctgctgctgcccagccccctgcaccctcaccctatttgcgaagtgtctaaggtagccagccacttggaagtgaattgtgacaagcggaatctcaccgcactcccacctgatcttcccaaggatactactatcctccacctctctgagaaccttctatacacattctctcttgctactctcatgccatacacacgacttacccagctgaacctggatcgatgcgagctgaccaaactgcaagtcgatggtacgctgccggtcctgggtactctcgacttgtcccataaccagctgcagtcactcccactattaggccaaacactgcccgctctgacagtgcttgacgtaagctttaatcgtctgacctcactgcccctgggtgcccttagaggcttaggtgagttgcaagaactgtaccttaaaggcaacgagctgaagactctgcccccgggactcctcacacccacaccaaaattagaaaaactatcactggctaacaataacctgaccgagctgccagctggactccttaatggcttggagaatctagatacactcctgctccaggagaactccttatatactatccctaagggtttctttggatctcacctgctaccctttgctttcttgcatggtaacccatggctctgtaactgtgagattctttacttcaggagatggctgcaagacaatgctgagaacgtgtatgtgtggaagcagggagttgacgttaaagccatgacgagtaatgtcgcaagcgtgcagtgtgacaacagcgacaagttccccgtttataaatatccagggaaagggtgccctacactgggtgacgagggcgatactgacttatatgattattaccccgaagaagacactgagggggataaggtgagggccactcgcaccgttgtcaaatttccgacaaaagctcacacaaccccatggggcctgttttactcgtggtccactgccagtctggactcccagatgcctagctctctgcatcctactcaagagagcacaaaagaacagacgacctttcctcctagatggactccaaatttcaccctgcacatggagtcgatcaccttttctaagactcccaaatctacaactgaacctaccccaagcccgactacctccgagccggtgcccgagccggcccccaatatgaccacccttgaacctacaccatccccgacaactcctgagcccactagtgagcccgcaccttccccaaccaccccagagcccacacccatccctacaatcgcgaccagccctacaatcctagtcagcgctacatccctgatcactccaaaaagtacattcctcaccactactaagcctgtgagcttgctggaaagtacaaaaaagacaattcccgaactggaccagccccctaagctgcgcggcgtgttgcagggccacctcgaaagctcccggaatgaccccttcctccaccccgatttttgctgtctacttccgctgggcttttacgtactggggttgttctggcttttgttcgcatccgttgtattgattcttctactgtcttgggtcgggcatgtaaagccccaggccctcgacagcggacaaggagcggccctgacgactgcaacccagactactcatttagagctacagcgggggcggcaggtgaccgtgcctcgtgcttggcttctcttccttagaggatcattacccacctttaggagtagcctgttcctatgggtcagacccaacgggcgggtcggtccattagtggcgggcaggcgccctagcgctttgtcgcaggggcggggccaagacctgctgagtactgtgtccattcggtattccggccatagcctatag

SEQ ID NO: 189637 - DNA, 621 bp, synthetic construct
  misc_feature 1..621: note = Description of Artificial Sequence: Synthetic coding sequence
  source 1..621: mol_type = other DNA
atgggcagcggcccccggggcgccctgagcctgctgctgctgctgttggcacccccaagccgacccgctgccgggtgccctgccccatgcagttgtgcagggaccctggtggattgtgggagaaggggcttaacctgggctagcttgcccacagcgtttccagtagacacaaccgagttagtcctaacgggcaacaatctcacagccctgccccccggtctccttgatgctctccctgcgctgagaaccgcccacctgggggccaacccctggcggtgtgattgtaggttggtccctctcagggcgtggttggctggtcggccagaacgtgccccttaccgagacctgcgctgtgtggccccacctgcccttcgtggtcgactgcttccatacctggctgaggatgagctgcgcgcagcttgcgcgcccggcccactgtgttggggggccttggccgcccaattagctctcctgggattagggttacttcatgcacttctgctggtcctgctgctgtgtaggctgcgcagactgcgggcccgcgcccgggcacgtgctgcagcaaggttgtccctcaccgacccactggtggcagaaagagcgggcactgatgagagttag

SEQ ID NO: 189638 - DNA, 1230 bp, synthetic construct
  misc_feature 1..1230: note = Description of Artificial Sequence: Synthetic coding sequence
  source 1..1230: mol_type = other DNA
atgatccccagccggcacaccatgctgcggttcctgcccgtgaacgccgcctcgtgtcctggcgacagaaggacaatgcttgttaacgtggccgcgggagtacgagttctgagggtgcctttacgagccggtgggtcagggagtctgtccgggcttcgcccacctgcgatcgtgtgctatctccccctgcaacgggcctccgcctccggactattcctagccagaccgcagcattgcggtcggtgtggaagggggagagggggtgccgccctttctctcggcagtcctgcttatgcctctaggtgtagggtatccagagccgccgtttttagtccatgggcacctgtctctctcgagagcggacgagcgcccggctgcagtctggggcgcccgggtctgcggggtgccttggtggtttggctgcaactcggggaaacctgggtgaggctcaggggtgatttccagccggcctgcggggtggtcagagtcgaaaggcttgcaggctaccgggatgccggacatcaagggctggacggtgcaggccctgctgtatgggtcttgcgcgacgtggcccaggttcccgcagacaggagcgcatattgcggggctagtctggccggtccaagaggggccctttctctgttgctgttacttctggctcccccctccaggcccgcagccggctgcccagcaccttgctcatgtgccggcaccctcgtggactgcgggcgacggggtttaacctgggcctccctacctactgcctttcccgtagacacaacagagctggtcctcacagggaacaatcttacagcgttgcctccaggtttactggatgcgttgccggctctgagaaccgcccatctaggggccaatccttggcgctgcgactgtcgcttagtgcctctgcgggcatggcttgccggccgccccgagagagctccataccgcgacctaagatgtgtcgccccccctgctctacgcggaaggttgctgccctatttagcagaggacgagctgagggccgcctgcgcacccggtccactgtgttggggggccctcgccgcccagctagctctgctcggacttggcctgctgcatgcgctgctgcttgtcctcctgctgtgtagactgaggagactgagggcccgggcccgggccagggctgccgcccgactgtcgttgactgaccccctcgttgccgagcgcgctggtaccgatgagtcgtag

SEQ ID NO: 189639 - DNA, 534 bp, synthetic construct
  misc_feature 1..534: note = Description of Artificial Sequence: Synthetic coding sequence
  source 1..534: mol_type = other DNA
atgcccgcctggggcgccctgttcctgctgtgggccaccgccgaggccaccaaggattgtccaagcccctgcacctgtcgagctctggaaaccatggggctctgggtagattgcaggggtcatggactgaccgcccttccggccctgcccgcgagaaccaggcacctgctgctggctaataattccctgcagagcgtgccgcctggggcctttgaccatctgcctcagctgcagaccctcgatgtcactcaaaacccctggcactgtgattgctccctgacttatctccgcctctggctcgaggaccgaacccccgaggccctactgcaagtccggtgcgcgtccccgagcctggcggcacatggaccattggggaggttaaccgggtatcagctgggctcctgtggctggcagctccaggcctcctgggtgcggccaggcgtcctatgggatgtggcactcgtggccgtagccgcccttgggctcgccctgttggccggcctcctgtgtgccactactgaggctcttgattag

SEQ ID NO: 189640 - DNA, 987 bp, synthetic construct
  misc_feature 1..987: note = Description of Artificial Sequence: Synthetic coding sequence
  source 1..987: mol_type = other DNA
atgaagcccgccatggagaccgccgccgaggagaacaccgagcagagtcaggaaagaaaagtaaactcccgggcagaaatggagatagggcgttaccactggatgtatcctggctctaaaaaccaccagtatcacccagtccctacactcggcgatagagcgagtccactaagttccccaggctgctttgaatgctgcatcaagtgccttggaggagttccctacgccagtctagtggcgacgatactgtgtttcagtggcgttgcgctcttctgcggctgtggccacgtggcattagccggaaccgttgcaatcctggagcagcatttcagcaccaacgccagcgatcatgcattgctctcggaagttatacagctgatgcaatacgtgatctatgggatcgcaagcttcttctttctctatggaattattctgcttgctgaagggttctatactactagcgcagtcaaggagctgcacggggagtttaaaaccaccgcttgcgggaggtgcatatctggaatgtttgtgtttcttacatatgtactcggcgtggcatggctcggtgtcttcgggtttagtgccgtccccgtctttatgttctataacatctggagtacttgtgaagtgattaaaagccctcagaccaatggaaccacaggagtcgagcaaatttgcgtcgacatcaggcagtacgggatcattccatggaatgcctttcctggcaaaatctgcgggtccgctctcgaaaatatctgcaatacgaatgaattctatatgtcctaccacctgttcatcgttgcatgtgctggggctggcgcaactgtgatcgctctaatccacttcctcatgatcctgtcttcaaattgggcctatctgaaggacgcttccaaaatgcaagcttatcaggacattaaagccaaggaagaacaggaactgcaggacatccagagtagaagcaaggaacaactgaatagttatacatag

SEQ ID NO: 189641 - DNA, 918 bp, synthetic construct
  misc_feature 1..918: note = Description of Artificial Sequence: Synthetic coding sequence
  source 1..918: mol_type = other DNA
atgaagcccgccatggagaccgccgccgaggagaacaccgagcagagtcaggaacggaaggttaattctcgtgctgagatggagataggtaggtatcactggatgtatccaggcagcaaaaatcatcagtaccacccggtgcccaccctcggcgacagggccagcccactatcaagtccaggatgtttcgagtgttgcatcaagtgtttgggaggagtcccgtacgctagcctggtggcaacgatcttgtgcttctccggagtcgcacttttttgtggatgcggccacgttgcccttgcaggcacagtagcaatactcgagcagcatttttccaccaatgcatcagatcatgctctattgagcgaggtgatccagctaatgcagtacgtcatttacgggatcgctagtttcttcttcctgtatggaataattctgttagctgaaggattctatacgacaagcgcagttaaagaattacatggtgaattcaaaacgactgcttgcggtagatgcatctccggcatgttcgtattcctgacttacgtgctaggcgtggcatggctgggtgtgttcgggtttagtgctgtgccagtgtttatgttttataatatttggagcacgtgcgaagtgataaaaagcccacaaaccaatgggacaaccggggtggagcaaatctgcgttgacataagacagtatggcataattccatggaatgcctttcctggcaagatatgtggaagcgcccttgagaacatctgcaacaccaacgaattctacatgtcttatcacctcttcattgtggcctgcgcaggtgcgggcgcaactgtgatcgcccttttgatctacatgatggccactacctataattacgcagttctcaaattcaagtctcgagaagattgctgcaccaagttctag

SEQ ID NO: 189642 - DNA, 798 bp, synthetic construct
  misc_feature 1..798: note = Description of Artificial Sequence: Synthetic coding sequence
  source 1..798: mol_type = other DNA
atgaagcccgccatggagaccgccgccgaggagaacaccgagcagagccaggagcgtaaaggatgtttcgagtgttgtattaaatgtctggggggggtgccttacgcttccctcgtggcaactattctgtgcttctctggagtggcgcttttctgcgggtgcggccatgttgccttggctggcacggtagccatccttgaacagcacttttctaccaacgcatcagatcacgctttgctctcagaagtgatacagctaatgcagtacgttatctatgggattgcctccttcttttttctgtacggtattatccttctcgcagaggggttttatactacttccgcagtgaaagaattgcacggagaatttaaaactacagcctgcggtcgatgcatcagtggaatgtttgtctttctgacgtacgtgctcggggttgcttggctgggtgtgtttggctttagtgctgtgccggtgttcatgttctacaacatctggtcaacctgtgaggtcattaaatcaccacaaacaaatggcaccaccggtgtggaacagatctgtgtcgatattagacagtacggaatcattccctggaacgccttccctggtaaaatctgcggctctgccctggagaatatatgcaacaccaatgagttttacatgagttatcacctgttcattgtggcttgtgcaggagccggagctacagtgatagcattgctgatttatatgatggctactacgtacaattatgcggttcttaaattcaaatcccgggaggactgctgcactaaattctag

SEQ ID NO: 189643 - DNA, 540 bp, synthetic construct
  misc_feature 1..540: note = Description of Artificial Sequence: Synthetic coding sequence
  source 1..540: mol_type = other DNA
atgcagtacgtgatctacggcatcgccagcttcttcttcctgtacggtatcatcctgcttgccgagggcttttacacaacctccgccgtgaaggagttgcatggcgagtttaagaccacagcgtgtggccgttgtataagcggtatgtttgtgtttctgacctatgtcctgggcgtggcctggctgggtgtgttcggctttagtgccgtgccagtgtttatgttttacaacatatggagcacctgtgaggtgataaagagtccacagacaaatggaactactggagttgaacaaatatgtgtggacataaggcagtacggcataataccctggaatgcttttccaggaaaaatctgcggctcagccttggaaaatatctgtaatacaaatgaattttatatgtcttatcatctcttcattgtggcctgtgccggggcaggggcaacagtgattgccctcctcatatatatgatggcaacaacatacaattatgcggtgctgaagttcaagtcccgcgaagactgttgcacgaaattttag

SEQ ID NO: 189644 - DNA, 741 bp, synthetic construct
  misc_feature 1..741: note = Description of Artificial Sequence: Synthetic coding sequence
  source 1..741: mol_type = other DNA
atgggctgcttcgagtgctgcatcaagtgcctgggcggcgtgccctatgcctcacttgttgccaccatcctatgtttctccggggtggccttattctgtgggtgcggacatgtggccttggcagggactgtggcaattcttgagcagcacttctctaccaatgctagcgaccatgctctgctgagcgaagtcatccagctaatgcagtatgtgatttatggtatagcgagctttttcttcctctacggaattatcttactggcagagggcttctatacgacttcggcagtgaaggaattgcatggcgagtttaagacaaccgcttgcggtcgctgtatctctggcatgttcgtgttcctaacatatgtgctgggcgtagcttggctcggagtcttcgggttctctgccgtgccagtcttcatgttttacaatatctggtccacatgcgaggttataaaatcccctcagaccaatgggacaacaggcgtagagcaaatctgcgtggacattcgccaatacggtatcatcccatggaatgcctttcctggcaagatctgtggatccgcattggaaaatatctgcaataccaatgagttctacatgtcctaccacctattcatcgtcgcttgtgctggtgcaggggctacagtaattgcactgctgatatatatgatggctaccacatacaactatgccgtgcttaaattcaaaagtcgagaagattgctgtactaaattttag

SEQ ID NO: 189645 - DNA, 324 bp, synthetic construct
  misc_feature 1..324: note = Description of Artificial Sequence: Synthetic coding sequence
  source 1..324: mol_type = other DNA
atgaagcccgccatggagaccgccgccgaggagaacaccgagcagagccaagagagaaaaggatgtttcgagtgttgtatcaaatgcctcgggggagtcccatacgcctcgttggtcgccacgattctttgcttttccggcgtggcactcttctgtggctgtgggcacgttgccctagccggaacagtggccatcttagagcagcatttttctaccaatgccagcgatcacgctctcctgtccgaggtgatccagctgatgcagtatgttatctacggaatcgcaagcttcttctttctctatggcattatcctactcgcttag

SEQ ID NO: 189646 - DNA, 909 bp, synthetic construct
  misc_feature 1..909: note = Description of Artificial Sequence: Synthetic coding sequence
  source 1..909: mol_type = other DNA
atggagatcggccggtaccactggatgtaccccggcagcaagaaccaccagtaccaccctgtaccaactctaggtgatcgagcaagccccctcagcagccccggctgcttcgagtgctgcattaaatgcctgggtggcgtaccatatgctagtctcgtggctacgattctgtgctttagcggcgtggccctattctgtgggtgtggccacgtagccctcgcaggtactgtggccatcctcgagcagcatttttccaccaacgcatctgatcatgccctacttagcgaagtcattcaattgatgcagtatgtcatctacgggattgcgagctttttcttcctgtacggaatcatcctcctggccgaggggttctacaccaccagtgcagtcaaagaactacacggtgaattcaaaacaactgcctgcgggcggtgcatctcaggaatgtttgtttttctgacttacgtgttaggcgtagcctggctgggcgtttttggctttagcgctgtcccagtgttcatgttttacaatatctggagtacctgtgaggtcatcaagagcccacagactaatgggacaacaggggtggagcagatttgcgtagacatccggcagtatggaattataccgtggaatgctttccctggtaaaatctgtgggagcgccctggagaacatttgcaatactaacgagttttacatgtcctatcacttgttcattgtggcgtgcgctggcgcaggcgccactgtgatcgcattaatccactttctgatgatattatctagcaactgggcatacctgaaagacgcgagcaagatgcaagcctatcaggatataaaagccaaggaagaacaagagctgcaagacattcagagcagatcaaaagagcagctgaacagttatacatag

SEQ ID NO: 189647 - DNA, 1863 bp, synthetic construct
  misc_feature 1..1863: note = Description of Artificial Sequence: Synthetic coding sequence
  source 1..1863: mol_type = other DNA
atgagccccagccccaccgccctgttctgcctgggcctgtgcctgggccgcgttccagcccagtccggaccactcccaaaacctagcttacaagctctgccctcatccctggttcctctcgagaaaccagttaccttgagatgtcaagggccccccggagtggatctctatagactcgaaaaactgtcctcaagcagatatcaggaccaggcagtcctgttcattcccgcaatgaagcggagtcttgcaggtcggtatagatgttcttaccagaacggctcactgtggtctttaccaagtgaccagctggagcttgtagcaacaggagtgttcgccaaaccttccctctccgcacagcccggccccgccgtatcaagcggaggcgatgtgaccctgcagtgtcagactagatatggcttcgaccagttcgcactgtacaaggaaggagatcctgccccctacaagaatcccgagcgatggtatcgcgcaagtttccccatcatcaccgtcaccgctgctcacagcgggacctatagatgctattcattctcaagccgggacccctacctctggagcgcgccaagtgatcccctcgagctggtggttaccggtacctccgtcaccccctccaggttaccaactgaaccaccaagcccagtggccgaatttagcgaggccactgccgaactcactgtgagctttaccaacgaggtgtttactaccgaaacatctaggtccattacagctagccccaaggagagtgatagcccagccggggaatcctgtcctcctgtgttacaccaaggccagcccggccctgacatgcctcgtggctgcgatcctaataaccccggaggcgtgagtgggaggggcctagcacaacctgaagaggctcccgcagcccaggggcaaggatgcgccgaggcggcgtccgcgcctccagcaccaccagcggatcccgagatcaaacgcggatctggttggcgccctacagggtgcagccagccgcgtgttatgttcatgactgctgagcctcaagctcgtagctaccctcgggagggctcttggcatgggcgacggctcaaagattggcgggtgtggtcagtcgaggcgggcggacagcgcctccagctgtggaagagggggcatgcagcaagcagctggtgctccatcagagagccctttgggcagtgcttatcagtttgccttccactgtgcctgcgtgccccttcaatttgggacggacggaatctttggcgccctcatcctcctccttgcacactgtggatgacatggtacccagggtggaccacctattggccattgtccagcacaagtttaatctgggctcccgatggcagccttcggtttcccgctcttagggtcgactctgtcccctcctccgtgcagaatccacccgttctgccctttgggccgctgtgtagctgcctggtgtttccacgaaatagccacccccactcgatatcacactgtggactgacaaacttgctgagctccctacggaccggtctggcaggctctctaggcatgagcttcatattcctgtctgtaaagttggctaggtgcccactcccgttcacgctagaaaataagattagcctgtgtaatatggtaaaacctcacctgtaccaacagaacaaaaagacacagaagcttgctagatgtggcggcgcgagcctctacagccaacagctccgaggcctgcggtgggagaatggactatccctgggaggacgggggtgttccgagttacggtcccaccattgtactctggccagggtcaccaaacctgattttgtatcaaagaatactggtatgaatatgtccattacacttatatag

SEQ ID NO: 189648 - DNA, 966 bp, synthetic construct
  misc_feature 1..966: note = Description of Artificial Sequence: Synthetic coding sequence
  source 1..966: mol_type = other DNA
atgagccccagccccaccgccctgttctgcctgggcctgtgcctggggcgggtgcccgcccagtccgggcccctccccaagccgtctttgcaggcactcccatcgtctcttgtgccgctggagaaacccgtaacactccggtgccagggtcctcccggcgtggacctctatcgcctggagaagctgagctcatcaagataccaagatcaggctgttctgtttatccccgcaatgaagcgctccctggccgggaggtacagatgtagttaccagaacggctccctttggtccctgccttccgatcagctggagcttgtcgctaccggggtattcgcaaaaccaagtctgagcgcccaaccgggacctgcagtaagttccggaggagacgttacattgcaatgccagacgcgttatgggttcgatcagttcgcgctatacaaagagggtgatccagctccctacaagaatcccgagaggtggtacagagcctcctttcctatcatcacagtgaccgccgctcattctggtacttatcgttgttattcctttagcagcagggacccttacttatggtctgcaccctcggatccgctcgagctagtggtgaccgagtttagcgaagccacggctgaactgaccgtctccttcaccaatgaagtgttcactactgagacatctcgttctatcactgcaagtcccaaagagtctgattcgcccgccgggcccgcgcggcagtactacactaagggcaacttagttagaatctgcctgggcgctgtcattctcataattctcgctggatttttggccgaagactggcatagtcgtcggaagaggctgcggcaccggggtcgtgcagttcagaggcctctccctccactgcctccccttcctctgacaaggaagagcaatggaggccaggacggtggcaggcaggatgtgcactcccgaggcctttgcagctag

SEQ ID NO: 189649 - DNA, 1020 bp, synthetic construct
  misc_feature 1..1020: note = Description of Artificial Sequence: Synthetic coding sequence
  source 1..1020: mol_type = other DNA
atgagccccagccccaccgccctgttctgcctgggcctgtgcctgggtagagtacccgctcagagcggtccactgccaaaaccctcattacaggctctcccgtcgagcctggtgcctttagaaaagccggtcacactgcgctgccaagggcctccaggagtggacctctatcgtttggagaagctctctagctctaggtaccaagaccaggccgtcctctttattcccgccatgaaacgctccctagctggcaggtatcgatgctcctatcaaaatggcagcctatggagtcttcctagcgaccagctggaattggtcgcaacaggtgtattcgcgaaaccgagcctgtccgcccagcctggccccgcagtgtctagtggcggggatgttacactgcaatgccagacacgctatggattcgaccagttcgctctgtataaagagggcgatcctgccccctacaaaaacccagagagatggtacagggcatcgtttcctattattaccgtcaccgccgctcattcaggcacatatcggtgttactcattttctagtcgggatccttatctgtggtcggctccttctgatccgctagaattggtcgtcactggcacttctgtgacacccagtcgcctgccaacggaacctccctcgcctgtggcagagtttagtgaagccacagctgagctgaccgtatccttcactaacgaggtgtttacgacggagacttcaagatccatcaccgcttcccccaaagagtccgactctcccgcagggcctgcccgtcagtactatacaaaaggtaatctggtgcgcatctgtctcggcgccgtaatcttaattatcttggctgggttcctggcagaagactggcattcaaggcgtaagcggctgaggcacagaggccgtgcagtgcagcgtcctctgcctccattgcctcccctgcccctgacaagaaagtctaacggcggccaggacggtggcagacaggacgtgcacagtcggggactgtgctcctag

SEQ ID NO: 189650 - DNA, 1866 bp, synthetic construct
  misc_feature 1..1866: note = Description of Artificial Sequence: Synthetic coding sequence
  source 1..1866: mol_type = other DNA
atgggcctgctgagcgaccccgtgcggcggcgggccctggcccggctggtgttgcgcctgaacgctcccctctgtgtactctcctatgtggctggcattgcatggtttctggccctggtctttccgccacttacccaaagaacttacatgagtgagaacgcgatgggctctactatggttgaagagcagttcgcaggaggtgacagggcgagggctttcgcgagagacttcgccgcccatagaaaaaagtcaggagccctccccgtggcctggttggaaaggaccatgcgctccgtggggcttgaggtatacacacagagcttttcaagaaagctgcccttcccagatgaaactcatgaacgttatatggtatccggaacaaatgtgtacggaatccttagagctcccagggccgcgtcaactgagtccctcgttctcaccgtcccctgcggaagcgatagtaccaacagccaggccgttgggctcctgctcgcgctagcggcgcacttcagagggcaaatttactgggccaaagacatcgtgttcctggtcaccgaacacgatctgttgggcactgaagcttggctcgaggcctatcacgacgtgaatgtgactgggatgcagtcaagcccccttcagggaagagctggagctatccaagccgctgtggccctggagctgtctagtgatgtcgtgacctccttggatgtagctgttgaaggtcttaacgggcagctgcccaacctggatctactaaatctgttccagacattttgccagaagggcggactcctctgcacacttcaaggaaagttacagcccgaagattggacctcattggacggaccgctacaaggacttcaaacgctgctgctgatggtgcttcgccaggcgagtggtcggccacacggttcgcacgggcttttcttgcgctatcgggtcgaggccctgaccttgagggggatcaattcttttcggcagtacaagtacgacttagtagcggtcggtaaggcattggaagggatgtttcgcaaactgaatcatctgctggagagactccatcagagttttttcctgtaccttcttccgggcctgagccgttttgtgtctattgggctttacatgcctgccgtgggtttcctccttttggtgctgggtctaaaagccctggagctttggatgcaattacacgaggctggaatgggattggaagagcctggcggagcacccggaccctcagtcccacttcctcccagccagggcgtgggcctagcgtctctggtggctccactcttaatttcccaggctatgggtttggcgctgtacgttcttccggtcttgggacaacacgtagccactcagcacttccccgtagcagaggccgaggctgtagtcctgactctcctcgctatctacgccgctgggctcgcccttccacataacacacatcgggtggtgtctacccaggcccctgataggggatggatggcgctcaaactagtcgcgctcatctacctagcgttacagttagggtgtattgcccttactaatttctctctcggttttctactcgctaccaccatggtgcctacagccgctctggctaaaccgcatggccccagaaccttgtatgccgccttactggtactcacttcacccgccgctacacttctcggtagtctgtttctgtggcgagagctgcaggaagcgccactctctctggcggagggctggcagttgttcttagccgctctcgcacagggcgttctcgaacatcacacttatggcgccctgttgttccctttgctatcactgggcctgtacccctgttggctgttgttctggaacgtgctgttctggaagtag

SEQ ID NO: 189651 - DNA, 1686 bp, synthetic construct
  misc_feature 1..1686: note = Description of Artificial Sequence: Synthetic coding sequence
  source 1..1686: mol_type = other DNA
atgggcctgctgagcgaccccgtgcggcggcgggccctggcccggttggttttgcgtctgaatgctcccctttgggctttgcctgttgcttggctggaaagaaccatgagatcagtcgggcttgaagtgtatacacagtcattctcaagaaagctacctttccccgacgagactcacgaacggtatatggtgagtggcacaaatgtgtatggcatcctgagagcgcctagggctgcctcaacagaatcgctggtattaaccgtgccgtgcggtagcgattcaacgaatagccaggccgtgggcctcctcctggctctggctgcccactttcgggggcaaatttattgggccaaagacattgtgtttcttgtgacggagcatgatctgctcggcaccgaagcatggcttgaggcctaccacgacgtcaatgtcactggaatgcagagcagtccgctacagggcagggccggggctatacaggccgcagtcgctctcgaactgagcagcgacgtggttacaagtctggatgttgcagtggaaggtctgaatggtcagctccctaatttggacctgctgaatttatttcagaccttttgtcagaagggaggtctgctgtgtacgctccaaggcaaacttcagcccgaagattggacctccttagacgggccgcttcaggggctgcaaaccctgctcttgatggtactccggcaggccagcggacgcccgcacggctcccatgggctattccttcgatatcgagtggaggctctgacgctgaggggcataaattcatttcggcaatacaagtacgatttggttgctgtaggtaaggccctggaggggatgttccggaaactcaatcacttgctagagcgactccaccagagtttctttctgtacctcctaccaggcctgtcgcgctttgtctccatcggcctgtatatgccggcagtagggtttcttttactcgtgctcggcctgaaggcacttgagctgtggatgcagctgcacgaagccggaatgggcctggaggaaccaggaggggccccaggaccctccgtcccactcccgcctagtcagggggtggggctggcctctctcgtggcacccctccttatttcgcaagctatgggattagccttgtacgtccttcccgtcttggggcagcatgtggccacgcagcacttcccagtggcagaggcagaggccgtggtactgactcttctggctatctacgccgcggggctggcccttccccataacacacaccgcgtggtctcaacccaggctcctgatcgtgggtggatggcgctcaaactggtggcacttatttacttagccctgcagctgggatgtattgccctgactaacttttcgctcgggtttcttttggcaactactatggtacctaccgccgctctggccaaaccacatggaccccgaactttatatgcagctctgttagtcctgacttctcctgctgccacactactcggctcactgtttctctggagagagctccaggaagctccattaagtctcgccgagggatggcagctgttcttggccgccctcgctcagggggtattggagcatcatacctatggggccctcctattcccactcctgtcgctcgggctgtacccttgttggctattgttctggaacgtcctcttctggaaatag

SEQ ID NO: 189652 - DNA, 555 bp, synthetic construct
  misc_feature 1..555: note = Description of Artificial Sequence: Synthetic coding sequence
  source 1..555: mol_type = other DNA
atgaaggccctgggcgccgtgctgctggccctgctgctgtgcggcagaccgggcagagggcagacccagcaggaggaggaggaagaagacgaagatcacggtcccgatgactacgatgaagaagacgaagacgaagtagaagaagaggagaccaatcgactgcccggcggaagatccagagtccttttacgatgttacacttgcaagtcacttccccgtgacgagcgctgtaatctcactcagaactgttcccatggacagacgtgcaccactctgattgcccatgggaataccgagtcaggcctgctgacaacacactccacctggtgcactgactcttgtcaacctatcacgaaaacagtggagggaactcaggtgactatgacatgttgccaatcgagcctctgtaacgtgccgccatggcaatcctctcgcgtccaggatccgaccgggaagggcgccggcggcccccgggggtcctccgagaccgtgggcgcggcgctgctgctcaatctcctggctgggttgggcgcaatgggcgccagacgcccatag

SEQ ID NO: 189653 - DNA, 582 bp, synthetic construct
  misc_feature 1..582: note = Description of Artificial Sequence: Synthetic coding sequence
  source 1..582: mol_type = other DNA
atgggcaagcagaacagcaagctgcggcccgaggtgatgcaggacctgctcgagagcactgacttcactgaacacgagattcaagagtggtacaaaggattcctgcgcgactgcccgagtggtcatctgagtatggaagaattcaaaaagatctatgggaacttctttccgtatggcgacgcctctaaattcgccgagcatgtgtttaggacattcgatgctaacggtgacgggactattgatttccgggagtttattatcgccctgtccgtgacatctaggggtaaacttgaacaaaagctaaaatgggcgttctcaatgtacgaccttgacggaaacggttacattagtaaagccgaaatgctcgagatcgtccaagccatttacaagatggtgtcgagcgttatgaaaatgcctgaggacgaaagcactccagagaagaggacggagaagatcttcagacagatggatactaacagagatgggaagctgtctttggaagagttcatacgcggcgccaagtccgatccgtctatagtgagattacttcagtgtgatccatcgtccgcaggacagttctag

SEQ ID NO: 189654 - DNA, 756 bp, synthetic construct
  misc_feature 1..756: note = Description of Artificial Sequence: Synthetic coding sequence
  source 1..756: mol_type = other DNA
atgagcgcctacggcatgcccatgtacaagagcggcgacctggtgtttgccaagttaaagggctacgctcactggcctgcccgaatcgagcatatgacacagcccaatagatatcaagtcttcttcttcggaacgcatgagaccgcctttctttccccaaagcgtttattcccatacaaggagtgcaaggagaaatttggcaagcctaacaaacgccgcggattttccgccggcctgtgggaaatagaaaataaccccaccgtccaggcaagtgattgcccactcgcgagcgagaagggatctggggacggaccatggccggaacctgaagctgcagagggggatgaggataaaccgacccacgcaggagggggcggtgatgagctgggcaaaccagatgatgataaacctaccgaagaggagaagggccctctcaagagaagcgccggtgaccccccagaagatgcccctaagaggccaaaagaggctgctcctgatcaggaggaggaggccgaggctgagcgagctgcggaagccgaacgcgcagctgccgcagcagcagctacagccgtggatgaagagagtcctttcctggtggccgtcgagaacggctccgccccatctgaacccgggctggtctgtgaaccccctcagcccgaggaagaagaactccgcgaggaggaagttgccgacgaagaggcctctcaagaatggcacgctgaggctcccgggggaggtgacagagattcgctttag

SEQ ID NO: 189655 - DNA, 531 bp, synthetic construct
  misc_feature 1..531: note = Description of Artificial Sequence: Synthetic coding sequence
  source 1..531: mol_type = other DNA
atgagcgccttccggctgtggcccggcctgctgatcatgctgggcagtctgtgccaccgaggctccccatgtggccttagcacacacgtggaaatagggcaccgcgctctggagtttctacagctgcataatgggagggtgaactatagagaactactccttgaacatcaggacgcttatcaggctggcatcgttttccccgactgcttctatccctctatatgtaagggagggaagtttcacgacgttagtgagtccacccattggacgcccttcctgaatgcctctgtgcattacatcagagaaaactatccgctgccttgggaaaaagacaccgagaaacttgttgcgttccttttcggaatcacctcacatatggcagcagatgtgtcatggcattcccttggcctcgagcaggggttcttgcggaccatgggcgctatcgatttccacggatcgtattcagaggctcactccgctggggacttcggaactgtttatctacatcttttaaacttcctggttgtttag

SEQ ID NO: 189656 - DNA, 831 bp, synthetic construct
  misc_feature 1..831: note = Description of Artificial Sequence: Synthetic coding sequence
  source 1..831: mol_type = other DNA
atgaacagcaagcggatgctgctgctggtgctgttcgccttcagcctcatgttggtggaacggtatttcagaaaccatcaggtagaggaactacgcttaagcgattggttccaccccagaaagaggccagatgtgatcacgaagactgattggctcgcccccgtcctttgggaaggcactttcgacagaagggtactggagaaacactacaggagaaggaatattactgtcggcttggccgtgttcgcaaccgggcggtttgcggaagagtaccttcgcccctttctgcattctgccaacaaacattttatgacaggctaccgcgtgatcttttacattatggtagatgctttttttaagttacctgatatcgaaccttctccattgcggacgttcaaagccttcaaagtcgggaccgagcgttggtggttggacggaccgctggttcatgtaaagtcactcggcgaacacattgctagtcacatccaagacgaagtcgacttcttgttctctatggccgccaatcaagtctttcagaacgaattcggtgtggagacgcttggccccctagtcgcccagctgcacgcatggtggtactttcgaaatacaaagaacttcccctatgagcggcgccccactagtgctgcgtgtatcccctttggccaaggtgacttctactatggaaatctgatggtgggagggacgccccataatatcctggattttataaaggaatacctgaatggggtgatccatgacattaaaaatggactgaatagcacttatgaaaaacatctgaataaatacttttaccttaataagcctacatag

SEQ ID NO: 189657 - DNA, 2166 bp, synthetic construct
  misc_feature 1..2166: note = Description of Artificial Sequence: Synthetic coding sequence
  source 1..2166: mol_type = other DNA
atgctgccccggggccggccccgggccctgggcgccgccgccctgctcttgttgctgctgttgcttggatttcttctctttggcggtgatttaggatgtgagcggcgcgaacccggagggagggctggcgctcctggttgttttcccggacctctgatgcccagagtgcctccggatggaaggctccgacgagccgctgccctggacggcgatcctggcgctggccctggagaccacaatcggtctgactgcgggccccagcctccaccacctcctaagtgtgagcttctccacgtggctattgtgtgcgccgggcataatagttcacgcgacgttataacgcttgtgaaaagcatgctgttttatcgaaaaaacccccttcatctccacctcgtgaccgatgcagtggcccgcaatatcctggagacactgttccatacatggatggtgccagccgtacgcgtgagcttctaccacgctgatcagttaaagccacaagtttcctggatccccaacaagcactacagcggcctctacggcctcatgaagctggtgctgccatccgctttgcccgctgagctggcacgggtgatcgtgctggataccgacgtaactttcgctagtgatatctcggagctctgggcactgtttgcacattttagcgatacacaggccattgggctcgtcgagaaccagagcgactggtatctcgggaacctgtggaagaaccatcggccttggcccgcactggggcggggattcaacacaggtgtgatcctattgcggcttgatcggctcaggcaggccggttgggaacagatgtggaggttaactgccagacgtgagctactgtctcttcccgcaaccagtctggctgatcaggacatcttcaacgcagtgatcaaagaacaccctggcttagtgcagcgcctcccctgtgtttggaacgttcagctgagcgaccacacacttgctgagcgctgctactctgaggcctcagacctgaaagtgatccactggaactccccaaaaaaactcagggttaagaacaagcatgtagaatttttccgcaacttttatttaactttccttgaatacgacggcaatttgctgcgccgagagctgtttgtctgccctagccagcccccgccaggggccgaacaacttcagcaggcactagcccagttagacgaggaagatccctgcttcgaattcagacagcagcagctgaccgtgcaccgtgtgcatgtcaccttcttgccacacgaaccaccacctccgcggcctcacgacgttactctagtcgctcagctcagtatggaccggcttcaaatgctggaagcactgtgtcgccactggcctggccctatgtctcttgccttgtatcttaccgatgcagaagcacaacaatttctgcactttgtcgaagctagccctgtgctggcagcccgccaggacgtggcctaccacgtagtctatcgcgaaggtcctctgtacccagtgaaccagttaagaaacgttgctctcgcacaggcactaactccatacgtgttcctctcggatatagattttttgccagcttatagtttgtacgactatctgcgggcgtcaatcgagcagctgggactgggatcccgtcgtaaagcagctctggtcgtgccggcatttgaaacccttaggtatcgcttttccttcccccactctaaagttgagctgctggctctgctggatgccggcactctgtatactttccgctatcatgagtggccacgaggccacgcacccaccgattatgcacggtggcgtgaggctcaggcaccttaccgcgtgcaatgggccgccaactacgagccctatgtagtggtgccgcgcgactgtccacgctacgacccaaggttcgttggcttcgggtggaataaggtcgcccatattgtggagcttgacgcccaggaatatgagctactcgtactgcccgaagccttcactatccacttgccacatgcgccatccctggacataagccgtttcaggtcctctccaacttatcgagattgtctgcaggctctgaaggacgagtttcaccaagacctctctcgccaccatggggccgcggcgcttaagtatcttccagctctgcagcaacctcagtcacccgccaggggctag

SEQ ID NO: 189658 - DNA, 870 bp, synthetic construct
  misc_feature 1..870: note = Description of Artificial Sequence: Synthetic coding sequence
  source 1..870: mol_type = other DNA
atgtggcggctgaccgcccggcgggagctgctgagcctgcccgccactagcctggctgaccaggatatttttaacgcagttatcaaagagcatcccggacttgtgcaaaggctcccatgcgtgtggaacgtacagctgtccgaccatacactggctgagcgatgctatagcgaagcatctgatctaaaagtgatacattggaatagccccaaaaaactccgggtcaagaacaagcatgtcgagttcttccggaacttttacctcaccttcctggaatacgatgggaatcttctgcggcgcgagttattcgtgtgtccgtcacaaccaccccctggagcagagcagctgcagcaggcccttgcccagctagatgaggaggatccctgttttgagttccgccagcagcaattaaccgtgcatcgcgttcatgtcaccttcctcccccacgaaccgccgccaccacgcccccacgacgtaaccctggtcgctcagctctctatggatcgcctgcaaatgcttgaggccttatgccggcactggcccggaccgatgagtcttgctctgtatctcaccgatgccgaggctcagcaatttcttcatttcgtggaggcctcccccgtcctggccgctagacaggatgtagcttaccacgtggtatacagggagggcccactgtaccctgtaaaccagctgcggaatgtggctcttgcccaggccctgacaccgtatgtgttcctgtctgatattgattttctgcccgcctattccctttacgattacctgcgcgaggcccgggccgggttcaacagcagtagcacttgcggctgtgcccatccgtctcaccaggcaaggtggccgatggtggtgtag

SEQ ID NO: 189659 - DNA, 2166 bp, synthetic construct
  misc_feature 1..2166: note = Description of Artificial Sequence: Synthetic coding sequence
  source 1..2166: mol_type = other DNA
atgctgccccggggccggccccgggccctgggcgccgccgccctgttactcctccttttgttactcgggtttcttctgtttggaggggatctaggatgtgagaggcgcgaacccgggggaagagcaggggcgccaggctgttttcccggccccctgatgccacgagttccgcctgacggacgactccgccgtgcggctgctctggatggcgatcctggtgccggccccggtgatcacaacaggagtgactgtggaccacagccacccccaccgccaaagtgtgagctgttgcatgtagctattgtgtgtgccggacataactcctctagggatgttatcactttagtcaagagtatgttgttctacagaaagaatccacttcacctccacctcgtgaccgatgcagtggcccggaatattctggagaccctcttccatacgtggatggtgccagcagtgcgcgtgagcttctatcacgccgatcagctcaagccccaggtgagctggattccgaacaagcactattctggactctacggactcatgaagcttgtgttacctagtgctcttcctgcagagctggctagggtgatcgtgctcgacactgatgttacgttcgcctctgacatcagtgaactgtgggccctgttcgcacatttttcagatacccaagccatcggcctggtggaaaaccagtccgattggtatttgggaaatttatggaagaatcaccggccctggccggctctagggagaggctttaataccggggtgatccttctccgccttgatcgactgcgccaggccggctgggagcagatgtggagattgacagcgcgaagagagctgctgtcattacccgcaacatctctcgccgatcaggatatctttaatgcagtgattaaagagcatccaggcctggtgcaaagactgccctgtgtttggaatgtccagcttagtgatcatacgctcgctgagaggtgctactcagaggctagcgatctgaaagttatacattggaacagtccaaagaagctgcgagtcaagaacaaacatgtagagttcttcaggaacttttatctcaccttccttgaatatgatggcaacctgttgaggcgggaactgttcgtctgtccatcccaaccgcctcctggtgccgaacagctgcagcaagccctggcacagctggacgaagaagacccttgtttcgagtttaggcagcagcagctcaccgttcatagagtgcacgtcactttcctacctcacgagcccccaccccctaggccacacgacgtaaccctcgtcgcacaactgtccatggaccgactgcagatgttagaagccctgtgtcggcactggccgggaccgatgagtctggccctctacctgacagatgcagaggcccagcagttcctgcattttgtggaggcttcaccggtactagcagcccgtcaggatgttgcctaccacgtggtgtatagggaagggcctctctatccggttaaccagctacgcaatgtcgccctagcccaagctctgacgccttatgtgtttctgtccgacatcgacttccttcctgcgtattccctttatgattatctgcgtgcaagtatcgaacaactagggctgggctctagacgcaaagctgcgctcgttgtgccagcgttcgaaacgttaagatacaggttcagcttcccgcactctaaagtcgagctcctggctctcctggatgcaggaacgctatacacgtttagatatcacgaatggccacggggacatgctcccaccgattacgcccgatggcgcgaggcgcaagctccttatcgggtgcagtgggcggctaattatgaaccttacgtggttgtaccccgggactgtccaagatacgatcctcgctttgttgggtttgggtggaacaaggtggcacacatcgtggagctggacgctcaggaatatgagctcctcgtcttaccagaggcttttacaatccacctacctcacgctccttccctggatatatctcgctttcggtcctcaccgacatacagggactgtctgcaagcactaaaggacgagtttcaccaggacctctcacgccatcatggtgcggcagctctgaagtacttaccagctcttcaacagcctcaatcaccagcccggggctag

SEQ ID NO: 189660 - DNA, 2166 bp, synthetic construct
  misc_feature 1..2166: note = Description of Artificial Sequence: Synthetic coding sequence
  source 1..2166: mol_type = other DNA
atgctgccccggggccggccccgggccctgggcgccgccgccctgctgctgcttctcctcctactgggttttctcctcttcggtggagacctcggatgcgaaagacgcgagccaggcgggagagccggggcaccggggtgcttcccaggccctctgatgccacgtgtgcctcctgacggtcggttacgacgggcggctgctctggacggtgatccaggcgctggaccgggtgaccacaatcggtccgactgtggcccgcagccacctccacctcctaagtgcgagctcctccacgtggctatcgtttgcgctggacataactcatcacgagatgtgatcaccctggtcaaatctatgttgttttatcgaaaaaacccattgcacctgcacctggttacagatgccgtggccaggaacattctcgagacactgtttcacacatggatggtgcccgccgtcagagtgtctttttatcacgcagaccaactcaagcctcaggtaagctggattcccaataagcactattcaggactgtacgggctaatgaaacttgtcttacctagcgcgctgccggctgaactggcgcgcgtcattgtgctggatactgatgtgacttttgcatccgacatcagtgagttgtgggccttgtttgcccatttcagcgacacacaggctattggtttggtggagaaccagagtgactggtacctgggtaatctgtggaagaatcacagaccatggccagcactggggcggggctttaacaccggagtaattctgttgcggctagacaggctcagacaagcaggctgggagcagatgtggcggcttacagctagaagagaactcctgagcctgcctgccacatcgcttgccgatcaggacattttcaacgcggtgatcaaggaacaccctgggttagtgcagcggcttccttgcgtctggaatgttcagctctctgatcataccctggctgagaggtgctactctgaagcctcagatctgaaggtgatccattggaacagtccaaaaaagctccgagtcaagaacaagcacgtcgaatttttccggaatttttacctgacattcctagaatatgacggaaacctgctgaggcgggaacttttcgtatgcccctctcagcccccaccgggggccgagcaactgcagcaagcccttgcccaactagacgaggaagacccgtgtttcgaattccgacagcagcagctgactgtccacagagtgcatgtaactttcttgcctcacgagccacctccacctaggcctcatgacgttacgcttgttgcgcagttgtctatggaccggctgcagatgctggaggcgctctgtcggcactggccaggtcccatgagcctcgcattgtacttgacggacgccgaagcccagcagttcctgcattttgtggaagcctcccccgtgctcgccgcccgacaggacgtcgcctatcacgtggtctacagagaaggtcccctgtacccagtcaatcaactgcgcaacgtggctctggcccaggctttgacgccttacgttttcttatccgacattgattttctgcctgcttactctctatatgactaccttcgtgcatcaatagagcagttgggactcggctcgcgccgcaaggccgcccttgtggtgccagccttcgaaactctcagataccgtttcagtttcccccattcgaaggttgagctactcgcgctattggatgcagggaccctgtatacttttcgataccacgaatggccgcgagggcacgcccccactgattatgccaggtggcgcgaggcgcaggccccttatcgggttcagtgggctgccaactacgagccctacgtggtcgtgccgagggattgtccgcgatacgacccacgctttgttggatttggatggaataaggttgcccacatcgtcgaactcgacgctcaagaatatgaactcctggtcctcccggaggcattcaccatccacctacctcacgcaccgtctctcgatatttcacgctttcggagcagccccacataccgggactgtttacaggcccttaaggatgagttccaccaagacctgagccggcatcacggcgccgcagcgctcaagtacttacctgcactgcaacagcctcaaagccctgctcggggttag

SEQ ID NO: 189661 - DNA, 2073 bp, synthetic construct
  misc_feature 1..2073: note = Description of Artificial Sequence: Synthetic coding sequence
  source 1..2073: mol_type = other DNA
atgctgccccggggccggccccgggccctgggcgccgccgccctgcttttgctccttctcctcctcgggttccttctgtttgacgggaggctgcgtagggccgccgccctggacggcgaccctggggcaggacccggcgaccacaatcgctcggactgtggaccccagccaccccctcccccgaaatgtgaactcctgcatgtcgcgattgtctgtgccggtcacaattcatcaagagacgtgatcactctcgtgaaaagtatgttgttctatcgcaagaaccccctgcacttacatctggttacggacgcagtagcgagaaatatcttggagaccctgttccatacctggatggtccccgctgtcagagtgtccttctaccatgccgatcaattgaagccccaggtcagttggatccctaacaagcattactctgggttgtacggcttgatgaaattggtgcttccatccgccctgcccgccgaactcgcccgggtgattgtgctggatacagacgtaacattcgccagtgatatctctgagctgtgggcattattcgcgcattttagtgatacgcaggccatcggtcttgtggagaatcagtcagattggtatctcggcaacctgtggaagaaccaccgcccctggcctgccctgggtaggggtttcaacactggggtgattctgctgcgactggatcggttgcgccaggccgggtgggagcagatgtggaggctgaccgctaggagggaactgctctcacttcccgcaacaagtctggccgatcaggatatatttaatgctgtgatcaaggagcacccaggccttgttcagagactgccatgcgtgtggaatgtccagctgagtgaccacactttggccgaacgttgttattccgaagcctccgatttgaaagtgatccactggaactcccccaagaagttaagagttaagaacaagcacgtggaattcttcaggaacttttaccttaccttcctggagtatgatggaaatctgcttagacgtgaattgttcgtgtgcccaagtcaacctccgccgggagctgagcagctgcaacaggccctggcacagctggacgaggaagatccctgttttgaatttagacagcagcagcttaccgtgcacagagttcatgttacatttctgcctcatgaacccccacctcctcgtccccacgacgtaacacttgttgctcagctgagtatggatcgccttcagatgctcgaggccctctgccggcactggcccggcccaatgtctttggctctctacctcactgatgcagaagcgcagcagtttttgcattttgtagaggctagccctgtattggccgcgagacaagatgtagcctatcacgtggtgtaccgtgagggccctctgtaccctgtgaaccagcttcggaatgtagccctggctcaggcactcaccccatatgtgttcttgtccgacatcgactttcttcccgcttactcactgtacgattatctgcgcgccagtatcgaacagctcgggctgggctcccgccggaaggccgccctggtcgtgcccgccttcgagactctgcggtataggttctccttcccacactccaaagtcgagctgctcgctctactggatgcaggcactctgtatacattcagatatcatgagtggcctagaggccatgccccgacagattatgcccggtggcgggaggcacaggcaccctacagggtgcagtgggctgccaattacgaaccgtacgtcgtggtacctagagattgcccccgctacgatcccagatttgtgggattcgggtggaacaaggtcgcacacatcgttgaactcgatgcccaggagtacgagctgcttgtgctccccgaggcttttactattcacctaccccatgcccccagtctggatatctctaggttccgcagcagtcccacttatagagattgtctccaagccctgaaggacgagtttcatcaggatctctcaagacaccacggggctgccgccttgaagtatttgcccgctttgcagcagccccagagtccagcgcgcgggtag

SEQ ID NO: 189662 - DNA, 1122 bp, synthetic construct
  misc_feature 1..1122: note = Description of Artificial Sequence: Synthetic coding sequence
  source 1..1122: mol_type = other DNA
atgagcatcctgatcatcgaggccttctacggcggcagccacaagcaactggtggacctccttcaggaggaattgggagattgcgtggtgtataccttgccagccaagaaatggcactggagggcaagaaccagcgctctctacttcagtcaaactattccaatatccgagcactaccggaccttgttcgctagctctgtgctgaatttgacagaactggccgctctgaggcctgatcttgggaaattgaagaagattctatatttccacgagaaccagctgatctatcctgtgaagaagtgccaggagcgcgacttccagtatggatataaccagatcctatcctgcctcgtggctgatgtggttgttttcaattccgtgtttaatatggaatcttttctcacatctatgggtaaatttatgaagctgatccccgatcaccgtcctaaggacctggagtctatcattaggcctaagtgccaagtgatttatttccccatacggtttccagatgtttccagattcatgccaaagcacaaaacaacccacctgaaaaaaatgctgggactcaagggcaacggcggcgcggtgctgagcatggcgttgccctttcaacccgaacagcgagactcagaagacctgctcaaaaactttaacagtgaatgtgatacccactgcgggttagatacagcgcggcaggagtatctagggaactccttgcgccaagagagcgacctgaagaagtcaaccagtagcgacaacagctccagccaccacggggaaaacaaacagaatctgacagtggacccatgtgatatcctgggaggagtcgacaatcagcaaagactgcttcatattgtgtggccccacaggtggttagaggctgtatactgcggctgctatccgttgtgtcctaaggatctggtctaccccgaaatctttcccgcggaatacctctactcgactccagagcagctcagcaaacgtttgcagaatttttgcaagcgacccgacatcatcagaaagcatctctacaaaggcgaaatcgcccccttctcctgggcagccctgcacgggaagtttcgttcccttctgaccacagaaccacgcgaggacctctag

SEQ ID NO: 189663 - DNA, 1377 bp, synthetic construct
  misc_feature 1..1377: note = Description of Artificial Sequence: Synthetic coding sequence
  source 1..1377: mol_type = other DNA
atgagcatcctgatcatcgaggccttctacggcggcagccacaagcagttggttgatttgctgcaagaagagttgggggactgcgtggtatatacactcccagctaaaaaatggcattggagagctcgcacctcggccttatactttagccagacaatccccatatcagagcattatcgtacgctcttcgccagctcagttctgaatttgacagagttagccgctttacggcctgatttggggaagttaaagaagatactgtacttccatgaaaatcagctgatctaccccgtcaaaaagtgtcaggagcgtgatttccagtacggctacaatcaaattctgtcatgcctggtggcggacgtggtcgtttttaacagtgtctttaatatggagtcatttctgacatccatggggaagttcatgaagctcattcctgaccatagaccgaaagatctcgagtctattattcggcccaagtgccaggtaatatactttcctatcaggtttcccgatgtgagtaggttcatgcctaagcacaagaccacccatctcaagaagatgcttggacttaaaggcaatggcggagctgtgctgagcatggccctccccttccagccggagcaacgcgacagtgaagaccttctcaagaattttaacagtgagtgtgacacacattgtggcctggatactgccagacaggagtacctcggcaattcgctgcgtcaggagagtgaccttaaaaaaagcacctcatccgataattcatcctcgcaccacggcgagaataaacagaacttgacagtcgacccctgtgacatcctgggtggggtagataatcaacagcgtttgctccatattgtatggccccaccgctgggagcatgataaagacccagagtcattctttaaggtgttaatgcacctgaaggatctgggacttaattttcacgtctctgtcctcggcgagactttcacagatgtgccggacattttcagcgaggcaaaaaaggcactgggctcctccgtgctgcattggggatatctgccatctaaagacgactatttccaggtcctgtgcatggcagacgtagtgatctcgactgccaagcacgaattttttggcgttgcaatgctcgaagctgtctactgtgggtgttacccactgtgtccaaaagacttagtctatcccgaaattttccctgcagaatatctgtacagtacccccgagcaattgtccaaacgccttcagaatttttgtaagagaccagatatcatacggaaacatctgtacaaaggtgaaatcgccccattctcctgggccgcactccacggcaaattccgatctttactaacaacggaaccaagagaggatttgtag

SEQ ID NO: 189664 - DNA, 1122 bp, synthetic construct
  misc_feature 1..1122: note = Description of Artificial Sequence: Synthetic coding sequence
  source 1..1122: mol_type = other DNA
atgagcatcctgatcatcgaggccttctacggcggcagccacaagcagctggtggacctcttgcaggaagaattgggcgactgtgtggtatatacacttccagccaagaagtggcattggagggctcgcacgtctgccctgtatttcagtcagactatacctattagtgagcactaccggacactgtttgctagtagtgtgctcaatctgactgagctggccgcactgagaccagacttgggcaaattaaaaaaaatcctgtatttccatgagaaccagctgatatatccagttaagaagtgtcaggagagagatttccagtacggttacaaccaaattctttcttgcctggtggccgatgtcgtcgtcttcaattctgtatttaatatggaaagctttttaacgagtatgggcaaatttatgaaactcatacccgaccataggcctaaagatttggaatcgatcatcagaccgaaatgccaggtgatatatttccctatccggtttccagatgtttcccgattcatgcccaagcataagacaacacatctgaaaaagatgctcgggttgaaagggaacgggggtgcagtgttatcgatggctctacctttccagcccgaacagagagattctgaggatctgcttaagaatttcaacagcgagtgcgatacccactgcgggctggatactgcacgccaggaatacctcggaaactcactccgacaagaaagcgaccttaaaaaaagcaccagcagcgataattcatcctctcaccatggggaaaacaaacagaatctcacagttgacccctgcgacatcctgggcggggtggacaatcaacagcgcttgcttcatatcgtctggccgcacaggtggctggaagccgtctattgtggctgctacccactctgcccgaaggatctcgtttacccagaaattttccccgctgagtatctttattctactcctgaacagttaagtaagagattgcagaacttctgtaagcgcccagacatcattcggaaacacctttataagggcgagatagcaccgttttcctgggctgcactgcatgggaagtttagatcactgcttacaaccgagcctagggaggacttatag

SEQ ID NO: 189665 - DNA, 1377 bp, synthetic construct
  misc_feature 1..1377: note = Description of Artificial Sequence: Synthetic coding sequence
  source 1..1377: mol_type = other DNA
atgagcatcctgatcatcgaggccttctacggcggcagccacaagcagctggtcgatctcctccaggaagaattgggagactgcgtggtctacacacttccagctaaaaagtggcactggagagcccgcaccagtgccttatatttttctcagaccatccctatctccgagcactaccggaccctgtttgccagttccgttctgaacctgacagagttagccgctctgcgccctgatctgggcaaactcaagaaaatcctttactttcatgaaaatcagttgatatatccggtaaagaaatgccaagaaagagatttccagtatgggtataaccagatcctgtcttgtttggtagctgacgtggttgtgttcaattccgtctttaacatggagagctttttaacctcgatgggaaaattcatgaagctgatcccggaccaccgccccaaagacttggagagtataatccgaccaaaatgtcaggtgatctacttcccaatacgcttcccagatgtgtctagattcatgccgaagcataagacaacacacctgaaaaagatgctaggtttgaagggaaacggaggagccgtgctctccatggcccttccctttcagccagaacagagagacagcgaggacttactgaagaatttcaactctgagtgcgacacccactgtgggctggacacggcccgccaggaatatctggggaatagcctcaggcaggagagcgacctgaagaaatctacatcgtctgacaattccagctctcaccacggtgaaaacaagcagaatcttaccgtggatccatgcgacatccttggcggggttgacaatcagcagaggctgctgcatatcgtgtggccccatcggtgggagcacgacaaggacccagagtcgttctttaaagtcctaatgcaccttaaggatctgggtctcaattttcacgtgtctgtgctgggcgagactttcacagacgttcctgatattttcagtgaggctaagaaggccttgggcagttctgtgttacattggggttaccttccctcaaaggacgactatttccaggtgttgtgtatggctgacgtcgttatcagcactgctaagcacgagttctttggcgtggcgatgttggaagcggtgtattgcggatgttatccactttgccccaaagaccttgtttatcctgagatatttcccgccgaatacctatactccaccccagaacagctatccaaaagactacagaacttctgtaaaagaccggatattattcgcaaacacctctataagggggagatcgctccgttctcctgggctgcactgcacggtaagtttcgctccttactgacgacggagcctcgggaggacctgtag

SEQ ID NO: 189666 - DNA, 1377 bp, synthetic construct
  misc_feature 1..1377: note = Description of Artificial Sequence: Synthetic coding sequence
  source 1..1377: mol_type = other DNA
atgagcatcctgatcatcgaggccttctacggcggcagccacaagcagctggtagatttgctccaggaagagctaggcgactgtgtagtttatacactgcccgcaaagaagtggcactggcgagcacgcacctccgcactatatttctcccaaactatccccatctcggaacactaccgaacgctctttgcctcgtccgttctgaatctgacagaacttgctgctctgaggcctgaccttggcaaactcaaaaagatattgtattttcacgaaaatcagctgatctatcccgtgaagaaatgccaggaacgtgatttccagtatggatacaatcagatcctctcttgtctggtggcagatgtggtggttttcaatagcgtgttcaacatggagtccttcctcacttctatgggtaagttcatgaagctgatccccgaccaccggcctaaggatcttgaatcaattattcggcccaaatgccaggtgatctatttcccgatacgatttcccgacgttagcagatttatgccaaaacacaagaccactcatctaaagaaaatgcttggactcaaagggaacgggggcgccgtgctatcaatggcgcttccattccaacccgagcagcgggattctgaagaccttttaaaaaatttcaattccgaatgcgatacccactgtggcttagataccgcaaggcaggaataccttgggaatagcctgcgccaggaaagcgatcttaaaaagagtacgtccagtgataacagtagcagtcaccatggggaaaacaaacagaacctgacggtcgatccatgtgatattctcggcggggttgacaatcagcaaaggttgctacacatcgtatggccccatcgatgggagcacgacaaggacccggaaagttttttcaaagtgctgatgcatctcaaggacttaggcctcaactttcacgtgtcggttttgggagagacgtttaccgatgtccctgatattttctccgaggccaaaaaagctttgggaagtagtgtactccattggggctaccttccttcaaaagatgactactttcaggtgttgtgcatggccgacgtcgtgatatcgaccgcgaaacatgaatttttcggcgttgcaatgcttgaagccgtctattgcggatgttatcccctttgccccaaggacctcgtgtaccccgaaattttcccagccgaatacttgtatagcacacctgaacagttgtctaagcgccttcagaacttttgtaagcggccagacattatacgcaagcacttgtataagggcgaaatcgctccatttagctgggcggccctgcacgggaaattcagaagcctgctgacaacagagccgcgagaagatctttag

SEQ ID NO: 189667 - DNA, 300 bp, synthetic construct
  misc_feature 1..300: note = Description of Artificial Sequence: Synthetic coding sequence
  source 1..300: mol_type = other DNA
atgagcatcctgatcatcgaggccttctacggcggcagccacaagcagctggtagaccttctgcaggaagaactcggtgattgcgtagtgtacacactgccagcgaaaaagtggcattggcgggcccgaacctcagccctctacttcagccagacaatccccatatcggagcactatagaacactgtttgcgtcgagtgtcctcaatctgactgaactcgctgctttgcggcccgaccttggaaaactgaaaaagattctatacttccacgaaaaccagttgatataccccgttaagtag

SEQ ID NO: 189668 - DNA, 522 bp, synthetic construct
  misc_feature 1..522: note = Description of Artificial Sequence: Synthetic coding sequence
  source 1..522: mol_type = other DNA
atgagcatcctgatcatcgaggccttctacggcggcagccacaagcaactggtagatctcctgcaggaagagcttggcgattgcgtggtgtacaccctgccagctaaaaaatggcactggcgggcgcgcacctccgctttatacttctctcaaacgattccgatctctgaacattataggacgctatttgcctcttcagtgctgaatttgacggagcttgccgccctgagaccggacctcggcaaattgaagaaaatcttgtactttcatgaaaaccagttaatctaccctgttaaaaaatgtcaggagagggatttccagtacggctacaatcagatcctctcctgcctcgtcgcggatgtggtggtgttcaactccgtgttcaacatggagtcctttttaacatctatggggaagtttatgaaactgatacctgatcatcgccccaaagacctggagtccataatccgcccaaagtgccaggttatttacttccccatcaggttcccagacgtgtcatag

SEQ ID NO: 189669 - DNA, 1377 bp, synthetic construct
  misc_feature 1..1377: note = Description of Artificial Sequence: Synthetic coding sequence
  source 1..1377: mol_type = other DNA
atgagcatcctgatcatcgaggccttctacggcggcagccacaagcagctggtagatctgttacaggaggagctgggggactgcgtggtgtacactctgccagctaaaaaatggcactggcgcgcaaggacaagcgccctgtatttctcacagaccattccaatcagcgaacactataggacactgttcgcaagctccgtgctgaatcttactgagctcgcagctctcaggcctgaccttgggaagctcaagaagattctctatttccatgagaaccaattgatctaccctgtaaagaaatgtcaggagagggacttccagtacggttacaatcagattctctcttgcctggtcgccgatgtggtggtcttcaactccgtatttaatatggaatccttcctaacgtctatgggtaaatttatgaaactgatacccgatcacaggcccaaggatctggagtccatcattaggccgaagtgccaggtgatctatttccccattagattccctgatgtcagcagattcatgcctaaacacaagactacacatcttaagaagatgttgggccttaagggcaatggcggcgccgtgctgagcatggcactcccttttcagcctgagcagcgagatagcgaagatcttctgaagaactttaactcagagtgcgatacacactgtggtcttgacactgcgcgccaggaatacttgggcaactctctgcggcaggaaagcgatctgaagaaaagcacaagcagtgataacagctcctcacaccacggcgagaataaacagaacttaactgtcgacccttgtgatatcctgggaggagtggacaaccaacagaggctactccatatcgtttggccccaccggtgggaacatgataaggaccccgaatccttctttaaggttctcatgcacctcaaggacctggggttaaacttccacgtatccgttttgggcgaaactttcacggatgtccctgatattttttcagaagccaagaaggcactgggctcatcggtgcttcattgggggtatctcccctcaaaggacgattacttccaggttctttgcatggctgacgtggttataagcacagcaaaacacgagttttttggcgtcgcgatgctcgaagctgtgtattgtggatgctacccattatgccccaaggatttagtctatccagagattttccctgcagagtatttatactcaacccccgagcagcttagcaaaagattgcaaaacttttgcaagcggcccgacattattaggaaacacctgtacaaaggggaaatcgctccgttctcgtgggccgccctacacggaaagtttcggagcctgttgaccactgagccccgggaagatctctag

SEQ ID NO: 189670 - DNA, 2220 bp, synthetic construct
  misc_feature 1..2220: note = Description of Artificial Sequence: Synthetic coding sequence
  source 1..2220: mol_type = other DNA
atgcccagcccccggcccgtgctgctgcggggcgcccgggccgccctgctgctgctcttgccccccagactccttgcccgcccctcgctgctattgaggcggtctctgtctgcggcctcttgtccgcccatctccctgcccgcggctgcctctcggtcttcaatggatggtgccggcgcagaggaggtgttggcacccctgaggttagccgtcaggcaacagggcgatctcgtgagaaaattaaaggaggataaagccccacaggtggatgtagataaggctgttgccgagttgaaggcgaggaagcgcgtgttggaagcaaaggaacttgctctgcagcccaaagatgacatcgtggatcgcgctaaaatggaagatacacttaaacgtagattcttttacgaccaagcttttgcgatatatggtggtgtttcaggcctctacgattttggtccagtggggtgtgcactgaaaaacaacatcattcagacctggcggcagcattttatacaggaagagcagatcctggaaatcgattgcacaatgctgactccagaacccgttttaaaaacgtcgggtcacgtggacaagtttgctgacttcatggtcaaggatgtgaaaaacggagagtgttttcgagccgaccatctcttgaaagctcatctgcagaagctgatgagcgacaagaaatgttctgtcgagaagaagagcgagatggaatcagtcctcgctcagttagacaattatggtcaacaggagttggccgatctgttcgtgaattacaatgtaaaatcgcccattaccggcaacgatctgagtccaccagtttcctttaacctcatgttcaaaacatttatcggtccgggagggaatatgccaggatacctgcgccctgagaccgcacagggaatttttctgaattttaaaagactgttggaatttaatcagggcaaattgccatttgctgccgcccagataggtaacagcttccgcaatgagatcagcccgaggagtggtttaataagagttcgggagtttaccatggccgagattgaacacttcgtggatccctcggaaaaagatcaccctaagttccagaacgtagccgatttgcatctctacctgtacagcgcaaaggcccaggtgagcggtcagtccgcaagaaagatgcggttgggggatgctgtggaacagggtgtcattaataataccgtgttgggatatttcattgggagaatctacttgtacctaactaaggtgggaataagccccgataagctgcggtttcgccagcatatggaaaatgagatggctcattacgcgtgtgactgttgggacgccgagtccaagacctcgtatgggtggattgagatcgtcggatgcgctgaccgttcttgctatgacctttcatgtcatgcacgtgccaccaaggtccctctcgtggcagaaaaaccactgaaagagcccaagacagttaatgtggtgcaatttgaacccagcaagggcgcaatagggaaagcttacaagaaagacgcgaagttagtaatggagtacttggcaatctgtgacgagtgttacatcacagaaatggaaatgctgttgaacgagaaaggagagtttaccatcgagacagagggcaaaacctttcagcttacaaaggatatgattaatgtaaagcgatttcaaaagactctttatgttgaagaggtcgtaccaaatgtgattgaaccgtcattcggactgggacgtattatgtacactgtgtttgagcacacattccacgtcagagagggcgatgaacagcgcaccttcttctcctttcctgcagttgtcgcccctttcaagtgttctgtgctgcccctgagccagaatcaggaatttatgccattcgttaaagagctcagtgaggccctgacccgacacggagtgtctcataaagtggatgacagtagtgggagtattgggcgtaggtatgcaagaaccgatgagatcggcgtggcctttggggtgaccattgattttgatactgttaacaaaacaccgcacactgccacattgagagatagagattccatgcgccagattagagccgaaatatccgagcttccttccatcgtacaggaccttgccaacggaaacattacttgggcagatgtagaagcccgatacccattgttcgaaggccaggaaacagggaagaaggagaccatagaggagtag

SEQ ID NO: 189671 - DNA, 555 bp, synthetic construct
  misc_feature 1..555: note = Description of Artificial Sequence: Synthetic coding sequence
  source 1..555: mol_type = other DNA
atggccgagccccagccccccagcggcggcctgaccgacgaggccgccctgtcctgctgctctgatgctgatccatcaactaaggactttctgctgcagcaaacgatgctacgcgtgaaggaccctaagaagtccctggatttttacacccgggtgctggggatgaccttgattcagaagtgtgacttccccattatgaagttttccctctactttctggcctacgaagacaagaacgatatccctaaagagaaagacgagaagatagcctgggcattatccagaaaggccactctcgaattgacgcataactggggaaccgaagatgatgagacccagtcgtatcacaacggtaactccgatccaagagggttcggtcatatcggcatcgccgtgcctgacgtttatagcgcctgtaaaaggtttgaggaacttggcgtgaagttcgtaaaaaaacccgatgacgggaagatgaaagggctggctttcattcaggacccagacggctactggattgagatcctgaatcctaacaaaatggccacccttatgtag

SEQ ID NO: 189672 - DNA, 987 bp, synthetic construct
  misc_feature 1..987: note = Description of Artificial Sequence: Synthetic coding sequence
  source 1..987: mol_type = other DNA
atgcggcccgtgcggctgatgaaggtgttcgtgacccggcggatcccagctgaggggcgggttgccctggctcgggctgcagactgcgaggtggagcagtgggacagtgatgaaccaatccctgccaaggagctggaaagaggcgtagctggagcccacgggctgctgtgtctgctctccgaccatgtggataagcgaatactggacgccgccggagctaacctgaaggtgatctcaaccatgagcgtcggcattgatcatctcgcccttgatgaaataaagaaacgggggatacgggttgggtatactcctgacgtgctaaccgacactaccgccgagctggcagtgagtctgcttcttaccacttgtcgacggttacccgaggcaatagaggaggtcaaaaacgggggctggacaagctggaaacccctctggctgtgtggatacggattaacgcagagcacagtgggcatcattggattggggagaatcgggcaggcaatcgcccggaggcttaagccttttggcgtgcagcgttttttgtacactgggcggcaacctagaccagaagaagccgccgaatttcaggctgagtttgtgagtacaccggagctagccgcgcaaagcgacttcatcgtcgtggcctgctccttgacccccgcaaccgagggcctgtgcaataaagatttcttccaaaagatgaaagagaccgctgtgtttatcaacatcagcaggggtgatgtcgtgaatcaggatgacctttaccaggctctcgcttccgggaaaatagccgcagccgggctggacgttacctcccctgagcctcttcctaccaatcacccgctactgaccttaaaaaattgtgtgatcctaccccacattggatccgccactcacaggacacgcaataccatgagcctattagccgcgaataatctccttgcaggcctgaggggcgaaccaatgccaagcgaactcaaactgtag

SEQ ID NO: 189673 - DNA, 1188 bp, synthetic construct
  misc_feature 1..1188: note = Description of Artificial Sequence: Synthetic coding sequence
  source 1..1188: mol_type = other DNA
atgcggcccgtgcggctgatgaaggtgttcgtgacccggcggatcccagctgagggtagagttgctctggccagagcggctgactgtgaagtcgaacagtgggatagtgatgaacccatccccgccaaggaacttgagcggggggttgccggggcccacggcctgctttgtctgctgagcgaccatgtggacaaaagaatcctggatgccgcaggtgccaacctgaaagtgatatccacaatgtcagtcggtatcgaccaccttgctcttgacgaaatcaagaaacggggcattcgcgtcggctataccccagatgtgctgaccgacacgacggctgagcttgccgtgagccttctgctgaccacatgtcgtagacttccagaagctatcgaggaagtgaaaaacggtggttggacgagctggaagccactctggctgtgtggttacggccttacacaatcgactgtcggcattattggcctgggcaggatcggccaggcgattgccagacgtctcaagccttttggtgtccagagattcctctataccggacgtcagcccaggccggaagaagccgctgagttccaagcagagttcgtcagtacaccagagctggcggctcaatctgatttcattgtggtcgcatgctctttgacaccagctaccgagggtctatgcaataaggacttctttcagaaaatgaaggaaacggcagtctttatcaacatctccaggtatcctcgcgcaacgctcccttcaaagcccggcgaagaacccagcccactcctgccttcaggagactttctgcctcgaggcttactagtgcgtccccaagccgaactagccggattccacaagccaaacaaccaattgagaaattcttgggaatatacacgtccaccctacagggaggaagaacccagtgaatgggcatggccagtgtgtttttccgccgtcgctcctacaaggagaggactggctcactccagcgtcgcctccggtagcgtccctagagagcccctccaggctcattaccccccccctcagcgcgccgggttggaggatctgaaggggccgttggaagcagcatcacacacagccgagcctggcttcgtgtggctttggttcagcgatacactgaatctgatgctgttagggggacaaaccctcaaattaacctggtcctag

SEQ ID NO: 189674 - DNA, 759 bp, synthetic construct
  misc_feature 1..759: note = Description of Artificial Sequence: Synthetic coding sequence
  source 1..759: mol_type = other DNA
atgctgggcggcgtgcccaccctgtgcggcaccggcaacgagacctggaccctactagcactcggtcaagctatcgctcgacggctgaagcccttcggcgtgcagaggtttttgtacacaggacgacaaccacgtccggaggaagccgccgagttccaggccgaatttgtctctaccccagaacttgccgcccagtctgactttattgtggtggcgtgctccctaactccagctaccgagggcctgtgcaacaaggacttcttccagaaaatgaaagagaccgccgtttttatcaacatctctcgttacccgcgtgccacattacccagcaagccaggcgaggagccttcccctcttctcccaagcggggactttcttcctagaggtctcttggttagacctcaagctgaactggcaggtttccataagcccaataatcaattgcggaattcctgggagtatactcggcccccctaccgggaagaggagccctctgagtgggcttggccggtctgtttttcagcagttgctcctacaagaaggggattggctcactcaagtgtggcttctgggagcgtgccccgcgaacctctgcaagcgcattatcccccccctcagcgtgcagggcttgaagacctgaagggacctctggaagccgcctctcatactgcagagcctggtttcgtttggttgtggtttagtgatacactgaatctcatgctcctaggtgggcagacgcttaagctcacgtggtcctag

SEQ ID NO: 189675 - DNA, 1677 bp, synthetic construct
  misc_feature 1..1677: note = Description of Artificial Sequence: Synthetic coding sequence
  source 1..1677: mol_type = other DNA
atggagctgcgggcccggggctggtggctgctgtgcgccgccgccgctctggtggcttgcgctagaggcgaccccgcttcgaaatcccgaagctgcggggaagtgagacagatttacggcgcaaagggtttctccctgtccgatgtccctcaggctgagatcagcggcgaacacctgcggatttgcccccagggatacacttgttgcaccagcgagatggaagaaaacctggccaacagatcccatgctgagttagaaacagccctgagggattctagcagagttctccaagctatgttagccacacagctacggagctttgacgaccactttcagcatctcctgaacgactctgaaaggacccttcaagccactttcccaggggcattcggggagctctacacacagaatgcacgcgcatttcgcgatctgtattctgaactgcgcctatattatagaggagccaacctccacctcgaggagacacttgcagaattttgggcacgactgttagaacgcctctttaagcagctgcatcctcaattactcctgcctgatgactatttagactgcctgggtaaacaggcggaagccttgcggcctttcggggaagccccccgcgagctgaggctgagggccactcgggcattcgttgccgctcgcagcttcgtccaaggattaggggtcgcatccgacgttgtgaggaaagtggctcaggtccctctcggtccagagtgttcgcgcgccgtcatgaagcttgtttactgcgcacactgcctgggtgttcctggagctaggccctgtccagactattgcaggaacgtgctgaaaggatgcttggcaaatcaggccgatttggatgccgagtggcggaacctgctggatagtatggtccttattacggataaattctggggaaccagtggggttgagtccgtcatcggctctgttcacacctggctagctgaagctatcaatgcactacaggacaaccgagatacactcacggccaaggtgatccaggggtgtggcaaccctaaagttaatcctcagggtcctggccccgaagagaaacgcagaagaggcaaactcgcacctcgcgaacggcccccgtcaggcacgcttgaaaaactggtctccgaggcaaaggcccaactcagagacgttcaggatttctggatctctctccctggaacgctgtgttctgaaaagatggccttgagtaccgcgagtgacgaccgatgttggaacgggatggctcgaggccgttatcttccagaagtaatgggggacggtttggctaatcagatcaacaacccagaagtggaagtagacatcacgaaaccagacatgaccataagacagcagatcatgcagctgaagataatgaccaacaggttaagatctgcatataacgggaacgatgtggattttcaggatgcgagcgatgacggatctggatccgggtctggagatggctgtctggacgacttgtgtagcagaaaagtcagcaggaagagctcaagctcccggacccccctgacacatgcactccccggcctctccgagcaggagggacagaagacatcagcggcatcctgccctcagccccccacattcctgctgccactgctcctctttctcgctttgacagttgcgaggccgcggtggcgttag

SEQ ID NO: 189676 - DNA, 1743 bp, synthetic construct
  misc_feature 1..1743: note = Description of Artificial Sequence: Synthetic coding sequence
  source 1..1743: mol_type = other DNA
atggccggcaccgtgcggaccgcctgcctggtggtggccatgctgctgagcttggattttccggggcaggcccagcccccaccaccgcccccagacgccacatgtcaccaggtgagatctttcttccagcgactgcagcccggactaaagtgggtacccgagacccctgtcccaggcagcgatctgcaagtttgccttcccaaggggcctacctgctgcagcaggaaaatggaggagaagtatcagttaaccgcccggctgaatatggagcaacttttacagagcgcaagtatggagctgaagttcttaatcattcaaaatgctgccgttttccaagaagccttcgagatcgtggtccgccacgcaaaaaattatactaacgcgatgttcaagaataactacccatcactaactccccaggcattcgaatttgtcggagagttcttcactgacgtctctttgtatatacttggaagcgatattaacgtagacgatatggtgaacgagttattcgatagcctgttcccagttatttacacccagctcatgaacccaggcctgccagacagcgcactggacattaacgagtgcttacggggggcgagaagggacttgaaggtcttcgggaattttccgaaactaattatgactcaggtctctaaatcactgcaggtgaccaggatttttcttcaggcacttaatctgggcattgaagttatcaacacaacagatcacctgaagttcagtaaggattgtggccgaatgttaactaggatgtggtactgcagctactgtcaaggactaatgatggtcaaaccttgcggtggatactgtaacgtggtaatgcaggggtgcatggcaggggttgtggaaatcgacaaatactggcgtgagtacattcttagtctggaagagctagtgaacggtatgtacagaatttatgacatggagaatgtactcctcggtcttttttcaacaatccatgattctattcaatacgtacagaaaaatgccggcaagctgacgaccaccatcgggaagctgtgcgcccattctcagcagcggcaatatagatctgcctattatcccgaggatctgttcatcgataagaaagtgctgaaggtggctcatgtagaacacgaagagacccttagcagccgaagaagagaactgatccagaaactgaaatcatttatcagcttctattcagcgctgcccggctacatctgttcccatagccctgtcgccgaaaacgacacattgtgctggaatgggcaggagctggtggagagatatagtcaaaaagccgcccggaacggtatgaagaatcaattcaatctccacgaactgaagatgaaaggtccggagccagtcgtctcacaaataattgataagctcaaacacattaaccagctcctgaggaccatgtccatgccaaaaggaagggtgctcgataaaaatctggatgaggagggttttgaatccggtgactgcggggatgatgaggatgaatgtatcggaggctcaggcgacggaatgattaaggttaaaaaccaactccgctttttggccgaactcgcctacgatttggatgtcgacgacgcccctgggaattctcagcaagctactcccaaagataacgaaatctccacctttcacaatcttggtaacgtgcactccccactcaagctgttaacatccatggcaatttctgttgtatgtttcttctttctggtacactag

SEQ ID NO: 189677 - DNA, 1812 bp, synthetic construct
  misc_feature 1..1812: note = Description of Artificial Sequence: Synthetic coding sequence
  source 1..1812: mol_type = other DNA
atggccggcaccgtgcggaccgcctgcctggtggtggccatgctgctctccctggattttccgggacaggcccagcctccgcctcccccacccgacgccacctgccaccaggtcagatcattcttccagcgactgcagccgggccttaagtgggtgcccgaaactccagtgccaggaagcgatttacaggtgtgccttcctaaaggacccacgtgctgctctcggaagatggaggagaagtatcaactgaccgctaggctaaatatggagcagctgctccagtccgcctctatggagctgaagtttttgattatccagaacgctgcagtgttccaggaagcctttgagattgtcgtacgtcacgccaagaattataccaacgcaatgtttaagaataattacccttcccttacacctcaggccttcgagtttgttggagagtttttcactgatgtttcattgtatatccttggttctgacataaatgttgacgatatggttaatgaactctttgactccctatttcccgtcatttatacgcagttgatgaatccaggactgccagatagtgcacttgacatcaacgagtgtctgcgaggagcccgcagagacctaaaggtgtttggaaatttcccaaaattgataatgacacaggttagcaaatctttgcaggtgactagaatcttcttgcaggccttaaacctggggatcgaagtgatcaacaccaccgatcaccttaagttctctaaggactgcggaaggatgcttacacggatgtggtactgttcttattgccaagggctgatgatggtaaaaccctgtggaggctattgtaacgtcgtcatgcaaggatgcatggcgggggtggtcgagatcgataaatactggcgcgagtacatattgtcccttgaagagttagtgaatggtatgtaccggatatatgatatggagaacgtcctgctcgggttattctccacaatccacgactctattcaatacgtccaaaagaacgctggcaagttgaccaccacggaaactgagaaaaaaatctggcactttaaatacccaatcttttttctctgtattggtctggaccttcaaattggaaaactgtgtgcccattcacagcagcggcagtatcgctctgcgtactaccctgaggacctgttcattgataaaaaagtgctaaaggtggcgcacgttgagcacgaggaaactctatcctcccggcgtcgcgagttaattcagaaactgaagtcttttatttccttctattctgccctcccggggtacatttgtagtcattcaccggttgccgagaatgacacgctatgctggaatggtcaagagctcgtggagaggtatagtcagaaagcagctcggaacgggatgaaaaatcaattcaacctccacgagctgaaaatgaagggacctgagcccgtggtgagccaaataatagataaactaaagcacatcaaccaacttttgcggaccatgtctatgcccaagggacgggtactggacaaaaaccttgatgaagagggtttcgagtcgggagactgtggcgacgacgaggacgagtgtatcggaggatccggagacggcatgatcaaggtcaagaatcagctgagattcctcgcagaactggcatacgatctggatgtggacgacgcaccgggtaactcccagcaggccactcctaaagacaacgagattagcacctttcataacctgggcaacgtgcactcaccactgaagttgctgacctcaatggccatctccgtggtctgtttcttcttcctagtacattag

SEQ ID NO: 189678 - DNA, 771 bp, synthetic construct
  misc_feature 1..771: note = Description of Artificial Sequence: Synthetic coding sequence
  source 1..771: mol_type = other DNA
tgaaagccctgcggcggctactgcaacgtggtgatgcagggctgcatggccggagtggtagaaatcgataaatattggcgggagtatattctgagtctggaggagttggttaatggaatgtatcgtatttacgatatggaaaacgtgcttctggggttattcagtaccatccatgacagcatccagtatgttcagaaaaacgccggaaaactgacgacaaccattgggaaattgtgcgctcactcccaacaaagacagtacaggagcgcctattaccctgaagatctctttattgataagaaagttctgaaggttgcccacgtagaacacgaagagaccctaagttccagacgtcgggagctcatccaaaagctgaaatctttcatctcgttctattcggcgttgcctggttacatctgctctcactcccccgtcgccgaaaatgacaccttatgctggaacgggcaggagctggtggagagatattcccagaaggctgctcggaacggtatgaagaatcaatttaatttgcacgagctgaagatgaaaggaccggagccagtagtgagtcagataatcgacaaacttaagcacatcaatcagcttctgcgcactatgagcatgccgaagggccgcgtactagacaagaatctggatgaggagggtttcgaatcaggcgactgcggagatgacgaggacgaatgtattggcggatctggcgatggaatgataaaggtgaaaaaccagctccggtttttggccggcaactag

SEQ ID NO: 189679 - DNA, 1581 bp, synthetic construct
  misc_feature 1..1581: note = Description of Artificial Sequence: Synthetic coding sequence
  source 1..1581: mol_type = other DNA
atggccggcaccgtgcggaccgcctgcctggtggtggccatgctgctgagtctggactttcctggtcaagcccagcctccgcccccacctcccgacgctacctgtcaccaggtccgctcattcttccaaagattacagccgggtctgaagtgggtgcctgaaactcctgtccctgaggccttcgaaattgtcgtacggcacgctaaaaattacacaaacgccatgtttaaaaataactatccatcgctgactcctcaagcttttgaatttgtcggtgagtttttcacagatgtgtccctttacatcctaggatccgacatcaatgtcgacgacatggtcaacgaactgttcgattccctgtttcccgtcatatatacgcaactgatgaaccccgggctccctgattcggctctcgacattaacgagtgtctacggggcgcacgccgtgatctcaaagtgttcgggaactttcccaaactgatcatgacacaggtctctaaaagcctccaggtaacaagaatctttctgcaggcgctaaatctgggcatcgaagtgattaacaccaccgatcatctcaaatttagcaaagactgtggaaggatgcttacaaggatgtggtattgttcttattgccagggactgatgatggtgaaaccttgcggcggctactgcaacgtcgtgatgcaggggtgtatggccggtgtggtcgagatagataagtattggagggagtacatcttgagtctagaggagctagtgaatggtatgtaccggatttatgacatggaaaatgtgctcctgggcctgttctctaccatccatgactctatccagtatgtgcaaaaaaatgcagggaaactcacaactaccatcggcaaattatgcgcacattcacagcagcgtcagtaccgatcagcctattacccagaggatctattcatcgacaagaaagtgctcaaagtggcccacgttgagcatgaggagacactctccagccgcaggcgcgagctgatacagaaactcaaatccttcatttctttttattctgccctgccaggttatatttgctcccattccccagtcgcagaaaacgacactctctgttggaatggccaggagctcgttgaacggtatagccagaaagcagcccgtaatgggatgaagaatcagtttaaccttcacgaactgaaaatgaaggggcccgaacctgtggtttcacagattatagacaagcttaagcacattaaccagctgctgcggacaatgtccatgcctaaagggcgcgttctagataaaaacctggacgaagagggatttgagagcggtgattgtggagacgacgaggacgagtgtatcggcggcagcggggatgggatgataaaggtcaagaatcaactgcgctttctcgccgagttggcctatgatttggacgtggatgacgccccaggtaattctcagcaagccacaccaaaggacaatgagatctcgacttttcacaatttagggaatgttcactctcctctcaagctgctaaccagcatggccatttcagtcgtatgtttcttcttcctggtgcactag

SEQ ID NO: 189680 - DNA, 1671 bp, synthetic construct
  misc_feature 1..1671: note = Description of Artificial Sequence: Synthetic coding sequence
  source 1..1671: mol_type = other DNA
atggcccggttcggcctgcccgccctgctgtgcaccctggccgtgctgtcagccgcactgcttgcagccgaactaaagtccaagagctgtagtgaggtgcgccgcctctacgtttccaaggggtttaacaagaatgacgcaccactgcatgagattaatggcgatcacctgaaaatatgccctcaggggtcaacgtgctgctctcaggaaatggaggagaaatactcccttcagagtaaggacgatttcaagtccgttgtgtccgagcagtgtaatcacctgcaggccgtgtttgcctctcgctataagaagtttgatgaattcttcaaggagctgctggaaaatgccgagaagtcccttaacgatatgtttgtgaaaacatatggccacctgtatatgcagaacagtgaattattcaaggatctctttgtcgagctaaaacggtattatgtcgtgggaaatgtcaacttagaagagatgttgaatgatttctgggcccgcctgctggaaagaatgttccggctggtgaattcacaataccacttcaccgacgagtatcttgagtgcgtttccaaatatacagaacagttgaagccttttggagacgtgcccaggaagctgaaattacaggtgactcgcgcttttgttgcggctcgcacattcgcgcagggccttgcggtcgccggtgatgtggttagtaaagtgtcggtggtgaatccaaccgcccaatgcacgcacgcccttttgaagatgatctactgtagccattgcagagggcttgtgaccgttaagccttgttacaactactgcagcaatattatgagaggttgtcttgcaaatcagggcgatctagactttgagtggaacaattttattgatgctatgctgatggttgccgaacggcttgaaggcccctttaatatcgagagcgtcatggatcctatcgacgtgaaaatcagcgacgccataatgaacatgcaggacaattcggtgcaagttagccagaaagtcttccaggggtgtgggcctccgaagcctttgccggctgggcggatcagccgcagtatcagcgagagcgcgttcagtgcccgcttccggccacaccaccccgaagaacgaccgactaccgctgccggtaccagtctggaccggttggtgaccgatgtcaaagagaagctgaagcaggcaaagaaattttggtcttcattgccctccaatgtttgcaacgatgaacgcatggccgccggcaacggtaacgaggacgattgctggaatgggaaaggtaagtcaaggtatttgtttgcagtgacagggaacggccttgccaaccaagggaataaccctgaggtgcaggtggacacttctaagccagacattctgatacttaggcaaatcatggcccttcgagtaatgacctccaagatgaaaaatgcctacaacggcaatgatgtggacttcttcgacatatccgacgaaagctcaggagaagggagcggctcaggttgcgaataccagcagtgcccctccgaattcgactataacgccacagatcacgctggtaaaagtgccaatgaaaaggcagatagtgccggagttaggcccggggcccaggcatatttactgacagtgttttgtatcttatttttggtaatgcagcgtgaatggcgatag

SEQ ID NO: 189681 - DNA, 1461 bp, synthetic construct
  misc_feature 1..1461: note = Description of Artificial Sequence: Synthetic coding sequence
  source 1..1461: mol_type = other DNA
atggaggagaagtacagcctgcagagcaaggacgacttcaagagcgttgtcagtgagcagtgcaaccacctgcaagctgttttcgccagcagatataaaaaattcgacgagttctttaaagaattactggagaatgcagaaaagtcactcaatgatatgtttgtcaagacatatggacacctatatatgcaaaactctgaattatttaaggacctcttcgtggagcttaagcgctactacgtcgtcggtaacgttaatttagaagaaatgttgaatgatttctgggcacgtctgctcgaacgaatgtttaggttagtaaattctcagtatcacttcaccgacgagtacctcgagtgcgtgagcaagtacacagaacagcttaaaccctttggagatgtgcccagaaaacttaagctacaagtcactagggctttcgtcgcggctaggacgtttgcccagggactggcagtggcaggggatgtagtgagcaaagtttcagtggtgaatcctactgcgcagtgcacccatgcgctcttaaagatgatttactgctcacactgccgcggtctggtgaccgtgaagccatgctataattattgttctaatatcatgaggggctgcctagccaaccagggtgacctcgacttcgagtggaataatttcatcgatgcgatgcttatggtggctgagaggttggaaggtcctttcaatattgaatccgtgatggacccgatagatgtgaaaatcagcgatgccattatgaacatgcaggataatagcgtgcaagtatcgcagaaagtcttccaagggtgcggtccacctaaaccgttgcctgcaggaagaatctcgcgatcaatcagtgaatctgcattctcagctagatttcggccacatcaccccgaagagcggcccacaactgcagctggaacctcattggaccggctcgtgacagacgtcaaagagaaactgaagcaggctaagaagttctggtcctccttgccctccaacgtgtgtaatgatgagcgcatggcagctgggaacggaaatgaggacgactgttggaatggcaaaggcaagtctcgatatctcttcgccgttactggaaatgggcttgcaaatcaagggaataatcctgaggtgcaagtggacacatctaagcccgacattctgatccttaggcagatcatggcactacgcgtgatgacaagcaaaatgaagaatgcatacaatgggaacgacgtggacttcttcgatataagtgatgaaagctctggggaaggcagcggtagtggctgcgagtaccagcagtgcccttccgagttcgactacaatgccactgaccacgctggcaagtccgcgaacgaaaaggcagacagcgcaggcgttcgcccgggcgcccaggcttatctgctgaccgtgttttgtattctgttcctcgtcatgcaaagagagtggcgatag

SEQ ID NO: 189682 - DNA, 1653 bp, synthetic construct
  misc_feature 1..1653: note = Description of Artificial Sequence: Synthetic coding sequence
  source 1..1653: mol_type = other DNA
atggcccggttcggcctgcccgccctgctgtgcaccctggccgtgctgtcagccgcgctactggccgcagagttaaagtccaagtcatgctccgaggtgaggaggttgtacgtttctaaaggtttcaataaaaacgacgccccgctccacgaaattaatggagaccacgaggaccttagtccgggtttctatctgctcttgagcagggatggaggctacagcctccagtcaaaagacgatttcaaatccgtcgtaagcgagcagtgtaaccatctccaggccgtgttcgcctctcgatacaaaaagttcgacgagttcttcaaggagctcctagagaacgccgaaaaatcactgaatgatatgttcgtgaagacatacggccatctgtacatgcagaactctgagttgttcaaagatctgttcgtggagctgaaacgatattatgtcgtgggtaatgtcaacctcgaagaaatgctgaacgacttctgggcccgccttctcgagaggatgttccgcctggtaaattcgcagtaccatttcaccgacgagtatctggagtgcgtctctaaatacaccgagcagcttaaaccattcggagacgtgcctagaaagctcaagctccaggttacccgggcattcgtcgccgcccgcacatttgcccagggattggccgtagctggagacgtcgtctccaaagtatccgtcccaagctgtacccacgccctgctcaaaatgatctactgctcgcactgtaggggccttgttactgtgaaaccttgttacaactactgttctaacattatgagaggctgtcttgcaaatcagggcgatctcgacttcgagtggaataacttcatcgatgctatgctgatggtcgcagagcgcctggagggcccattcaatattgagtccgtcatggacccaattgatgtgaagatttccgacgccattatgaatatgcaggataacagcgtacaggtctctcagaaggtgttccaaggctgtggcccccccaaacccttgcccgccggccgcatcagccgtagtatctccgagtcagcttttagcgctcgatttcggccacatcaccctgaagagcgtccgactacagcggccggcacctctctggacagactggtgactgatgtcaaagaaaagttaaaacaagccaagaaattctggtcatcattacccagcaatgtttgcaacgacgaacggatggctgccgggaatggcaacgaagacgattgttggaatggaaagggcaagagcaggtacctctttgcggtcacaggcaacggactggcaaaccaaggaaataaccccgaagtccaggtggatacctctaaacctgatatacttatcctcagacaaattatggctttgagggtaatgacgagtaaaatgaaaaacgcttacaatggcaacgacgtcgacttttttgacatttccgatgagagttccggagaaggcagcggaagcgggtgtgaataccaacaatgtccatcggaattcgactacaacgccactgaccacgcgggcaaatcagccaacgaaaaggccgattctgcaggtgtgagacccggagcacaggcctatctcttgaccgtcttctgtattctattcctcgtgatgcaaagggagtggcgttag

SEQ ID NO: 189683 - DNA, 1719 bp, synthetic construct
  misc_feature 1..1719: note = Description of Artificial Sequence: Synthetic coding sequence
  source 1..1719: mol_type = other DNA
atggacgcccagacctggcccgtgggcttccggtgcctgctgctgcttgcattggttgggagcgctcgatcagagggggtccagacctgcgaggaagttagaaagcttttccagtggcgcctgctgggcgcagtccgagggctgccagacagtccaagggcaggccctgacttacaggtttgtatttctaagaaaccaacttgctgcacccggaaaatggaggaaagatatcagatcgccgccaggcaggacatgcagcagttccttcagacgagctcgagtaccttgaagttcctaatcagcagaaacgcggcggcttttcaggagacattggagacactgattaagcaggccgaaaactatacctccatcctgttttgttccacttaccgaaacatggccttggaagctgccgccagtgtgcaggagttctttacggacgtcggcctgtacctgttcggcgcagatgttaaccctgaagagtttgtgaatagattcttcgatagccttttccccctcgtgtataaccacctcattaaccctggggtgacagacagtagtttggagtatagcgagtgtatccgaatggcccggagagatgtcagcccctttgggaacatacctcagagggtgatgggacagatgggcaggagtctgctgcctagcaggacttttcttcaggcgctgaatctgggtatcgaggttattaataccactgactatttacacttttccaaggagtgtagccgggcattgctgaagatgcagtactgtccccactgccaaggtttagcattgacgaaaccttgtatgggctactgccttaatgtcatgaggggttgcctcgcacatatggcagaacttaaccctcattggcatgcctatatacggagcctcgaggagttgagcgatgctatgcacggcacatatgacattgggcacgtgcttctcaatttccatctcttagtgaacgatgccgtccttcaagcccacctgaatgggcagaaacttctggaacaagtgaataggatttgcgggcgacccgtgcgcacaccgacccaatcaccaaggtgctccttcgaccagtctaaggaaaagcatggaatgaagacaaccacgcgcaactcagaggagactctcgctaatcgaaggaaggaattcattaacagcctaaggctctatcgcagcttctacggcggcctcgcagatcagctctgtgcaaacgagcttgcagccgcagacggtctgccttgttggaacggggaggacatcgtgaaaagctacactcaaagggtcgtggggaatggcattaaggcacaatcaggcaacccagaggtgaaggtgaaaggcattgaccccgttattaatcagataattgacaagctcaagcatgttgtgcaattgttgcagggccgctcccccaagcccgacaagtgggagttactgcaactaggttccggcggcggcatggtggaacaggtctccggtgattgtgacgatgaggatgggtgtggaggatccggcagcggcgaggtgaaacggacactgaagattacagactggatgcctgatgacatgaattttagcgacgtcaagcagatacaccagactgacacaggttctacgctggataccacgggggccggctgcgcggtcgctacagaaagtatgactttcacactgatctctgttgtgatgctcttgcctggtatctggtag

SEQ ID NO: 189684 - DNA, 1668 bp, synthetic construct
  misc_feature 1..1668: note = Description of Artificial Sequence: Synthetic coding sequence
  source 1..1668: mol_type = other DNA
atgcccagctggatcggcgccgtgatcctgcccctgctgggcctgctactgtctctgcccgcgggcgcagacgttaaagcccgctcgtgtggggaagttcgccaggcgtacggcgccaaagggttctctctggccgatatcccctatcaagaaatcgcgggggagcatctgcgcatttgtccccaggagtatacctgttgcacaacagagatggaggataaattatctcagcaatcgaagctggagtttgagaaccttgtggaagagacgagtcacttcgttagaaccacctttgtgtcccgccacaagaagttcgatgaatttttcagggaactcctggagaatgccgaaaagtccctgaacgacatgttcgttagaacttatgggatgttgtacatgcagaactcggaggtgtttcaggacctcttcacggagctgaagagatactacaccggaggcaatgtaaacctggaggagatgctgaatgacttctgggcgcggctgctggagcgaatgttccagcttattaaccctcagtaccatttctctgaagattatctggagtgcgtgagcaagtacacagaccagctcaaaccctttggtgacgtgccccggaaacttaaaattcaagtgacacgcgcgtttatagctgcacgaaccttcgtgcagggactcacggttggccgtgaggttgctaatagggtaagtaaggtctctcctacgcctgggtgcatccgcgctctaatgaagatgctttactgtccctattgccgcgggctgcccacagtgagaccttgtaataactattgtctgaatgtaatgaaagggtgtctagcaaaccaggctgatctcgacacggagtggaacttgttcattgatgccatgctacttgtagctgagcggctggaagggccctttaatattgagtccgtgatggatccaattgacgttaaaatctccgaagccatcatgaacatgcaggaaaactctatgcaggtctctgctaaggttttccagggatgtggtcaacccaagccagcaccagctctacgctcggctagatcagcgcctgagaacttcaacaccagattccgcccctataacccggaggaaagacccaccaccgctgcaggaacctcgctggatcgtctagtgaccgacattaaggagaagttgaagctcagcaaaaaagtttggagtgccctgccctacacaatttgcaaggacgaatcagtaaccgcaggaacctcaaatgaggaagaatgttggaacggacactccaaggctcgatacctgccagaaattatgaacgatggcctaacaaaccaaataaacaatcctgaggtggacgttgacatcaccaggccagacacattcatcaggcagcagataatggcattgagggtgatgactaataaacttaaaaatgcctacaacgggaacgatgtgaatttccaggatacaagcgacgagtcttctggcagtgggtccgggtcaggctgtatggacgatgtctgtcctacggagttcgaatttgtcactacggaggcgccagccgtggaccctgacagacgggaagtagattcctccgctgcccagagaggccactctctgcttagttggagcctgacttgtatcgttttggcactgcagcggctgtgtcggtag

SEQ ID NO: 189685 - DNA, 582 bp, synthetic construct
  misc_feature 1..582: note = Description of Artificial Sequence: Synthetic coding sequence
  source 1..582: mol_type = other DNA
atgcagagcctgatgcaggcccccctgctgatcgccctgggcctgctgttggctgcacccgctcaggcacatcttaagaaaccttctcagctgtcgagtttttcctgggataattgtgacgaggggaaggaccccgccgtgatcaggtccctgacattagaaccagaccccataatcgtgcccggaaacgtcacactgtctgtaatgggctctacctccgttccactgtcaagtccactgaaagtcgacctggtgctcgagaaagaggtggccgggctgtggatcaagatcccctgcacggactatatcggaagttgtacgtttgaacacttttgcgacgtcttagatatgctgattccaacaggagagccatgtccagaacctcttcgaacgtacggactcccttgccactgcccctttaaagagggtacttatagcctgccaaagtccgagtttgttgtgccagatctcgaactacctagttggctgaccacagggaactatcgcatcgaaagtgttctgtcaagctccggcaaaagactgggatgcattaagatcgcagcaagcctcaagggcatctag

SEQ ID NO: 189686 - DNA, 1140 bp, synthetic construct
  misc_feature 1..1140: note = Description of Artificial Sequence: Synthetic coding sequence
  source 1..1140: mol_type = other DNA
atgggctgcctgggcaacagcaagaccgaggaccagcggaacgaggagaaagctcaaagggaggccaacaaaaaaattgagaagcaattgcagaaagataaacaggtatatagggcaacacaccggctcttattgctgggcgctggagaaagcggtaagtctactatagttaaacagatgagaatcctccacgtcaacggatttaatggggatgagaaggcaacgaaagttcaggatataaagaataaccttaaggaggctattgagacaattgtagctgccatgtccaacctggttcccccagtagagcttgccaatcccgaaaaccaattccgtgtagactacatcctatcagtgatgaacgtgccagatttcgactttcctcccgagttctacgagcacgccaaggcgctttgggaggacgaaggggttagagcctgttacgagcgctctaatgagtatcagctgatcgactgtgcccagtacttcctcgacaaaatagacgttatcaagcaagcagactacgtgccctcagatcaggatctgctgcgctgcagagtcctcacctcaggcattttcgaaacgaaattccaggtagacaaggtgaattttcatatgtttgacgttggaggccagagagatgagcggcggaagtggattcaatgcttcaatgatgtgacagcaattatcttcgtggtggccagcagtagctataatatggttattagagaggataaccagactaaccgtcttcaggaagctctcaatttattcaagtctatctggaataatcggtggctgcggaccatcagtgtaattctgttcctcaacaagcaggaccttctcgctgagaaggtgctggctgggaagtcaaaaattgaagattactttcctgagtttgcccggtatacaacccctgaggatgcaaccccagagccaggagaagaccctcgtgtgacccgcgccaaatattttatcagagatgagttcttaaggatctccacagcatccggtgacggaagacactactgctacccccacttcacctgcgccgtggatacggagaacatacggcgtgtgtttaacgattgcagagacattatccagcgaatgcaccttcgacagtacgagctgttatag

SEQ ID NO: 189687 - DNA, 1143 bp, synthetic construct
  misc_feature 1..1143: note = Description of Artificial Sequence: Synthetic coding sequence
  source 1..1143: mol_type = other DNA
atgggctgcctgggcaacagcaagaccgaggaccagcggaacgaggaaaaggctcagcgcgaggcaaacaagaagatcgaaaagcagctgcaaaaggacaagcaggtgtatcgggcaacacacagactgttgctccttggagcgggcgaaagtggtaagtcgaccatcgtgaaacagatgcggattttgcacgtgaatggtttcaacggggattcagagaaggccaccaaggtgcaagacatcaaaaataacctgaaggaagctatcgagacaatagtggccgccatgtcaaaccttgtccctcctgtggagctggccaatccagagaaccagtttcgcgtcgactatatcctttcagtcatgaatgtccctgatttcgactttccccctgaattttatgagcacgccaaggccctgtgggaggatgagggggttcgagcctgctacgagcgtagtaacgagtatcaactgattgactgcgcccagtacttcctcgacaagatcgacgtgattaaacaagccgactatgtgccaagtgatcaggaccttctacggtgccgggtgttgacttctggcatcttcgaaactaagtttcaggtggacaaggtcaactttcatatgtttgatgtagggggccagagagatgagcgcaggaagtggattcagtgcttcaacgatgtaacggccatcatctttgtcgtggcctcttcatcctacaacatggtgataagagaggataatcagacaaacaggctccaagaagcccttaatcttttcaagtccatatggaataacaggtggctgagaacgatctccgtgatactcttcctgaacaagcaggacctcctggccgaaaaggtgctggcaggtaaatctaagatagaagattatttccccgaatttgctcggtacactacaccagaagacgcaaccccagaaccaggcgaggacccaagagtcacaagagcaaaatatttcattcgggacgagttcctccgcatctccacagcaagtggcgacgggcgccactactgctaccctcatttcacctgtgcagtagacacggagaatattcgccgtgtgttcaatgactgccgtgacattattcagagaatgcatctgagacagtacgagctgttgtag

SEQ ID NO: 189688 - DNA, 738 bp, synthetic construct
  misc_feature 1..738: note = Description of Artificial Sequence: Synthetic coding sequence
  source 1..738: mol_type = other DNA
atggaccggcggagccgggcccagcagtggcggcgggcccggcacaactataacgacctgtgtcctcccatcggacgtagggccgccactgccctgctgtggttgtcttgctcgatcgctctcctcagagcgttggccacctccaacgcacgcgcacaacaacgtgctgccgcacaacagagaaggtctttcttgaatgctcaccataggtccggcgctcaggtgtttcctgagagcccagagtctgagagcgaccatgagcacgaggaggcagacctggagctttccttgccagaatgcctagagtatgaggaagagttcgactacgaaacagagtccgagaccgagtccgaaattgagtcggagaccgacttcgaaacagaaccagagaccgcacctaccaccgaacccgaaaccgaacctgaagacgaccgcggtccagtggtgcccaaacactctacatttggacagagtcttacccagcgccttcacgctctcaagcttaggtcccccgatgcatccccatcccgggccccaccctcaacacaggagcctcagtcgcctcgagaaggcgaggagttgaagcctgaggacaaggacccacgcgacccggaagaaagcaaggagcccaaagaagagaaacagcgccggaggtgcaagccaaagaaacccacgagacgcgatgcgtcaccggaatcaccttcaaaaaagggccctattccaattcgcagacactag

SEQ ID NO: 189689 - DNA, 1188 bp, synthetic construct
  misc_feature 1..1188: note = Description of Artificial Sequence: Synthetic coding sequence
  source 1..1188: mol_type = other DNA
atgggctgcctgggcaacagcaagaccgaggaccagcggaacgaggaaaaggcccagcgtgaggccaacaagaagatcgagaaacagcttcagaaggataaacaagtgtatcgggccacccatagactcttgcttcttggcgccggcgagtctggcaaaagcaccatcgttaaacagatgcgaatcctacacgttaacggttttaatggagagggcggagaggaggatccgcaggcagccagatccaactctgacggctcggaaaaggccaccaaggtccaagatatcaagaacaacctaaaggaggcaatcgaaacaattgtcgcagccatgtccaatctagtcccaccagtcgagttggcaaatcccgagaatcagttcagagtagattacatactgtctgtaatgaacgttccagattttgactttcctcctgaattttacgagcacgcaaaagctctctgggaggacgagggtgtccgtgcctgctatgaacgatctaacgagtatcagctgattgactgcgcccagtattttctggacaaaattgacgtaattaaacaggctgactacgtcccgagcgaccaagacttgctgcggtgcagggtgttgacaagcggaatcttcgagacgaagtttcaagtggataaagtaaacttccatatgttcgacgtgggagggcagcgggacgagagacgcaaatggattcagtgcttcaacgacgtgacggctattatcttcgtcgttgctagctctagttacaatatggtgatccgcgaagataaccagaccaatagattacaggaagcgctgaatctcttcaaatcgatttggaacaatcgctggttacgcacgatcagtgtgattcttttcttgaacaagcaggacctcttagccgagaaagtactggccgggaagagcaagatagaggactatttccctgaatttgccaggtatactacaccagaagacgcgactcccgagcctggcgaggatcccagggtgacccgtgccaagtattttattagagacgaatttctgaggatctccactgccagtggcgatggtcgacactattgttatcctcacttcacgtgtgcagtggacacggagaacattcgcagagtcttcaatgattgtcgggacatcattcagcgcatgcacttacggcaatacgagctgctctag

SEQ ID NO: 189690 - DNA, 738 bp, synthetic construct
  misc_feature 1..738: note = Description of Artificial Sequence: Synthetic coding sequence
  source 1..738: mol_type = other DNA
atggaccggcggagccgggcccagcagtggcggcgggcccggcacaattacaacgacctctgcccacctattggaaggagagcagctactgcactgctatggctgtcctgtagcattgccctcttgcgagctctcgctacctcaaacgcgcgggcacaacaacgggctgctgcccaacagcggcgcagctttctcaatgcacatcaccggagcggggcacaggtgtttccggaatcccctgagagtgagtccgatcacgagcacgaggaggccgacctggaattgagtcttccagaatgtctcgagtacgaggaagagtttgattatgagaccgaatccgaaacggagagtgagatcgagtctgaaacagactttgagactgaacccgaaactgctcctacgaccgagcccgaaaccgagccggaagatgaccgtgggccagtggtacctaagcacagtacctttggacaatcactcactcagcgccttcatgcattaaagctgagatcccccgatgcttccccctcacgggctccacctagtacccaagaaccacagtcccctagggagggcgaggaactcaagccggaagataaggaccctcgcgaccctgaggagtcaaaagagcccaaggaggagaagcaaagaagaagatgtaaacctaaaaagccaactcgccgggacgccagtcccgagtcgccatccaagaagggtcccattcccattaggcgccactag

SEQ ID NO: 189691 - DNA, 483 bp, synthetic construct
  misc_feature 1..483: note = Description of Artificial Sequence: Synthetic coding sequence
  source 1..483: mol_type = other DNA
atgggctgcctgggcaacagcaagaccgaggaccagcggaacgaggagaaagcccaacgcgaggccaataaggaggacaaccagacgaaccggctccaggaagcccttaacctgttcaagtcaatctggaacaataggtggctccgcactatttcagtgattctgttcctaaataagcaggacctgctcgcggagaaggtgctggctggtaaaagcaagatagaggattactttccggaattcgcaagatataccacgcctgaggatgctactcccgagccgggtgaggatccccgagtgacaagggccaagtatttcataagggacgaatttctaagaatatcgacagcgtccggagatggccgccactattgctatccccattttacttgcgcagtcgatacagaaaacatacgccgtgtgtttaacgactgcagggatattatccagcgaatgcatttaaggcaatatgagttgctgtag

SEQ ID NO: 189692 - DNA, 1185 bp, synthetic construct
  misc_feature 1..1185: note = Description of Artificial Sequence: Synthetic coding sequence
  source 1..1185: mol_type = other DNA
atgggctgcctgggcaacagcaagaccgaggaccagcggaacgaggagaaggcgcagcgggaggccaacaaaaaaatcgagaagcaattgcaaaaagataagcaggtgtaccgcgccacgcacaggttactccttctgggtgctggggagagtggaaaaagcaccatcgtcaagcagatgagaattcttcacgtgaatgggttcaatggtgaggggggtgaggaggatcctcaagccgctcggtcaaattctgacggggagaaagccaccaaagtgcaagatataaaaaacaacctcaaagaggccatagaaaccatagttgccgccatgagcaacctcgtgcctcctgtagagctcgctaaccccgagaaccagttccgtgtggactatattttatctgttatgaacgtccctgatttcgattttcctccagagttttatgagcacgccaaggctttatgggaagacgagggtgttcgcgcttgttacgaacgctccaacgagtatcagttgattgattgtgcccagtactttctggacaagattgacgtgatcaagcaggccgactacgtgccttccgaccaggacctgctgagatgccgggttctgacaagcggtatcttcgaaaccaaattccaagtggacaaggtcaactttcacatgttcgacgtgggagggcagagggatgagcgcagaaaatggattcaatgtttcaatgatgtgacggctataatcttcgtggtggcttccagcagctacaatatggtcatccgtgaggataatcagacaaacaggctgcaggaagcactcaatctttttaagagcatctggaacaataggtggcttaggaccatctctgtgatcctgtttcttaacaagcaggacctgttagccgagaaagttctggccggcaaatctaaaatagaggactactttcccgagtttgctcgatatacaacccctgaagatgctacccccgaacctggggaggaccctagggtgactagggccaagtatttcataagagatgaattcctccggatctccaccgcttccggcgatggacgccattactgctacccacattttacctgcgctgtggatactgaaaacatcagacgcgtgtttaatgactgtagggacatcattcaacggatgcatctgcggcagtatgagttactgtag

SEQ ID NO: 189693 - DNA, 1143 bp, synthetic construct
  misc_feature 1..1143: note = Description of Artificial Sequence: Synthetic coding sequence
  source 1..1143: mol_type = other DNA
atgggctgcctgggcaacagcaagaccgaggaccagcggaacgaggagaaggcacaaagagaggctaataaaaaaatagaaaagcagttgcaaaaggacaagcaagtctatcgagccactcatcgcctgctgctcttgggcgcaggcgagagcgggaaaagcaccatagtgaagcaaatgagaatacttcacgtcaatggattcaacggcgatagcgagaaggctactaaagttcaagacatcaagaataacttgaaagaagccattgaaaccatcgtcgcagcgatgagtaatctggtccctcccgtggagctggcaaatccggagaatcagtttcgggtggactacatcctgtccgtgatgaatgtcccagactttgatttcccgcccgagttttacgaacatgccaaagccctttgggaggatgagggcgtccgcgcatgctatgagaggagcaatgaatatcagctcatagactgtgcacagtactttctagacaagatcgatgtcatcaagcaggcggactatgtcccaagcgatcaggatctcctgcggtgtagggtgctcacgagcggaatctttgagactaagttccaggttgacaaggttaattttcacatgttcgacgtcggaggacagcgcgatgagcggagaaagtggatccaatgcttcaacgacgtgactgccattatttttgttgtcgcctcatcttcctacaacatggtgatccgagaagataaccagaccaaccgtctgcaggaagccctgaatctgttcaagtcgatctggaataaccgctggttgcgcacgatatccgtgatactgttcttgaacaaacaagatctgctcgcggaaaaggtacttgccgggaagtccaagatcgaggactacttccctgaatttgcccggtatactaccccagaagatgccacccctgaacctggcgaggaccctagagtcacccgggctaagtattttattcgggatgagtttctcaggatcagcactgcatctggagatggacgacactactgttacccacatttcacatgcgccgttgacacggagaacatcagacgagtttttaacgattgtagggacattattcagcgcatgcatttgcgccagtacgagctcctgtag

SEQ ID NO: 189694 - DNA, 738 bp, synthetic construct
  misc_feature 1..738: note = Description of Artificial Sequence: Synthetic coding sequence
  source 1..738: mol_type = other DNA
atggaccggcggagccgggcccagcagtggcggcgggcccggcacaactataatgatttatgtcccccaatcggacgcagagctgctaccgcattactgtggctcagctgttccattgcgcttcttcgagctctggccacgtcaaatgcacgggcacaacagagggctgcagcacagcaaaggagatcctttcttaacgctcatcaccgcagtggtgcacaggtctttccagagtcacccgagtccgagagcgaccatgaacatgaagaggctgatctcgaactgtctcttccagaatgcctggaatatgaggaggagtttgactacgaaaccgaatccgaaactgagtctgaaatcgagtcagaaactgactttgaaactgagccagaaactgcacccactaccgaacctgaaactgaacccgaagacgacagaggccccgttgtccctaaacactccaccttcggtcagtccttgacccaaaggctgcacgctctgaagctgaggtcccctgatgcttctccttcaagagctcctccctcaactcaagagccacagtccccccgagagggagaggagctcaagcccgaagacaaagacccccgtgatcccgaagaatcaaaagagcctaaagaagagaagcagcggcggagatgtaagcctaaaaaacctacccggcgtgacgcctcccccgagtccccctcaaagaagggaccaattccaatacgccgtcattag

SEQ ID NO: 189695 - DNA, 3114 bp, synthetic construct
  misc_feature 1..3114: note = Description of Artificial Sequence: Synthetic coding sequence
  source 1..3114: mol_type = other DNA
atgggcgtgcggaactgcctgtacggcaacaacatgagcggccagcgtgacattccacccgagatcggggagcagcctgagcagcctccactggaggctcccggggccgcagcacccggcgctggccctagcccagccgaggagatggagaccgagcccccccataacgagcctattcccgtggagaacgatggggaggcctgcgggccacctgaagtgagtcgccctaactttcaggttttgaatcctgcgttcagggaagctggtgctcatggaagctattctccgccgcctgaagaagccatgccgttcgaagccgagcagccatctctgggagggttttggcctaccctcgaacaaccagggtttcccagtggggtccacgcaggtctagaagctttcggcccggcactgatggagcccggcgcgttttccggggcacgaccaggtctgggcggttactcaccccctccagaagaagcaatgccctttgagtttgaccagccagcgcaacgcggctgcagtcagcttctacttcaagtgccagaccttgctccagggggacctggcgctgctggcgttcccggagccccccctgaagaaccccaggctcttcgccctgctaaggctgggagcaggggaggatattcaccacctcccgaggagaccatgcctttcgaattagacggcgagggatttggtgatgactctccaccacctggtctctcccgggtgatcgctcaggtcgatggctctagtcaattcgccgctgtggccgcctcatcggcagtgcggctcacccccgcagccaatgcaccacctttgtgggtacccggagcaattggctccccttcacaggaagccgtacgtccaccgagtaattttaccggctcgtccccgtggatggaaatcagtgggcctccttttgagatcggctccgccccagctggagtcgacgataccccagtcaatatggactctccccccattgcactagatggaccacctataaaagtgtcaggggccccggataaaagagaacgggctgagcgcccaccagtggaagaggaggccgcagagatggagggggctgctgacgccgctgagggcgggaaggtgccatctcccgggtatggatcgcctgcggcgggggccgcctctgccgacacagccgcacgcgccgcgccagcagctccagctgacccagattcgggcgcgactccagaagaccccgatagcgggactgcacctgccgaccccgactctggcgctttcgcagccgaccccgatagtggcgcagctcctgcagcaccggctgacccggacagtggggctgctccagacgcccccgccgaccccgacagtggcgcggctcctgacgccccagcagatccggacgccggagctgccccagaggcacctgccgctcccgccgctgcggaaaccagagcagctcatgttgctccagcggcgccagacgccggcgctccaaccgcccccgctgcaagtgcaactcgcgctgcacaggtgaggcgagctgcgagcgctgccccggcatcgggcgctagacgtaaaatacatctccggcccccttctcccgagattcaagctgccgatccgccgactccgcgccctactcgcgccagcgcgtggcgtggcaaaagcgagtcctcgaggggtagacgggtgtattatgatgagggcgttgccagctctgacgacgacagttctggggacgaatccgatgatggtacatcaggctgccttcgctggtttcaacacaggagaaaccgacggcgtcgcaaaccacagagaaaccttcttcggaacttcctggtacaagccttcgggggatgtttcggtagatctgagtccccccagcccaaagctagccggtcccttaaagtgaagaaagttccgctggccgagaaacggaggcagatgcgcaaggaagctcttgaaaaacgcgctcagaagcgcgccgagaaaaagcggagcaaacttatagacaagcagttacaagacgagaagatggggtacatgtgtacccacagactgctgcttctgggcgccggggagagcggcaagagcaccattgttaaacagatgagaattcttcacgtcaatggatttaacggagagggcggagaagaggacccccaggcagcacggagtaactccgacggcgagaaggcaaccaaagttcaggatattaagaataacctcaaggaggccatcgaaaccatcgtggccgccatgtccaacctggtacctcccgtagaactggcgaaccctgagaaccagtttagggttgactatattttgagcgtgatgaacgtgccggatttcgactttccccctgagttctacgagcacgctaaggccctatgggaggatgagggtgtgcgggcttgctacgaacgcagcaatgagtaccaattgattgattgtgcccaatattttctggataagatagatgtcatcaagcaggctgattacgtaccatcagatcaggatttgctgcggtgcagggtcctgacgtccggtatttttgagactaaatttcaggtggacaaggtaaatttccatatgttcgatgtggggggccagagagatgaaagaaggaagtggatccaatgtttcaacgatgtgactgcaattatttttgttgtggccagttctagctataacatggtgatcagagaggacaaccagaccaataggctgcaagaggccctgaacctcttcaaaagcatctggaacaaccgctggctgagaacaatcagtgtgatactgttcctcaacaaacaggatttgctcgccgaaaaagttttggcaggcaaatccaaaatcgaggactatttccctgaattcgccaggtacaccaccccagaggacgcgactcctgagcctggagaggatcccagggtgacccgagctaaatatttcatccgtgacgagttcctgaggatctcgaccgcaagtggcgatgggaggcactattgctaccctcattttacatgcgctgttgacacggagaacatcagacgggtgtttaacgactgtcgtgacatcattcaacgaatgcacctgcgccagtatgaactcctgtag

SEQ ID NO: 189696 - DNA, 342 bp, synthetic construct
  misc_feature 1..342: note = Description of Artificial Sequence: Synthetic coding sequence
  source 1..342: mol_type = other DNA
tgaaccaccgagcccgagaccgagcccgaggacgaccggggccccgtggtgccaaaacattccacctttggacagagtctgacacagcgcttacatgctcttaaacttcgctctcctgacgcttctccgagtagagcccctccaagcacccaggagccccagagcccccgcgagggtgaggaactgaagcctgaagacaaggacccccgggacccggaggagtcaaaggaaccgaaggaggaaaaacagagacggcggtgcaaacccaaaaaacccacacggagggatgccagcccagagtcaccaagcaagaaggggcctatccctatccgccgccattag

SEQ ID NO: 189697 - DNA, 501 bp, synthetic construct
  misc_feature 1..501: note = Description of Artificial Sequence: Synthetic coding sequence
  source 1..501: mol_type = other DNA
cccgagagcgagagcgaccacgagcacgaggaggccgacctggagctctccctgcctgagtgcttagaatacgaggaggagttcgattacgagactgaatctgaaactgagagcgagattgaaagtgagactgattttgaaacagaacccgagaccgcccccaccaccgagccagagacggaacctgaagacgatagaggccccgtagttccaaagcactctaccttcggccaatcccttactcagcgcctgcatgccttgaagttaagatcgcccgacgcatctcctagccgcgccccaccttcaacacaggagccccagagtccccgggaaggcgaggaactgaagcccgaagataaagatccacgggatcccgaggagtctaaggaacccaaggaagagaaacagagaaggaggtgcaagccgaagaagcccacacgccgcgacgcgtcccctgaatcaccctccaagaagggacccatacccataagaagacattag

SEQ ID NO: 189698 - DNA, 5580 bp, synthetic construct
  misc_feature 1..5580: note = Description of Artificial Sequence: Synthetic coding sequence
  source 1..5580: mol_type = other DNA
atggtggacaagaacatctacatcatccagggcgagatcaacatcgtcgtcggagccattaaacgaaacgctagatggtcaacacacactccactggacgaggaacgcgaccccctcctgcactcattcggacatctgaaagaggtcttgaatagcattactgagctctctgaaattgaacctaatgtgttcctgcgaccattcttggaggtgatccggtccgaagataccacaggtcccattaccggtctcgcgcttacaagcgtgaataagtttctgtcctatgccctcatcgacccaacccacgagggaactgccgaggggatggagaacatggctgacgccgtgactcacgcaagattcgtgggaacggaccctgcgtcagacgaggtcgttcttatgaaaatcctgcaagtacttcgcaccctcctactgacccctgtgggggcccacttgactaatgaatctgtgtgtgagataatgcaatcttgctttagaatctgttttgaaatgcggctgagtgagctactgaggaaaagcgctgaacatacgctggtggatatggtacagctgctgttcactcgcctgccccagttcaaagaagagcccaagaattacgtcgggacgaacatgaagaagttaaagatgcgggccggagggatgagtgacagtagcaaatggaaaaaacagaaaagatctcctagaccaccacggcacatgacaaaagtcacaccaggatccgagttacccactcctaacgggactacgttgtctagcaacctgactggtggaatgccctttatagatgtaccaactccaatcagcagcgcctcttcagaggccgcatcggccgtcgtgagtcctagcactgatagcgggctggagtttagttcacaaacaacttctaaggaagatctcacagatttggaacagcccggatcccctgggtattctactgcgacagagcctggttcatctgagttgggagtgccggagcagccggaccttcaagagggaacgcacgttgagaagtcccagtctgcctcagtggaaagcatccccgaagtgctagaggaatgtacaagccccgccgaccactccgattctgccagcgttcatgatatggattacgttaacccgaggggtgtgcgcttcacacagtcaagccagaaggagggaacggccctggtgccctatggcttgccttgcattcgtgagttgttccgctttcttatctctctcaccaacccccatgatcgacacaactctgaagtgatgatccatatgggactccatctgctgacggtcgcccttgaaagcgctccagtggcccaatgccagaccctccttggcctaataaaagacgaaatgtgtagacatttgttccaactgttaagtatcgaaaggctcaatttgtacgctgcatctcttagggtctgctttctgctttttgagagtatgagagagcatctcaaatttcagatggagatgtacatcaaaaagctgatggaaatcatcactgtcgagaatcccaagatgccatacgagatgaaggagatggctctagaggccatcgttcaactgtggagaattccatccttcgtcactgaactttatattaattacgattgcgattattattgttcaaacctcttcgaagagctaacgaagcttttgagcaagaatgcttttcctgtaagcgggcagctttataccacccatctgctaagcttggacgccttgcttactgtcattgattctaccgaagcccactgccaggcaaaggttttgaactcattgacccagcaggaaaagaaggagactgctcggccctcctgcgagattgttgatggcacaagggaggcatccaacacagaacgaactgctagtgatggaaaggcagtggggatggcctctgacattcccggactccacctacctggcgggggcaggctgccccctgagcatgggaaaagcggctgtagtgatttggaagaggcagttgatagcggcgcagataaaaaatttgcccgaaaacctcccagattttcgtgtctgttacccgaccctcgggaacttatcgaaattaagaataagaagaaacttctgatcactggcacagagcaattcaaccagaagcctaaaaaagggatccaattcctccaagaaaagggcttacttacgatccctatggacaatacggaggtcgcgcagtggcttcgagagaacccccggctggataagaagatgatcggtgaatttgtgtcagatagaaagaatatagatttactcgagtcctttgtttcaacttttagcttccagggcctgagattggatgaggccctccgcttgtaccttgaagcattcaggctgcccggagaggccccagttattcagcgacttctggaggctttcaccgaacgctggatgaattgtaatgggtcaccattcgcaaactccgacgcatgtttcagtctggcttatgcagtgattatgctcaatacggaccaacataaccataatgtaagaaagcaaaatgccccaatgactttagaagaattccgtaagaacctcaagggagtgaacggcggaaaagattttgaacaggacatactggaggatatgtaccatgctatcaagaacgaggagatcgtcatgccggaagagcaaaccgggctcgtgcgagagaactatgtgtggaacgtgttactccaccgcggggcaaccccggagggcatcttcctgcgtgttcctaccgcaagttacgatctcgacctgtttaccatgacgtggggaccaaccatagccgctctaagttatgtgtttgacaagagcttagaggagacaataatccagaaagcaattagcgggtttcgtaagtgtgctatgatatccgcccattacggactttctgacgtcttcgataatttaataatcagcctatgtaagttcaccgcccttagtagcgaatcaattgaaaacctaccatcagtctttggatctaatcctaaagctcatattgctgccaaaaccgtgtttcatctggcacatcggcacggagacatcctgcgggagggatggaaaaatattatggaggccatgcttcagctttttagagctcaactcctgccgaaagccatgattgaggtggaggactttgtggacccgaatggaaaaatctccttgcagagagaggagacgccgtctaacaggggcgaatctactgtgctgtctttcgtaagctggttgactctgagtggacctgaacaaagttcggtgcgcggacctagcaccgagaatcaggaggcgaagcgggtggctctcgaatgcattaaacagtgcgaccccgaaaagatgatcacagagtctaagttcctgcaactggagtctttgcaggagctgatgaaggctcttgtgagtgtaacccccgatgaagagacttacgatgaggaagacgcggccttctgcctagagatgttactgagaattgtgctggaaaatcgcgacagagtcgggtgcgtttggcaaaccgtgcgcgaccacctataccatttgtgcgtgcaagctcaagatttctgttttttggtagagcgcgcagtcgtgggcctcttgagattggctattcgcctgctccgtagggaagaaattagcgcgcaggtgttactttcgctgcggatcctgctgctgatgaaaccaagtgtcttgtcaagggtgtcccatcaagtggcttatggactgcacgagctacttaaaactaacgctgcaaatattcattccggagatgactgggccaccctctttactctgctcgagtgcatcggctctggggtgaagcctcctgccgctctgcaggctaccgcgcgcgctgacgctcctgatgctggcgctcaaagtgatagtgagcttccatcctatcaccaaaatgacgtttctttggatcgaggctatacctcagactccgaggtgtatactgatcacgggcgaccaggcaagatccacagatcggcaactgatgctgacgtggtgaattctggatggctcgtggtgggaaaggacgacgttgataactctaaacctggcccatccagacctggaccctcccccctcattaaccaatattctctcacagtaggactcgacttaggacctcatgataccaaaagcttacttaaatgtgttgagtctctgagctttatcgtgcgcgatgccgctcacatcacacccgataactttgagttgtgcgttaagacgctgcggatcttcgtggaagcgtctttgaatggcggctgtaagagtcaggaaaagcgtgggaagagccataagtacgacagtaaaggcaaccggtttaagaaaaaatcaaaggagggaagcatgttgcgacgccctcgcacgagctcccagcacgcatccaggggagggcagagtgacgacgacgaggatgagggggtccccgcatcctaccacaccgtgtccctgcaagtttctcaagacctgttggatctgatgcatacactgcataccagagccgcgtcaatttatagttcttgggccgaggagcaacgccatctggagaccggcgggcaaaagattgaagcagatagcaggacactctgggcccactgctggtgtcccctgctgcagggcatcgcatgtttgtgttgcgacgcaaggcgccaggtgcgcatgcaggcccttacatatttacagcgcgcacttctagtgcatgacttgcaaaagttagatgctctggaatgggaatcttgcttcaataaagtgttatttccccttctgacaaaattattagagaacatttcccccgccgacgtgggaggaatggaagagacacggatgcgggccagcactctgctgtcaaaagtgttcctccagcacctgagcccattgttgtctctgtcgaccttcgctgctttatggctgactatcctcgactttatggataagtacatgcacgccgggagtagcgaccttctatcagaggcgatcccagagtctctaaagaatatgctgctcgtaatggataccgccgagatcttccatagcgctgacgcccgaggtggtggaccctctgcgctttgggagatcacctgggaacggatcgattgttttctgcctcatcttcgagacgagctgtttaagcagactgtgatccaggacccaatgcccatggaaccacaaggtcagaaaccactggcatccgctcacctcacaagcgccgccggcgacacacggacacccggacacccccccccccccgagatcccctctgagttaggtgcctgtgacttcgaaaagcctgaatcaccgagagctgcctctagcagcagcccaggcagtcccgtggcctcttctccttcaagactgtctcctaccccggacgggcccccacctttggctcagccccctctcattctgcaacccctggccagcccactgcaggtgggtgtgccccccatgacactccctataatcttaaatcctgctctcatcgaggctacttctccagttccacttttagctaccccccgacctaccgatcccattcctaccagtgaggtgaactag

SEQ ID NO: 189699 - DNA, 1749 bp, synthetic construct
  misc_feature 1..1749: note = Description of Artificial Sequence: Synthetic coding sequence
  source 1..1749: mol_type = other DNA
atgggcggcagcagccccgtgaccagcaaggccatcgtggacgccgatggtcgaatttacatccgtaactggcaagggggtatcctctccggcggattcgagaaaaatcctaaaccaatctttactgagggcaagaaccagctggagatccagaacctgcaggaagactgggatcacttcgagcctttgctgagttcacttctgagacgaatgcctgaattggagaccctggagattatgaagttagttaattgtccagagacatttactccggatatgagatgcattatgggagagagtccagccgtacagggctattttgtactcgctgggatgaacagcgccggcctatcattcggcgggggagctggcaaatatctggccgagtggatggtgcacggctatccgtctgagaatgtatgggagctggatcttaagcgctttggggcgctgcaaagttcaaggacgtttctgcggcaccgagtcatggaagttatgcctctaatgtacgacttgaaagtccctcggtgggactttcaaacaggcaggcagctgagaaccagtccgctgtacgatcggttagacgcacagggggcccgctggatggagaagcatgggtttgaaaggccaaagtacttcgttcccccagacaaggaccttctggccctcgaacagtcgaagacattttacaagccagattggttcgatattgttgaatcagaggtgaaatgttgtaaggaagccgtgtgcgttattgacatgtctagcttcactaagttcgagatcaccagcaccggagatcaggccctagaggtcctgcagtatctcttttccaacgaccttgatgttccagttggtcatatcgtccataccgggatgctcaacgagggcggaggttacgagaacgactgctcgattgctcgactgaataaaagaagtttttttatgatttcaccaacagaccagcaagtgcactgttgggcttggctgaaaaaacatatgcctaaggattccaatctgctcctagaggatgtgacctggaaatataccgccttaaatctcattggccctagggcagtggacgtcttaagcgagctatcatacgcccctatgacaccagaccattttccgtctttgttctgcaaagagatgtctgtaggctatgctaatggcatccgcgtgatgagtatgactcataccggagagccgggctttatgctctatatcccgattgaaggcatggatttcatcggcagagacgctttactgcaacaaaagcaaaatggggtgtacaaacggttgacaatgtttattttggacgatcacgacagcgacctggacctgtggccgtggtggggagagcccatttataggaacggacagtacgtgggcaaaaccacttcctctgcctattcttacagcctcgaacgccatgtgtgtctgggcttcgtgcacaactttagcgaagatactggcgaagagcaagttgtgacagccgatttcattaacagaggcgagtacgaaatcgacatcgcaggatatcgttttcaggccaaagctaagctgtatcccgtggcaagcttattcacccagaaacgaagaaaagatgatatggagctgagtgccttcttagctctcccacccccccctcctaacatccattctggtttgttctttccctcccatcctagcctgtctttttcctggtggcaagaagtctgtctgacaggacaaaagcaagctccgtag

SEQ ID NO: 189700 - DNA, 3540 bp, synthetic construct
  misc_feature 1..3540: note = Description of Artificial Sequence: Synthetic coding sequence
  source 1..3540: mol_type = other DNA
atggccgcctgcggccgggtgcggcggatgttccggctgagcgccgccctgcatttgttactgttgttcgcagccggggccgaaaagttgccagggcagggcgttcacagtcaaggacaagggccgggcgcaaacttcgtatctttcgttgggcaggcgggtggaggtgggccagctggccaacagcttccccagctgccccaaagcagtcagctgcagcaacagcagcagcagcaacagcagcagcaacagccacagccaccccagcccccatttcctgctggtgggcctcctgctaggaggggcggcgcaggcgccggtggtggctggaagctcgcagaggaagagtcttgtcgcgaagacgtaacacgggtctgtccaaaacacacatggtccaacaatctggcagtgcttgaatgtctccaggacgtgcgagaacctgaaaatgagataagttcggactgtaatcacctactgtggaactacaagctaaacctcacaactgaccctaaattcgaatctgtggcacgagaagtctgtaagtctacaataaccgagattaaggagtgcgccgacgagcctgtgggtaagggatatatggtgtcatgtttggtagatcaccgcgggaacatcactgagtaccagtgtcaccagtatatcaccaagatgacggcgattatttttagcgattaccgacttatttgcggatttatggacgactgcaaaaatgacatcaatatattgaaatgcggctcaattaggctcggagaaaaggatgcccacagccagggtgaagtggtgtcctgcctggagaagggcttggtcaaagaggcagaggagagagaaccaaagatccaggtatccgagctgtgcaaaaaagccatccttagggtggccgagctttcatcagatgattttcacttggatcgccacctctactttgcctgtcgcgacgacagggaaaggttctgcgagaacactcaggccggcgagggacgggtttataagtgtctcttcaatcacaaattcgaggaaagtatgagtgagaaatgcagagaggcacttacaacacggcagaagctgattgcacaggactacaaagtttcgtattcactggctaaatcttgcaagagcgacctgaagaaatatagatgcaatgtggagaatctcccccgctctcgcgaggcgcggctgtcctacttactcatgtgcttggaaagtgcggtacacaggggtaggcaggtaagttccgagtgtcaaggtgagatgctagactaccgccgaatgttaatggaggacttttcattatcaccagagatcatactgtcttgtaggggagagatcgagcaccactgtagtggattacatcggaaaggtcgcaccctgcactgcttaatgaaggtcgtgagaggtgagaagggcaacctcggcatgaactgccagcaagccctccagaccctgatccaggaaacagatccaggcgctgattatagaattgaccgcgcacttaatgaagcctgtgagtcagtcatccagaccgcctgtaaacatatccgctctggagaccctatgattctgagctgcctgatggaacatctttacaccgaaaagatggtagaggactgcgagcacagactgctggagttacagtacttcattagccgcgactggaaattggacccagtgctgtaccggaagtgtcaaggtgacgccagtcgactttgccatacgcacggatggaatgagacgagcgagtttatgccacaaggagctgtcttctcctgtctgtatcggcacgcctaccgcaccgaagaacagggtcggcgattgtctcgggagtgtcgcgccgaagtgcagagaatccttcaccagagggctatggacgtgaaactggatccagctctgcaggacaagtgccttatagacctgggcaagtggtgctccgagaagaccgagacggggcaggagctggagtgcctgcaggatcatctggatgatttagtagtggaatgcagggacattgtgggtaatctgaccgaactagaaagcgaggacatacagatcgaagctcttctaatgcgtgcctgtgagcccataatccaaaacttctgtcatgatgtggccgacaatcaaattgacagtggggacttaatggaatgtttgatccaaaacaagcaccagaaagatatgaacgagaagtgcgccataggtgtgactcacttccagttggtgcaaatgaaggatttcagattctcctacaaatttaaaatggcttgcaaggaggatgtgttgaaattgtgcccgaacataaaaaagaaggtcgatgtggtcatttgcttgtctaccactgtccggaacgacaccctgcaagaagccaaggaacaccgagtgtcactaaaatgtcgccgccagcttcgggtggaggagctggagatgaccgaggatatacggcttgaaccagatctgtacgaggcttgcaaatccgacatcaagaacttctgcagtgccgttcagtacggcaatgctcagataattgaatgtctaaaagagaataaaaagcagctcagtacaagatgtcaccagaaggtcttcaaactccaggagaccgaaatgatggaccccgagctggactacaccctgatgcgcgtgtgtaagcagatgattaagagattctgccctgaggccgattccaaaaccatgctgcagtgtctgaaacagaataagaactcggaactcatggaccccaagtgcaaacagatgatcaccaagcgccaaattactcagaacaccgattacagactcaaccctatgcttaggaaggcatgtaaggccgacatccccaaattttgtcacgggattctgactaaggctaaggacgacagcgagttggaggggcaggtcatatcatgtcttaaattacgatatgcagatcaaagactgagttctgattgcgaggatcaaattcggataataatccaggagagtgccctggattaccgattggatccccagctgcaattgcactgctcggatgagattagcagcctgtgtgccgaagaggcagccgcgcaagagcagaccgggcaggtggaagagtgcctgaaggtgaacctcctgaaaattaagaccgagttatgcaagaaagaagtgctcaacatgctgaaagagtcgaaagccgatatttttgtcgaccccgtgctccacacagcctgtgcgctcgacatcaagcatcactgcgccgctattactccaggcagggggaggcagatgtcctgcctcatggaggctctggaggataagagggtccgtctgcagccagaatgcaagaagagactcaatgatcggatcgagatgtggtcttacgctgcaaaagtggcacctgccgacggatttagcgatctcgcaatgcaggtaatgacctccccaagcaaaaattacattcttagcgtgatctcagggtccatctgtatactgtttctcatcggtcttatgtgcggtcgcatcacaaagcgtgtcacaagggagttaaaggaccgatag

SEQ ID NO: 189701 - DNA, 3579 bp, synthetic construct
  misc_feature 1..3579: note = Description of Artificial Sequence: Synthetic coding sequence
  source 1..3579: mol_type = other DNA
atggccgcctgcggccgggtgcggcggatgttccggctgagcgccgcacttcacctgctgttacttttcgcggccggtgcggaaaaacttcctggccagggtgtgcactcacagggccaaggacccggcgccaatttcgtgtcctttgtgggccaagccggaggggggggcccagctggccagcaactgccccagctgccgcagtcaagccagctccagcagcagcagcagcagcagcagcagcagcagcagcctcaacctccacagcctcctttccccgcgggaggacctccagcccggaggggcggcgccggcgctggcgggggctggaagttagccgaagaggagtcttgccgcgaggacgtcacccgagtctgccctaagcatacatggtctaacaatttggctgtactcgagtgtcttcaggatgttcgggagctcctgtggaattacaagctgaatctcaccacagatcctaagtttgaatctgtcgctcgggaggtctgcaaaagcaccatcactgagatcaaggaatgtgccgacgagccagtgggcaaagggtatatggtctcctgtctggtcgaccacagggggaacatcaccgaataccagtgtcaccaatatatcaccaagatgaccgccattatcttctctgactacagattgatctgcgggttcatggacgattgtaagaacgacattaacatcctgaagtgtggctccatccgcctcggggaaaaggacgcacacagtcagggagaggtagttagttgtctggagaaggggcttgtgaaggaggcagaagagagggaaccaaaaatacaggtctcagaactctgcaaaaaagctattctgagggtggcggagctgtcatccgatgactttcatcttgatcggcatctttactttgcttgtagagacgaccgggaacgtttctgtgagaatacccaggccggcgaaggcagagtgtacaaatgcctgttcaaccacaaatttgaggagtcgatgagcgaaaagtgtagggaagcgctaaccacaaggcagaaactcatagctcaagactataaagtgagctatagtctcgcgaaatcttgtaaaagcgatttgaagaagtatcgatgcaacgttgagaatttgcccagaagcagggaagccagactgagctatttgctcatgtgcctggagtctgccgtgcaccgaggaagacaggtgtcctcagagtgccagggcgaaatgctcgactacaggcgaatgcttatggaggatttttccctgtcgcccgagattatcctcagttgccggggggagatcgaacatcactgctccggtctgcatagaaaaggcaggacattgcactgcctaatgaaggtagttcgaggggaaaagggaaatctaggaatgaactgccagcaagcccttcagaccttaatccaagagacagaccccggggcagattaccgtatcgatagagcgcttaatgaggcctgtgagtccgttattcagactgcctgcaagcacatccgctcaggcgatccgatgatcctttcatgtctgatggaacatctgtacacggagaaaatggtcgaggactgcgagcatcggttgctggagctccagtactttattagtcgggactggaagctggaccctgtgctgtaccgaaagtgtcagggtgacgccagccgactttgtcacactcatggatggaacgagacgtctgagttcatgccacaaggagccgttttcagttgtctataccgccatgcttataggaccgaggaacaggggagacggttgtcccgcgagtgccgagctgaggtccaaagaatcctgcaccaaagagctatggacgtgaaactcgatcccgccttgcaggataaatgtctgatcgaccttggcaaatggtgttcagaaaagactgagacaggacaagagctagaatgtctgcaagaccatcttgatgacctcgtggtggagtgtcgcgatattgtgggtaatttaactgagctggaaagcgaggacatccagatcgaggctttgctcatgcgtgcctgtgagccgatcattcagaacttctgccatgatgttgccgacaatcagattgactcaggggacctgatggaatgcctgatccagaacaaacaccaaaaggacatgaacgaaaagtgtgccataggggtgactcattttcagttagtgcaaatgaaagacttccgttttagctacaaattcaagatggcttgtaaagaggatgtgttaaaactgtgtcctaacatcaaaaagaaggtggacgtcgttatctgcctgtccactaccgttaggaatgatacgcttcaggaggctaaggagcatcgtgtctctcttaagtgccgcaggcagttgcgcgtagaagaacttgaaatgacagaagatataaggctagaaccagacctatatgaggcttgtaaaagtgacatcaaaaatttttgcagcgctgtgcaatatggaaacgcccagataatcgaatgtttgaaagaaaacaaaaaacagctgtctactcgatgccaccagaaggtgttcaagctgcaggaaactgaaatgatggaccctgaactagattatacactcatgcgtgtgtgtaagcagatgatcaaaaggttctgcccagaagccgactcaaagactatgctgcagtgtttaaagcagaataaaaacagcgaactgatggacccaaagtgtaagcagatgatcactaagcgacaaattacacagaacaccgattaccggcttaatcccatgcttaggaaggcttgtaaggcggatattcccaaattttgccacggcatcctgacgaaagcaaaggatgatagtgaactggagggacaggtgatcagctgtctcaagttgcgatatgccgaccagaggttgagctccgattgcgaagatcagatacggattatcatccaggagtctgcactggactaccgactcgatccccaactgcagctgcactgtagcgatgagatcagttccctctgcgctgaagaggcggccgcccaggagcaaacaggacaagttgaagagtgtttaaaggttaacctgctcaagataaaaaccgagctttgcaaaaaggaggtcttaaatatgcttaaggagtccaaggcggacatctttgtcgatcccgtgttacacacagcttgcgctctggacattaagcaccattgtgccgctattacaccaggtaggggcagacagatgtcctgcctgatggaggccctggaggataaacgggtccgcctccagcctgagtgtaagaaaaggttgaatgatagaatcgaaatgtggtcctatgctgctaaggtggcgccagcagatggatttagtgacctggccatgcaggtgatgaccagccccagcaagaattacatactgtccgtgatatctggaagtatctgtatcctgtttttgatcggccttatgtgcgggagaatcacaaagagagtgacccgggagctgaaggatagactgcagtaccgtagcgagaccatggcatacaaaggtttggtgtggagtcaggatgtgaccggatcccccgcctag

SEQ ID NO: 189702 - DNA, 2091 bp, synthetic construct
  misc_feature 1..2091: note = Description of Artificial Sequence: Synthetic coding sequence
  source 1..2091: mol_type = other DNA
atgggcaacggcatgtgcagccggaagcagaagcggatcttccagactctcctgttgctcaccgtcgttttcggctttctctatggggcgatgctgtattatgagctgcagacccagctgaggaaagctgaagctgtagcgctgaagtatcagcaacaccaggaatccctctccgcacagctccaggttgtttacgagcaccggtctaggcttgagaagagtctgcagaaggagcgcctggaacataaaaaagcaaaagaagacttcttggtgtacaagctagaagcacaggagaccctgaataaggggcgccaagacagcaatagtcggtactctgctctgaatgtgcagcatcaaatgttaaaatcccaacacgaggagcttaagaagcagcactccgatctggaggaagagcaccgaaagcagggcgaggatttttcccgtaccttcaacgatcacaagcagaaatatttacagctccagcaggaaaaagagcaggagttgtctaaactgaaggagactgtgtacaatctccgggaagaaaacagacagctcaggaaggcccatcaggatatccacacccagcttcaggatgtcaaacagcagcataaaaatctcctgagtgaacatgaacagttggtcgtcaccctggaagaccacaaatcagcgctagccgcagcccagacccaggtggcggagtataaacagcttaaagataccctgaatcgcattccaagtctcaggaagcccgaccccgctgaacagcagaatgtcacacaggtcgcccactccccccagggttataacactgcgagggagaaaccgactcgtgaggtccaagaagtctcccgaaacaatgacgtgtggcagaaccacgaggccgtgccaggtagggcagaagatacgaaactttacgctcctactcataaagaggctgagtttcaggcgccgcctgagcccatacagcaagaagtggaacgcagggaaccggaggagcaccaggtggaggaggagcaccgaaaagcattagaagaagaggagatggaacaagtaggccaagccgaacatcttgaggaggagcatgacccttcaccggaagagcaggatcgcgagtggaaggagcagcatgaacagagggaggctgccaacctactggagggccacgctcgggccgaggtttacccttccgcaaagcccatgataaaattccaatctccttatgaagagcagttagagcagcagagactggccgttcaacaggtggaggaggctcagcagctgcgagagcaccaggaggccctgcaccaacagcgcttgcaaggccacctcctgcggcagcaagaacaacaacaacagcaagttgcgagggagatggctctccagcggcaggcagaattagaagagggaagacctcaacaccaagagcagttaaggcagcaggcccattacgatgccatggataacgacattgtgcagggggctgaggaccaggggattcagggggaagaaggcgcctacgaacgcgataatcaacatcaggatgaagccgagggcgatccggggaatcgccacgagccccgggagcaagggcctcgcgaagcagaccctgagtctgaagcagacagggctgctgttgaggatatcaacccagctgacgatcctaacaaccagggagaagatgaatttgaggaagccgaacaggtgagggaggagaacctcccagacgagaatgaggagcaaaaacagtcaaatcagaaacaagaaaacacagaggtcgaggagcatctggtgatggccggcaaccctgaccaacaggaagacaatgtggatgagcagtatcaagaggaggcggaagaagaagtgcaggaagatcttactgaggagaagaagagggagctcgaacacaatgccgaggagacctacggtgagaatgacgagaatactgacgataagaataacgatggcgaggagcaggaggtccgggacgacaacagaccaaagggcagggaggaacattacgaagaggaagaggaagaggaggaagatggcgctgcagtggccgagaagtcccataggcgggccgaaatgtag

SEQ ID NO: 189703 - DNA, 897 bp, synthetic construct
  misc_feature 1..897: note = Description of Artificial Sequence: Synthetic coding sequence
  source 1..897: mol_type = other DNA
atgaccagcctgacccagcggagcagcggcctggtgcagcggcggacggaagcgtcgaggaacgccgcagacaaagagcgagcagccggcggaggtgccgggagtagtgaagacgacgcccaatcacggagggatgaacaggatgatgatgataagggggacagtaaggaaactagactgacactgatggaggaggtcttgctactgggcttgaaagatcgcgagggatacacaagcttttggaacgattgtatatcttccggcctgagaggctgcatgctcatcgagctagccttgcggggcagactgcagctcgaggcctgcggtatgagaaggaagagcctgctgacaaggaaagtaatttgtaagtccgatgctcccacaggcgatgtgttgcttgatgaggccctgaaacatgtgaaagaaacacagcctcccgaaactgtgcaaaactggatcgaacttctgagcggagagacctggaatcctctgaagctgcactatcagctcagaaacgtgagagagcgactggctaagaacctggtcgagaaaggcgtcctcacaaccgagaaacagaacttcctgttatttgatatgacaacccatccgctaacaaacaacaatattaaacaaagactgatcaaaaaagtccaggaggctgtcctggataagtgggtgaacgacccacatagaatggatagaagactgctggcactgatctacctcgcccacgcgagcgacgttctggagaatgccttcgccccgcttctggatgagcaatatgatctagccaccaaaagggtgcggcagctcctcgacctggacccagaggtagagtgcctcaaagccaacacgaacgaggttctgtgggcagtcgtcgcagccttcaccaagtag

SEQ ID NO: 189704 - DNA, 846 bp, synthetic construct
  misc_feature 1..846: note = Description of Artificial Sequence: Synthetic coding sequence
  source 1..846: mol_type = other DNA
atgaccagcctgacccagcggagcagcggcctggtgcagcggcggacggaagcttctcgcaatgccgctgatagccgccgggatgagcaagacgatgatgacaagggagactcgaaggagacccgtcttacactcatggaggaggtcctgctgttaggcttaaaagatcgggaggggtataccagtttctggaatgactgcattagttctggcttgaggggctgtatgcttattgaacttgctctgcgaggtcgactgcagctggaagcttgtgggatgcggcgcaagagtctgttaacgaggaaggtgatatgcaagtccgacgctccaaccggagatgtgttactcgacgaagcccttaagcacgtcaaagaaacacagccaccagagaccgttcaaaattggattgagcttctctccggtgaaacctggaatcctctcaaattacattatcaattgcgcaacgtaagggagaggctcgcaaagaatctggtggaaaagggcgttcttacgacagaaaaacagaattttttattgtttgatatgactacccatccacttacaaacaataatattaaacaacgtttgataaagaaggtgcaggaggcagtcctggacaagtgggtgaatgaccctcatagaatggatcgacgacttcttgctctgatttatctggcccacgcctccgacgtgctggaaaacgcgtttgcgccactgctggacgagcaatacgacctggccacaaaacgcgtacgccagctgctggatctggaccctgaagtcgaatgcctaaaggcaaacactaacgaagtgctgtgggccgtggtggctgctttcactaaatag

SEQ ID NO: 189705 - DNA, 858 bp, synthetic construct
  misc_feature 1..858: note = Description of Artificial Sequence: Synthetic coding sequence
  source 1..858: mol_type = other DNA
atgaccaccctgacccaccgggcccggcggaccgagatcagcaagaattccgaaaagaaaatggagtctgaagaggacagtaactgggagaagtccccagataacgaggactcgggagactctaaggacatccgactcacacttatggaggaagtgctcctactcggcctgaaggataaagaaggttacaccagcttttggaatgattgcatcagttcgggactgcgggggggcatcctcattgagctggccatgcgcggtcggatttacttagagccccccactatgcgtaaaaagcgcctgctcgatcgaaaagttctgctgaaaagcgattctcccactggtgacgttctcctagacgaaactttgaagcacattaaagcgacagaaccaactgaaacagtccaaacatggattgaactgttgacgggtgaaacgtggaacccatttaaattacagtaccagctaagaaatgtccgggagcggatcgccaaaaatctggtggagaaaggtatccttacgactgagaagcagaatttcctcctctttgacatgacaacgcacccggttacaaataccacagaaaaacaaagactcgtgaaaaagcttcaggattctgtgctggagcgatgggtcaacgatccccagcggatggataaacggaccttggctttgctcgtactggctcatagcagcgacgtgttagaaaatgtgttttctagtcttaccgacgacaagtacgacgtggcaatgaatcgggcaaaggacctcgttgagcttgatccagaggtggagggcacaaagccctccgcaacggagatgatttgggccgtgttggccgctttcaacaaatcctag

SEQ ID NO: 189706 - DNA, 924 bp, synthetic construct
  misc_feature 1..924: note = Description of Artificial Sequence: Synthetic coding sequence
  source 1..924: mol_type = other DNA
atgaccaccctgacccaccgggcccggcggaccgagatcagcaagaactcggaaaaaaagatggaaagcgaggaagactctaattgggagaaatcacccgataacgaagattctggcgattctaaggacatccgactcacactgatggaagaagtcctattgctagggctgaaggacaaggaggccaacattaatagttggatcacgaggtggctgacccccgtcatacccgcgttgtggggtgctgaaggttatacgagtttctggaatgattgcatctcaagcgggctccgcggtggaattcttatcgagctcgccatgaggggccgcatttacctggaaccacctactatgcggaagaaacggctcttagaccgaaaggtcttgctcaagtcggatagcccaacaggtgatgtgctgctggatgagaccctaaagcatataaaggccaccgagcctactgaaactgtacagacatggatcgagctactgaccggggagacatggaacccatttaagcttcaataccagctgcgtaatgttcgggagaggatcgccaagaatctcgtcgagaaggggatccttacaactgaaaagcaaaactttttattgttcgacatgacaacccatccggttaccaatactaccgagaaacagaggctcgtgaagaaactccaggattcagtcctcgagagatgggtcaacgacccccaaagaatggataaacggactttggcactgcttgtgctcgctcattcctccgacgtgctcgagaatgtgttcagctcattaacggatgacaaatacgacgtggctatgaaccgggccaaggacctggtcgagctggatcctgaagtagagggtactaagccctcagccacagaaatgatctgggctgtgttagccgcatttaataagtcctag

SEQ ID NO: 189707 - DNA, 810 bp, synthetic construct
  misc_feature 1..810: note = Description of Artificial Sequence: Synthetic coding sequence
  source 1..810: mol_type = other DNA
atgaccaccctgacccaccgggcccggcggaccgagatcagcaagaattcagaaaaaaagatggagagtgaggaggatagtaattgggaaaagtcacccgacaacgaagactccggagacagtaaggatatccggctgactcttatggaggaggtgctcctgctgggattgaaggataaggaagccaatatcaattcctggattacaagatggctgactcctgttatcccagccttgtggggagcagagggctacacttccttttggaatgattgcattagctctggcctgcgcggcggaatccttattgagctggccatgagaggccggatttacttagaaccgcctaccatgcgcaagaagaggctattagatcggaaagttcttctcaagtcagactctcccacgggagacgtgttgctggacgagacactcaaacatatcaaagccaccgaacctacagagactgtccagacatggattgaactcctgactggcgaaacatggaatccgtttaagctccagtaccagctgcgcaacgtgagggaaagaatcgctaagaatctggttgaaaagggcatcctgacgacggaaaaacagaatttcctgctgttcgacatgacaactcatcctgttaccaatacaactgagaagcaacggcttgtaaagaaactgcaggactccgtgctggaacgatgggtcaatgaccctcagcgcatggacaaaagaacacttgctctgctggttctggcccactctagcgacgtgctcgaaaacgtgttctcgtcgttaacagatgacaaatattag

SEQ ID NO: 189708 - DNA, 726 bp, synthetic construct
  misc_feature 1..726: note = Description of Artificial Sequence: Synthetic coding sequence
  source 1..726: mol_type = other DNA
atgaccaccctgacccaccgggcccggcggaccgagatcagcaagaacagcgagaagaaaatggagtctgaggaggatagcaattgggagaagtcaccagataatgaggatagtggcgattccaaagacattcggctcacactgatggaggaggtgctgttactgggcctcaaggataaggaggtgctgctgaagtccgattcccccactggcgacgtactgcttgatgagacactgaaacatatcaaagcaaccgaaccaacagagacagttcagacctggatcgagctattaaccggagagacctggaaccctttcaagcttcaatatcagctgcgcaatgtcagagagaggatcgcaaagaacctagtcgagaaaggtattttgaccacagaaaaacaaaatttccttctgtttgatatgaccacacaccctgtgaccaacacaactgaaaagcagcgacttgtgaaaaagctgcaagactccgtcctggaacgctgggtaaacgatccgcagcgtatggacaagcgaacactcgcccttctggttctcgcgcattcatccgatgtgttggaaaatgtgttttccagtctaactgatgacaaatacgacgtggccatgaatcgagccaaggatctagtggagctcgatcccgaggtggaaggcacgaagccatccgccacagagatgatctgggcggttcttgccgccttcaataaatcatag

SEQ ID NO: 189709 - DNA, 1323 bp, synthetic construct
  misc_feature 1..1323: note = Description of Artificial Sequence: Synthetic coding sequence
  source 1..1323: mol_type = other DNA
atgggcctgggcgtgagcgccgagcagcccgccggcggcgccgagggcttccacctgcatggtgttcaggaaaactctcccgctcaacaggcaggcctcgagccttacttcgactttatcataacaatcggccattccaggctcaataaagaaaacgacactctcaaggccctattgaaagccaatgtagagaaacccgttaaattagaagtttttaacatgaagaccatgagggtgcgcgaagttgaagttgtgccatccaatatgtgggggggtcaggggctgctgggggcttcagtgaggttttgttcgtttaggcgggcctcagagcaggtttggcacgtgctcgacgtcgagccgtccagtccagccgccttagcagggctccgaccgtataccgactatgttgtgggctcggatcagatccttcaggagagtgaggatttctttaccttgattgagtcccatgaaggcaagccattaaagctaatggtctacaactccaaaagtgactcgtgtcgcgaggtcacagtcacaccaaacgccgcctggggcggggaaggcagcctgggctgtgggattggttatgggtatctgcatagaatccctacccagcctccatcgtaccacaagaaacctccgggcactcctccgcccagtgccctgcctctgggggcaccccccccggacgccctgcccccagggccgaccccggaggacagcccttctctggaaacaggcagtcggcagtccgactacatggaggcactgcttcaggctcccggcagttctatggaagatcctctccctggtcccggctcgccatctcattcagcacccgatcccgacggtctgcctcactttatggaaacccccctccaacctccccctccagtacagagggtaatggaccctggcttcttagatgtgtcagggatttcattactcgataattccaacgcttctgtttggccaagcctgccaagctcaacggagctgaccacaacagctgtgagcacatccggcccggaagatatctgctcctcttccagcagccacgaacgaggcggagaggcaacttggagtggaagtgagtttgaggtgtcttttcttgattcgccaggagcgcaagcccaggcagatcacttacctcaattaaccctgcccgactctctgaccagcgccgcaagcccggaagacggcttatccgctgagctcttggaagcgcaggctgaagaggagccagctagcaccgaaggactcgataccggcaccgaagctgaggggctggactcacaagcccagattagcactacagagtag

SEQ ID NO: 189710 - DNA, 4143 bp, synthetic construct
  misc_feature 1..4143: note = Description of Artificial Sequence: Synthetic coding sequence
  source 1..4143: mol_type = other DNA
atggccagcggccgggacgagcggcccccctggcggctgggccggctgttgttgttaatgtgccttcttctgctcggtagcagcgcacgcgccgcccacatcaaaaaggcagaagccacaaccacgacaaccagtgccggagcagaagctgcagagggtcagttcgaccggtattaccacgaggaggagctcgagtcagctttgcgagaggccgctgccgctggactgccaggactggcccgcctcttcagcattgggaggtctgtagagggtaggccattgtgggtcctgaggctgacagctggactcggcagtttgatccctgaaggggacgcaggccccgacgctgccggccctgatgctgccggcccattgctgccgggccgcccccaggtgaagcttgtgggcaatatgcacggagacgagaccgtaagccgccaggtattgatttacttagctagggagctcgccgcaggataccgcaggggcgacccacgattagtgaggttgttgaacaccaccgacgtctatcttctgcctagcctcaatcccgatgggttcgaacgggccagagagggggattgcggatttggtgatggcggtccctccggggccagcgggcgagataactctaggggtagagatctgaaccggtctttccccgatcagttcagcactggagagccgcccgctcttgacgaagtgccagaggtgcgcgccctcattgagtggatcagacgaaataagttcgttcttagcggaaacctgcacggcggcagtgttgttgccagctaccccttcgatgactctcctgaacacaaggctaccgggatttactccaagacatctgacgacgaagtgtttaagtatctggcgaaggcctacgcatcaaaccacccgatcatgaagactggagagccccactgtcctggcgatgaggatgagaccttcaaggacgggatcaccaatggcgcacactggtacgatgtggagggcggcatgcaggactataattacgtatgggccaactgtttcgagattactcttgaactgtcgtgctgcaagtaccctccagcctctcaacttagacaagagtgggaaaacaatagggaatctctgatcaccctgatcgagaaggtccacatcggggtgaagggattcgtgaaggattccatcacagggtccggcctcgaaaatgcaacaatcagtgttgccggcattaaccacaatattacaacaggcaggttcggggatttttataggcttctcgtacccggcacatacaaccttactgtcgtcctaacgggctatatgccactgaccgttaccaacgtcgtggtaaaggagggccctgcaacggaggtcgacttttctttgcgaccaacagtaaccagcgtgatacccgataccactgaagccgtgagcactgctagtactgtggccatacctaatatactgtctggcacatccagcagttatcaaccgatccaaccgaaggacttccatcatcaccacttccccgatatggaaatattcttacgccgattcgccaacgagtatccaaatataacacggctttattccctggggaaaagcgttgagtctagagagctgtacgtgatggaaatctccgataatccgggggtccacgaaccaggcgagccagaattcaagtatataggcaatatgcatggaaacgaggtggtcggtcgagagcttctgctgaaccttattgagtacctttgtaaaaacttcggaactgatccggaagtgacggatctcgtgcataataccagaattcatctaatgccgagcatgaaccccgatggatacgaaaaatcccaggagggggactccatctcagtgattggtagaaataacagcaacaactttgacctgaaccgaaacttccccgatcaattcgttcagatcacagatccaacccagcccgaaaccattgctgtaatgtcctggatgaaatcttatccgttcgtcctgtcagcaaacttacacgggggcagtctggtggtcaactaccccttcgacgatgatgagcagggccttgcaacttacagcaagtccccagatgatgcagtctttcagcagatagcactgtcctactcaaaggaaaatagccagatgtttcaggggaggccatgcaagaatatgtatcctaatgaatactttcctcatggcattaccaacggggccagctggtataatgtgcccggcgggatgcaggattggaattatctgcagaccaattgcttcgaggttactattgagctggggtgtgtcaaataccccctcgaaaaggagctgcccaacttttgggagcagaatcggcgcagtctcatccagttcatgaagcaggttcaccagggcgtaaggggtttcgttctggatgccacagatgggagggggattctgaacgctaccatatcagttgccgaaattaatcatcctgtcactacctataaaacaggagactattggagactcctagtgcccggcacttataaaataactgcaagcgccagaggatataaccccgtgaccaaaaacgtgactgtgaaaagcgaaggtgcgatccaggtaaattttactctcgtccggagctcaaccgactccaataacgaatccaaaaagggcaagggcgcgagctcctccacaaatgacgcttctgaccctactacgaaggagtttgagaccctgattaaagatctgtctgcggaaaatgggttagaaagcctcatgcttaggagcagcagcaatctcgctctggcactgtacaggtaccatagctacaaggatctgtctgagttccttaggggtctggtcatgaactatccgcatatcaccaatctgacaaatctggggcagtcaaccgaatacaggcacatatggtccctggagatttcaaataagcccaatgttagcgaacccgaagaaccaaagatacgcttcgtggccggaatacacgggaatgctcccgtagggacagagctcttgctggccctggcagagtttctgtgtctgaactacaagaaaaatcccgccgtgacccagctagttgatagaactcgcatcgtgatcgtgccgtctctgaatccagatggtagagaaagggcgcaggagaaggactgtacctccaaaatcggtcagacgaatgctcggggaaaagaccttgacacagactttactaataacgcaagccagccagaaactaaggcaatcatagagaacctgattcaaaaacaggacttttccttaagcgtcgccctggacggcgggtctatgctggtcacgtacccttatgacaagcccgtccagaccgtggaaaacaaagagacgcttaaacatttggctagtctgtacgccaataatcaccccagcatgcacatggggcagccgtcgtgccccaataagtcagacgagaacattcccgggggagtcatgagaggcgcagagtggcactctcaccttggcagtatgaaagactatagtgtgacatacgggcactgtcccgagatcacggtatacacttcctgctgctactttcccagcgctgcccgcctgccttcattatgggcagacaacaaacgctcactcctgtcaatgctggtcgaggtgcacaagggtgtccacgggtttgttaaggataaaactggaaagcccatctccaaggcagtcattgtcctgaacgagggcattaaggtgcagaccaaggaaggagggtactttcacgtgcttctagccccgggggtccacaacatcattgccattgccgacggataccaacagcagcactcacaagtctttgtccaccatgacgcagcctcctccgtcgttatagttttcgatacagataacaggatttttgggctgccaagagagctggttgttacggtttcaggggccacgatgagcgcactgatactaaccgcgtgcataatttggtgtatttgcagcatcaaaagcaaccgtcacaaagacggattccaccgtctcaggcagcatcacgacgaatacgaggatgagattcgcatgatgtccacgggaagcaaaaaaagtcttctatcccacgagtttcaagacgagacagatactgaagaagaaacactttacagctcaaagcattag

SEQ ID NO: 189711 - DNA, 558 bp, synthetic construct
  misc_feature 1..558: note = Description of Artificial Sequence: Synthetic coding sequence
  source 1..558: mol_type = other DNA
atgttcgagaccatggccatcgagatcgagcagctgctggcccggcttaccggggtcaacgacaagatggccgagtacacaaatagtgccggcgtgcctagcttaaacgcggcactgatgcacacactgcaacggcaccgagacatcctgcaagactacacccacgagttccataagactaaagccaacttcatggctattcgggagagggaaaacctaatgggatctgttcggaaggatatcgagtcgtacaaatctgggagcggagtgaacaacaggaggaccgagctgttcctgaaggagcacgaccatttgcgcaactctgaccggttgatcgaagaaactatatcgatcgctatggctactaaggaaaatatgacgagtcagcgggggatgttaaaatcaatacacagtaagatgaacaccctggccaatcgatttccagctgtaaactctttaatccaacgaatcaatcttcgcaagagaagagattccctgatcctggggggcgtgatagggatctgtacgattctcctcttattatacgcctttcactag

SEQ ID NO: 189712 - DNA, 525 bp, synthetic construct
  misc_feature 1..525: note = Description of Artificial Sequence: Synthetic coding sequence
  source 1..525: mol_type = other DNA
atggccgccggcaccagcagctactgggaggacctgcggaagcaggcccggcagctcgagaacgagctggatctgaagctggttagctttagcaaactctgtacatcctatagtcacagcagcaccagggatggccggcgagattcaagcgatactaccccattattgaacgggtcttcccaggacaggatgttcgaaaccatggcaatcgaaattgaacagctgctggcaaggttgacgggtgtaaacgataaaatggccgagtacaccaactctgctggcgtgcctagtctgaacgccgctttgatgcataccctgcagcgccaccgggacatcttacaggattacacccatgagtttcataaaactaaagcgaatttcatggcaatccgggaacgagaaaatcttatgggcagcgtccgcaaggatatcgagagctataaaagtgggtctggtgtaaataacaggcgcacagagctgttccttaaggagcatgaccacctccggaagggttttcagtggtag

SEQ ID NO: 189713 - DNA, 747 bp, synthetic construct
  misc_feature 1..747: note = Description of Artificial Sequence: Synthetic coding sequence
  source 1..747: mol_type = other DNA
atggccgccggcaccagcagctactgggaggacctgcggaagcaggctcgacagttggagaatgagctcgatctgaaactcgtgtcctttagcaaactctgcacctcctacagccactcaagcactcgggacgggagacgggattctagcgacacaacacccctcctgaacgggagctcccaggaccggatgtttgagacaatggctattgaaatcgagcagcttctagcccgacttaccggggtcaatgataagatggcggagtacactaattctgccggcgtcccgagtctgaatgccgccctgatgcatacgctccagcgccatagagacatcctccaggactatacccatgaatttcataagacaaaagctaactttatggccatcagagaacgcgagaatctcatgggctccgtgaggaaagacatcgagagttataaaagtggctcaggcgtgaataacagacgcactgaactgttcttgaaagaacacgaccaccttcggaacagcgaccggctgattgaggagacaatttcaatcgcgatggccactaaggagaatatgacatcacagcgtggtatgctgaaatctattcactccaaaatgaatacactggccaaccgattcccagctgtgaacagcctgatccagaggatcaatctgcgtaagaggagagacagtctgatcttaggaggtgtaataggaatatgtactattctgctgctgctgtatgcctttcattag

SEQ ID NO: 189714 - DNA, 528 bp, synthetic construct
  misc_feature 1..528: note = Description of Artificial Sequence: Synthetic coding sequence
  source 1..528: mol_type = other DNA
atggccgccggcaccagcagctactgggaggacctgcggaagcaggcccggcagctggagaatgagctggatctgaaactggtttcattctcaaagttgtgtacgagctatagtcattcttcgacgcgagatggcagacgcgatcgatattccagtgatactacgccactgctaaacggctcatctcaggaccggatgttcgagaccatggcgatcgaaattgaacagttgctagcacgtttaacaggcgttaatgataagatggccgaatacacaaatagcgccggggtccccagcctgaatgccgccctgatgcatactctgcagcgacatagagatatactgcaggtgatttactgggcccgggacgttttcattatcacaggagtctgggttttctttttcaatccgtgcatcgggtatgtgcacatctacttgaaggggcagagggagaagtccgaaaagataaacgctatgctgaaggggctggtgctcctctttttcggggtaactataatcaaattctag

SEQ ID NO: 189715 - DNA, 558 bp, synthetic construct
  misc_feature 1..558: note = Description of Artificial Sequence: Synthetic coding sequence
  source 1..558: mol_type = other DNA
atgttcgagaccatggccatcgagatcgagcagctgctggcccggctaacaggtgtgaatgacaagatggccgagtacacaaacagtgctggagtgcctagcctgaatgccgccctgatgcataccctgcagcggcacagggacatcctgcaagattatacccacgagtttcacaagacgaaagcaaatttcatggccatcagagagcgggaaaacttgatgggaagcgtacgaaaagatattgaatcatacaagtccggaagcggagtgaataataggcgcaccgaactcttcttgaaagagcacgaccacctgcggaattccgacaggttaattgaagaaacaatctcaattgcgatggctaccaaggagaacatgacaagtcagcgtgggatgcttaaaagcatccactccaaaatgaatacccttgcgaatcgattccctgcagtcaacagtctgatccagaggattaatctgaggaagcggcgagatagtctgattctgggaggggtgatcggcatctgcactattctgcttctgttatacgcatttcactag

SEQ ID NO: 189716 - DNA, 1350 bp, synthetic construct
  misc_feature 1..1350: note = Description of Artificial Sequence: Synthetic coding sequence
  source 1..1350: mol_type = other DNA
atgaccagcttctacagcaccagcagctgccccctgggctgcaccatggcaccaggcgcccggaatgtgtttgtgagcccgatcgacgtcggatgtcagcctgtagccgaggccaacgccgcctccatgtgcctcctcgcaaacgtagctcacgccaacagggttagggtggggagcacgccactcggacgtcccagcctgtgcctccctcctactagtcacaccgcgtgtccactgcctggcacatgtcatattccgggtaacatcggaatatgcggagcctatggaaaaaatacccttaacgggcacgaaaaagaaaccatgaagttcctgaatgaccgactagccaattacctggaaaaggtccgccagcttgaacaggaaaatgctgaactggaaactactctattggagcgaagcaagtgccatgagtccacagtatgcccagattaccaatcatactttagaaccatcgaggagctgcaacagaagatactctgttctaaggcggaaaacgctcgtctgattgtgcagattgataacgcaaaattagctgctgatgacttcaggattaaactggaatctgaacgatccctgcaccagctcgtggaggctgataagtgcggcacccagaaactgcttgatgatgccacactggccaaggcagatttggaggctcagcaggaatcactgaaagaggaacagctctctctgaagagcaaccacgagcaagaagtgaaaatcttgaggtcacaattgggtgagaagtttcgaatcgaactagacatcgaacctacaatagatctgaatcgtgtgttaggggagatgcgcgcgcagtacgaggctatggtggagactaatcatcaggatgtcgagcagtggtttcaggctcagagcgaaggaatatcccttcaggcaatgagttgtagcgaggagctccagtgttgccagagcgagattctcgaactgcggtgtacggtgaatgccctggaagtggaaagacaagcccagcatacccttaaagattgcctgcagaatagtctttgcgaagccgaggatagatacggcactgagcttgcgcagatgcaaagtctcatcagtaatctggaggagcagttgtcagagataagggcagatcttgaacggcagaatcaggaatatcaagttctgctggacgtgaaagcacgacttgagaacgaaatcgccacatacaggaacttgctggaaagtgaagactgcaagctgccatgcaacccttgcagcactcccgcctcctgtacttcatgtccttcatgcggacctgtgaccggcggaagcccaagtggacacggtgcctcaatgggccgctag

SEQ ID NO: 189717 - DNA, 639 bp, synthetic construct
  misc_feature 1..639: note = Description of Artificial Sequence: Synthetic coding sequence
  source 1..639: mol_type = other DNA
atggaccccctgttccagcagacccacaagcaggtgcacgagatccagtcatgcatggggagattggagaccgcggacaagcaaagcgtccacatcgtcgagaacgagatacaggcttcaatagaccaaatattctccagactggaacgactggagatcctgagtagcaaggaacctcccaataaacggcaaaacgctaggctaagagttgatcagctgaaatatgatgtccagcatctgcagacagctctgagaaatttccaacatagacgtcatgcacgtgagcagcaggagagacaaagggaagagctgctttcacgtaccttcacaaccaatgattccgacaccaccatccccatggatgaaagcctgcagtttaattctagtcttcagaaggtgcacaatggaatggatgacctgatcctggacggacataacattctcgacgggcttagaacacagaggctcaccctgaagggaacacaaaagaaaattctggacatagctaatatgctggggttaagtaataccgtgatgcgtttgatcgagaaacgggcattccaggacaaatattttatgattggcggtatgttactaacatgcgtagtcatgtttctggtggtgcagtatttaacttag

SEQ ID NO: 189718 - DNA, 588 bp, synthetic construct
  misc_feature 1..588: note = Description of Artificial Sequence: Synthetic coding sequence
  source 1..588: mol_type = other DNA
atggaccccctgttccagcagacccacaagcaggtgcacgagatccagagttgcatggggcgcttggagaccgcggataaacagagtgtgcacatcgttgaaaacgagattcaagcttctattgatcagatcttttctcgcctcgagcgtctcgagatcctgtcctctaaagaaccccccaacaaacgccagaacgcccgcctcagggtggaccagctaaaatacgatgtgcaacatctccaaactgcgttgcggaacttccagcatcgcaggcacgccagagagcagcaggaaaggcagcgggaggagttgctttcacgcaccttcaccaccaatgactccgataccacaattccaatggatgaaagtctgcagttcaattcgagcctacagaaggtgcacaatggtatggatgacctgattctggacggacataatattctcgacggtttacgtacccaaagactgactctgaaagtgggatccttactcggcgatcgagagaaggcttcttgtttcagtttgattcagcagttctccaattgtgtgtacatactgatcacctgccctcaaatcgtgattttctag

SEQ ID NO: 189719 - DNA, 699 bp, synthetic construct
  misc_feature 1..699: note = Description of Artificial Sequence: Synthetic coding sequence
  source 1..699: mol_type = other DNA
atggaccccctgttccagcagacccacaagcaggtgcacgagatccagtcttgcatgggccgcctggagactgcggacaagcagagtgtccatatcgttgagaacgaaattcaggcttcaatagatcaaatcttctcaagactcgagcgattagagattttgtcaagcaaagagcctccaaataagcggcaaaacgccaggctgcgcgtcgatcaactgaagtatgacgtgcaacatctgcagactgcattacggaacttccaacaccgtcgacatgcacgggaacaacaggaacggcaacgggaagagttgcttagcagaactttcactacaaatgacagtgatacaaccattcccatggacgagtcactgcaatttaactcaagtctgcagaaggtgcacaatggaatggacgaccttatcctggacgggcataacattctggatggactgagaactcagagactgacattgaaaggtacacagaagaaaatcctggatatcgctaatatgctagggctgtccaacacagtcatgcgactgattgagaaaagagcgttccaggataagtatttcatgatcgagaccagaagtcatcacgtggcacaaaacggcccggagcttctgtcttccagggatccccctgcgtccgcttccaggagtgccggaatcattgaattcagcgagaagatcacttag

SEQ ID NO: 189720 - DNA, 984 bp, synthetic construct
  misc_feature 1..984: note = Description of Artificial Sequence: Synthetic coding sequence
  source 1..984: mol_type = other DNA
atggccgccgccgccgccatggccgagcaggagagcgcccggaacggtggaagaaacagaggtggggtccagagggtcgagggcaagcttagagcttctgtggagaagggagattactacgaggcacaccaaatgtatcgcactctgttctttcgatacatgagccagtccaagcacaccgaagctagggagttgatgtattccggggcgctgcttttcttctcccacgggcagcaaaactctgccgctgatctgagcatgctggtgctagaaagtctggagaaggcagaagtagaagtggctgatgagctccttgagaacttagccaaggtattttcactgatggaccccaacagtcccgaacgcgttacctttgtgtctagggctctgaaatggagttccggaggttccggaaaactgggccatccccggctgcaccagttacttgccctgactctgtggaaggagcagaactattgcgagtcccgttaccacttcttgcatagcgccgatggggaagggtgcgcaaatatgttggtggagtacagtacatctagaggtttccgctctgaggtggatatgttcgtggcccaagcggtgctgcagtttctgtgcctgaagaataaatcaagtgcctccgtggtgttcacgacctatacgcagaagcatccaagcatcgaagatggaccgccctttgtggagccactcttaaacttcatttggttcctgcttctggctgtcgacgggggaaaactcacggtcttcacggtgctttgcgagcagtaccagccctccctgcgccgcgatccgatgtacaatgagtaccttgatcggattgggcaattgttttttggagtgccccccaagcagacgtcctcatacggcggcctgctaggtaacctgctgactagtttaatgggcagtagcgaacaagaagatggtgaggagtccccaagcgacggatctcctatcgagctagactag

SEQ ID NO: 189721 - DNA, 1779 bp, synthetic construct
  misc_feature 1..1779: note = Description of Artificial Sequence: Synthetic coding sequence
  source 1..1779: mol_type = other DNA
atggccctgcccgaggaggccaagatcaaggacgcctaccacatgcttaaaagacaaggtatcgtgcagtccgatccccctatccccgtggacagaacattgatcccgtccccacctccacgaccgaagaacccggtgtttgatgacgaagagaaaagtaaacttcttgctaagcttctgaaatccaaaaaccccgacgacctgcaggaggctaataaactaatcaagagtatggtgaaggaagacgaggcacggatacagaaagttacaaaacgtcttcacacccttgaggaagtgaataacaatgtgcggcttctgagcgagatgctgctacattactcacaggaagatagctcagacggcgaccgggaactaatgaaggaactctttgatcaatgcgagaataaacggcgcacgttgttcaaactagccagcgaaactgaggataatgacaattccctcggggatatcttacaggcgtctgacaatctttcccgagtcatcaatagctataagactattatcgaaggacaggttatcaatggggaagtggctaccctgactttacccgactccgagggcaactctcagtgttcaaaccagggcaccttgattgatctcgccgaactggacaccactaactccctgtccagcgtgctggccccggcacccactccccccagttctggaattcctatcctgcctccacctcctcaagcgtccggcccccctcggagcagatcaagtagccaggctgaggcaaccttagggccgagctcaacctcgaacgctctatcttggttggatgaagagctgttgtgcctgggcctcgccgatccagctcctaacgtgccacccaaggagagcgccggcaatagccagtggcatctgctgcagcgcgaacagtccgaccttgacttcttcagcccccgacccggcaccgcggcttgcggggcctccgatgcccctctgttacaaccaagcgcaccttctagctcttcctctcaggccccattgcctcctccttttcctgccccggtcgtccctgccagcgtccctgcaccctcagccggcagtagcttgtttagcactggtgttgcgccagcgcttgccccaaaagtggaaccagctgttcccggtcaccacgggttggccctggggaactccgctttacatcacctcgatgcactggaccagcttctggaagaagcaaaagtgacttcaggacttgtcaagcctacaacctctcctctgatcccaacaaccaccccagccagacccctcctacctttctctacaggaccaggatcaccattgttccagccgctatccttccagagtcaggggtcccctccaaagggacctgagttgtccttagccagcattcacgtaccactggaatctatcaagcccagtagtgcccttccggtcaccgcttacgacaagaatgggttccgcatcctgttccacttcgcaaaggaatgcccaccagggcgccccgacgtcttggtggtggtggtgtccatgctgaacaccgctccgcttccagtcaagagcatcgtgctgcaggccgccgtgccaaaaagcatgaaagtcaaactgcaaccgcccagtggcacggaacttagcccgttcagtccaatacagccacccgcagcaataacacaagtaatgttgttggccaatccccttaagaagcaggtgctgtccttcctgggcaaagcatgtctgcagccatgggggcaggctattttgctgaccacatcttgcctcgcatag

SEQ ID NO: 189722 - DNA, 1956 bp, synthetic construct
  misc_feature 1..1956: note = Description of Artificial Sequence: Synthetic coding sequence
  source 1..1956: mol_type = other DNA
atgaagaactgcggccggcggttccacaacgaggtgggcaagttccggttcctgaacgaattaattaaggtggtgtccccgaaatatctgggcgaccgcgtgtcagaaaaagtgaagactaaagtgatcgaactgttgtactcatggaccatggcactcccggaagaggccaagattaaagatgcataccacatgctgaaaagacaggggatcgtgcaaagcgaccctcccataccagttgacagaactttaatccctagcccacctcccagacccaagaaccccgtctttgacgacgaggagaagtccaagctgctggcaaagctcctaaagagtaagaacccagatgatttgcaagaggctaataagcttatcaagagcatggtgaaggaagacgaggcgaggatacagaaggttacgaagcggcttcatactctagaagaagtcaacaacaacgtgcggttactctccgagatgctgctgcactactcccaggaagattcctcagacggggatcgagagctcatgaaagagttgttcgaccagtgcgaaaacaagcggcgcaccctcttcaagctcgcatccgagactgaggacaacgacaattccctcggcgacattctgcaggcctccgacaacctcagtcgagtgatcaattcctataagacaatcatcgagggccaagtgatcaacggcgaagtggccactctaaccctacctgactctgaaggtaactcacaatgctctaatcaagggactctgatcgatctagccgagctggatactacgaacagcttatcctccgtgctggcgcccgcaccaacccccccttcatcaggaatcccaatccttccccctcccccccaggcctccggacccccgaggagcaggtccagcagtcaggccgaggccacactgggcccatcatccacctccaacgccttaagctggctagatgaggaactcctgtgcctcggcctggccgaccctgcccccaatgtgcctcctaaggagagtgccggcaactctcagtggcatctgctccaacgggagcagtccgatcttgattttttctcgcctaggcctggaacggccgcctgcggcgcatctgacgcgccactgctgcagccgagcgcacctagcagcagcagctcacaggccccactgcctccgcccttcccagctcccgtcgtgcccgcctccgtacccgcccctagcgccggaagttcactgttcagcacaggggtggcgccagccctggctccaaaggtggaacctgcggtgccaggccaccatggactcgccctggggaacagtgcgttgcatcatctggacgctctggaccagctcctcgaagaagccaaagtgactagcggtctggtaaagcccaccacctcaccgctgatccctaccacaactccagcccgccctttactcccattttctactggaccaggctcgcccctctttcagcccctgtcctttcaatctcagggctctccccccaaagggccggaattatcgctggcaagcatacatgtgcccctagagagcattaagccttcttctgcactgcccgtcacagcctacgataaaaatggatttcgcattcttttccactttgccaaagagtgccctcccggcagaccggacgtgctggttgtggtagtgtctatgctgaacaccgcaccactcccagtgaagtcaattgtgctccaggccgcagtgccaaaaagcatgaaggtgaaattgcagcctccctccggcacggagttgtcgcctttttctcctatccaacccccagccgcgattactcaagtaatgctgctggccaatccgctgaaggaaaaagtgcggctgaggtacaaactgacttttgccctcggagaacaactgtctacagaagtgggggaggtcgatcaatttccccccgttgaacagtggggtaacctttag

SEQ ID NO: 189723 - DNA, 1365 bp, synthetic construct
  misc_feature 1..1365: note = Description of Artificial Sequence: Synthetic coding sequence
  source 1..1365: mol_type = other DNA
atgagcgccggcggcccctgccccgccgccgccggcggcggccccgggggcgcgtcgtgttcggtgggagctcctggaggggtgagtatgttcagatggttagaagtactggagaaagaattcgacaaagctttcgtggacgtcgacttgcttctcggtgaaatagatccggaccaggccgatatcacatacgaagggcgccagaagatgacgtcgttatctagttgcttcgcacagctttgtcacaaagctcagtcagtctctcaaatcaaccacaagcttgaagcccagctggttgacctcaaatcagagctgacagaaactcaagctgaaaaggttgtcttggagaaggaagtccatgaccagcttcttcaactacactctatacagctgcaactgcacgccaagactggacaaagtgctgactccggcactatcaaagcaaagcttgagcgcgagctggaggctaataaaaaggagaagatgaaagaggcccagttggaagctgaagttaagttgttacggaaagagaacgaggccctgcgaaggcacattgccgtgctccaggcggaggtgtacggcgcccgactggctgcaaaatatttggataaagagcttgctggaagagtgcaacagattcaactccttggtcgcgacatgaagggtccagcccatgacaagttgtggaatcagctggaagctgaaatacacctgcaccgtcacaaaacagtaattagggcctgtaggggacggaatgacttaaagagacccatgcaggcccctcctggacatgatcaggacagcctgaagaagtctcaaggcgtgggccccatacgaaaagtcctacttctaaaggaggaccacgagggtctgggcatttctatcacaggcggaaaagagcatggggtgcccatcctgatttcggaaattcacccgggccaacccgcagaccggtgtggtggccttcacgtaggcgatgccatcttggccgtaaatggagtcaacctaagggatactaagcacaaggaggctgtgaccatattgtcccaacagcgtggtgagatagagtttgaagtggtttatgtagcacccgaggtcgacagtgatgacgaaaatgtggagtacgaggatgagtccggacaccgctacagactgtatctggatgaactggaaggaggtggaaaccctggtgctagctgtaaagatactagtggggagatcaaagtgctgcagggatttaacaaaaaagctgtgacagatactcatgaaaacggagacctcggcactgcgagcgagacacctcttgatgacggggcctcaaaactcgacgacctgcacacactgtaccacaaaaaaagctattag

SEQ ID NO: 189724 - DNA, 1389 bp, synthetic construct
  misc_feature 1..1389: note = Description of Artificial Sequence: Synthetic coding sequence
  source 1..1389: mol_type = other DNA
atgagcgccggcggcccctgccccgccgccgccggcggcggccccggaggcgcctcatgctcggtgggagcccctggaggcgtgtctatgttccgctggctggaggtgctggagaaggagtttgataaggctttcgtagacgtggacttactccttggagaaattgaccctgaccaagctgacataacgtacgaaggccggcagaagatgacgtccttgagcagttgcttcgcgcagctgtgtcacaaggcccaaagtgtttcccagatcaatcacaagctggaagcgcagctcgtggacctgaagagtgaactaaccgagactcaagccgaaaaggtagtgctcgaaaaagaggtgcatgaccaactgctgcagctccacagcatccagctgcagctacatgccaagactggtcaatcggcagacagtggaacaattaaagccaaactgagcggccctagcgtggaggaattggaaagagaactggaggccaataagaaagagaaaatgaaggaagcccagcttgaggccgaggtgaagctgctgcgcaaggagaatgaagccttacgccgccatatcgccgtcctgcaggccgaggtgtatggcgccagattggctgcgaagtacctggacaaagaattggctggtagagtacagcagatccaacttttgggacgggatatgaagggtccggcgcacgataaactctggaaccaattggaggccgagatccacctgcaccgtcataaaacggttatccgcgcatgccgggggcgtaacgatctgaagcgacccatgcaggctccaccgggtcatgatcaagatagccttaaaaagagccaaggagtaggacccattaggaaggtcctccttcttaaggaggatcacgaaggactggggatcagcattactgggggtaaagagcatggcgtgcccatactcatatccgaaattcatccaggccagccggccgaccggtgcggagggttgcacgtgggcgatgcaatcttggcagttaatggcgtcaatctgcgagataccaagcacaaagaggctgttactattctttcacagcagcgaggagagatcgaatttgaggtggtttacgttgcccctgaagtcgactcagatgacgagaatgtcgaatacgaagacgaaagtggccaccggtatcgcttgtacctggacgagctggaaggaggcgggaaccctggggcttcctgcaaagatacaagcggcgagataaaggtgctgcaaggcttcaacaagaaggcggtgacagacactcacgagaatggtgatttgggaaccgcctcagaaaccccgctggacgacggagccagtaagctcgacgacctgcacacattgtaccataaaaagtcatactag

SEQ ID NO: 189725 - DNA, 1389 bp, synthetic construct
  misc_feature 1..1389: note = Description of Artificial Sequence: Synthetic coding sequence
  source 1..1389: mol_type = other DNA
atgagcgccggcggcccctgccccgccgccgccggcggcggccccgggggggcgtcatgctctgtcggcgcacccggcggtgtgtctatgttcaggtggttggaggtgttagagaaagagttcgacaaggcctttgttgatgtggacttgctactgggggaaattgatccagatcaggcggatatcacctatgagggacgccaaaaaatgacaagcctctcttcttgctttgcccaactgtgtcacaaggcgcagtcagtgtctcaaatcaaccataagctggaggctcagctagtagacttgaagtccgaactgaccgagacccaggccgaaaaagtggtactggaaaaggaggttcacgatcagttgctccagctccactctatccagctgcagcttcatgccaaaactggacagagcgctgatagcgggacaattaaggccaaactcgtaagcagaagttcctcaaagatggaacgggagttagaggccaataagaaggagaagatgaaagaagcacagctggaagctgaggtcaaactgctaagaaaggagaatgaggccctgaggagacacatcgcggtcttacaggccgaggtgtatggagcccggttggcggccaaatatctggacaaagaactggccggaagggtccagcagatccagcttctaggccgtgacatgaagggtcccgcccatgacaagctttggaaccagcttgaagcagagatccacctgcatcgccacaagactgtcatccgcgcatgcagaggacggaatgacctgaaacgtcccatgcaggcccctcctggccacgaccaagatagtctcaaaaagagtcagggcgtcggcccaattagaaaggtcctcttactgaaagaggaccacgaaggcctgggcatatctatcacaggaggcaaagagcatggcgtgccaatcctgatttccgagattcacccagggcagcccgccgatcgttgtggaggccttcacgtcggagacgcaattctagccgtgaatggagtcaacctgagagatactaaacacaaggaggcagtgactatactatctcaacagcgtggcgagatcgaattcgaagttgtttacgtggcccctgaagttgattctgacgatgaaaacgtggaatacgaggatgagtctgggcaccgctaccgcctctacctggacgagctagagggcgggggcaaccctggggcctcttgcaaagacacgagcggtgagattaaagtcctgcagggattcaataaaaaggccgtcaccgacacacacgagaatggagacttgggcaccgcatccgagacaccactggatgacggagcaagcaaactggacgacctgcatacgctgtaccataagaagagctattag

SEQ ID NO: 189726 - DNA, 1659 bp, synthetic construct
  misc_feature 1..1659: note = Description of Artificial Sequence: Synthetic coding sequence
  source 1..1659: mol_type = other DNA
atggagcccgccatggagcccgagaccctggaggcccggatcaaccgggcaactaatcctcttaacaaagagctcgattgggcatcaatcaatgggttctgtgaacagctcaatgaagatttcgagggccctccgcttgcaacacggctgctcgcccacaagattcagagcccccaagaatgggaggctatccaagcactcacagtgcttgaaacttgtatgaagagttgcggaaaacgctttcacgatgaggtcgggaaatttagattcttgaacgagcttattaaggtggtgagcccgaaatatctgggaagtcgcacatcggaaaaagtaaagaacaagattcttgagctactatactcttggaccgtgggtctgcccgaagaagttaaaatcgcggaagcataccaaatgctcaaaaagcaggggatagtgaaaagtgatccaaagctcccggatgacacaacattccctctaccacccccaaggccgaaaaatgtgatattcgaggacgaagagaaatctaagatgctggcaagactgctgaagagtagccaccccgaggacctgcgcgcagcgaataagctgataaaggaaatggtccaggaggatcagaaacgaatggagaaaatatcaaagcgggtcaatgcaatcgaagaggttaataataacgtgaagctcttgaccgagatggttatgtctcactcccagggcggcgcagcagccgggtcatccgaggatttgatgaaagaattgtaccagcgctgtgagcggatgagaccaactttgtttcgcttggcatccgatacggaagacaacgacgaggcactcggactgagtgaccctacgccgccaagcggaccgtctctggacggcacaggctggaactcttttcagtcatcagacgccactgaaccgccggcccctgccctcgcccaggcaccatctatggaatccaggcccccggctcagacatctctcccagctagcagcggattggacgacctggacctgcttggcaagacactccttcagcaaagcctcccacccgagtctcagcaggtcagatgggaaaaacaacaacccacacctcgcctcacacttagggacttacagaataagtcttctagctgctcttcccctagcagtagtgccacctccttactgcacacggtgagccctgagccgcccagacctcctcagcagcctgtgccaaccgagctgtccctggcaagtatcaccgtccccctcgagagcattaagccttcaaacatcctgccagtgactgtatacgatcaacacgggtttaggatactattccattttgcacgcgaccctctgccagggcgatctgacgtactggtggttgtcgtgtcaatgttgagtaccgctccacagccaatacggaatatagtgtttcagtcggccgtgccaaaagtaatgaaggtaaagttacagcccccctcaggcacagagttacctgcattcaaccctatagttcacccctctgcaataacccaggtcctgttgctggccaatcctcagaaggaaaaggttaggctcagatataagttgacgtttactatgggcgaccagacctataacgagatgggtgacgtcgaccaattcccccctccagagacatggggatccttatag

SEQ ID NO: 189727 - DNA, 117 bp, synthetic construct
  misc_feature 1..117: note = Description of Artificial Sequence: Synthetic coding sequence
  source 1..117: mol_type = other DNA
atgaagagctgcggcaagcggttccacgacgaggtgggcaagttcagatttcttaatgagctaataaaggtcgtctcccctaaatacctcggcagcagaaccagcgagaaggtgtag

SEQ ID NO: 189728 - DNA, 1821 bp, synthetic construct
  misc_feature 1..1821: note = Description of Artificial Sequence: Synthetic coding sequence
  source 1..1821: mol_type = other DNA
atggagcccgccatggagcccgagaccctggaggcccggatcaacagagcaaccaaccctctcaacaaagaactagattgggccagcataaatggattctgtgaacagctgaacgaagacttcgaggggccccccctagcaaccaggttgttggcccacaagattcagtcgccgcaggaatgggaggcgattcaggcactgacttacctggggtctagaaccagtgaaaaagtgaagaacaaaattctcgagctgctgtattcatggacggtcgggttacctgaggaggtgaagatcgctgaagcataccagatgcttaaaaaacagggtatcgttaagtctgatcctaaacttccagatgacaccacatttcccctccctccgccgagaccaaagaacgtgatttttgaagacgaggaaaaatctaagatgctcgcgagattgctaaagtccagccatccggaggatcttagggctgcaaataaacttattaaagaaatggtgcaggaagaccagaagcgcatggagaaaatttccaagagggtcaacgcgatcgaagaggtgaataataatgtgaaattgctcacggaaatggtgatgagccacagtcaggggggcgctgccgctggcagctccgaagatctgatgaaagagctctaccaaaggtgcgagaggatgcgcccaacattgttccggctggccagcgacactgaggataatgatgaggcgttggcagagattttgcaagccaatgataacctcacgcaggtgatcaatctgtacaaacagctggtcaggggtgaggaggtgaacggggatgctactgccggttcgattccgggatccacgtccgctcttcttgacttatcggggctggacctgccccccgccggcacaacctatccagctatgcccactcgaccaggcgagcaagccagccctgaacaacctagcgcatctgtgagtctgttggacgatgaacttatgtcactcggactctccgatcccacaccaccttccgggcccagccttgatggaacaggatggaattccttccagtcatccgacgccacggaaccaccagctcctgccttggcccaggccccaagtatggaatcacgtccacccgcgcaaacctcactgcccgcttccagtggcttggatgatctcgacttactcggtaagacccttctacagcagtcgttgccacctgaatcccagcaggttagatgggagaaacaacagccaacaccccgacttactttgagggatcttcagaacaagagcagcagctgcagcagcccaagttctagtgccacgtctttgctccatacagtcagcccggaacccccacgccccccccagcagccagtgcctaccgagttaagtttggcctccataaccgtcccactcgaatcaatcaagccaagtaatattcttccagtaacagtatatgatcagcacggttttcgcatcctcttccatttcgctcgtgacccactgcctggccgtagtgacgtgctggttgtggttgttagcatgctttccactgctccccaacccatccggaacatcgtgtttcagagtgccgtcccaaaggtgatgaaggttaaactgcaaccaccctccgggaccgagttacctgcttttaaccctatcgtgcacccaagcgccattactcaggttttactgctggctaacccacaaaaggagaaagtccggctccgttataaactgacgttcactatgggcgatcagacctataatgagatgggagacgtggaccaattcccaccacccgagacctgggggagtctgtag

SEQ ID NO: 189729 - DNA, 1920 bp, synthetic construct
  misc_feature 1..1920: note = Description of Artificial Sequence: Synthetic coding sequence
  source 1..1920: mol_type = other DNA
atggagcccgccatggagcccgagaccctggaggcccggatcaacagggctaccaatcctctgaacaaagaactcgactgggctagcatcaacggcttttgtgagcaattgaacgaggattttgaggggccacccctggctactcgactgctggcccataaaatccaaagcccccaagagtgggaggccatacaagccctgaccgtcctggaaacctgtatgaagtcctgcggcaaaagatttcacgacgaagtaggcaagtttagattccttaatgagctgattaaggtagtgtccccaaaatacctggggtcgagaacaagcgaaaaggtgaagaacaaaattctggaactgctttattcctggactgtgggtctgccagaagaggtcaaaatcgccgaagcctaccaaatgttaaaaaagcagggcattgttaaatctgatcctaaactgcctgacgatacaaccttccctctgccccctcctcgccccaagaacgtgatattcgaagatgaagagaaatcgaagatgctggctcggctgcttaagtccagtcaccccgaggacctgcgagcagccaataagctaatcaaggaaatggtgcaggaagaccagaagaggatggagaaaatcagtaagcgcgtgaatgccatagaggaggtaaacaacaatgtgaagctcctgactgagatggtgatgagccactctcagggcggtgccgcggccggaagcagtgaggatcttatgaaggagctctaccagcgctgcgaacgtatgagaccaactctgtttaggctcgcttctgatactgaagataacgacgaagctctggccgagatcctgcaggccaatgacaatttaacacaggtgataaatctgtataagcagctggtcaggggcgaggaagtcaacggtgacgccacagctgggtcgattccaggctctacgtcagcactgctagatctgtctggcctagacctccccccagcagggacgacctacccagctatgcctacgaggccaggggaacaggcgagtccggagcaaccttcagcttctgtctccttgcttgatgacgaactcatgtctctcgggctgtctgatccaactcctccttcgggccccagcttggatggcaccggctggaactctttccagtcatcagacgcaacagaacccccagctccagcacttgcccaggctccgagtatggagagtcgtcctccggcccagacctctttgccggcctcctcaggcttggatgatctcgatctgctgggcaaaaccctgctacagcagtctctgccacccgaatctcagcaggttaggtgggaaaagcagcagcctacgccacgcttgacactccgcgatcttcagaataaatcctcttcctgtagcagtcccagttcgtctgcgaccagtttactccacaccgtttcccctgagccacctagacccccacagcagcctgttcccacagagctaagcctcgcaagcataacagttccattagaaagcatcaagcccagcaatatactgcccgtgactgtatatgaccagcacggctttcgcatcctttttcactttgccagggaccctctgcctggaagaagcgatgtgctggttgtggtggtgagcatgctgtccacagcaccacaaccaatacggaacatagtgttccagtcggccgtgccaaaagtgatgaaggtcaaactgcagcctccctcaggcacggaattgccggcatttaatcctattgtgcacccttccgcgattacgcaggtgctcttgctcgctaacccacagaaggaaaaggttcgacttcgctacaaattgaccttcaccatgggcgaccagacctacaatgagatgggagacgtcgaccagtttccccctcccgagacctgggggagcctttag

SEQ ID NO: 189730 - DNA, 1971 bp, synthetic construct
  misc_feature 1..1971: note = Description of Artificial Sequence: Synthetic coding sequence
  source 1..1971: mol_type = other DNA
atggagcccgccatggagcccgagaccctggaggcccggatcaacagggctacaaacccactgaataaagaactcgactgggcctccatcaacggattttgcgaacagcttaacgaggattttgagggtcctcctctcgcgacccgtctcttggcccataaaatccagagcccccaggagtgggaggccatccaggccctcactgtccgcaggggcgaggccacaattagaccgccaccatgcgacgataccaaggttctagagacatgcatgaagtcttgtggaaagcgattccacgatgaagtgggtaagttccggttcctcaacgaattgataaaagtggtctctccaaagtatcttggtagtaggacgtctgaaaaagttaaaaataagatcctggagctactatatagctggaccgtggggctccccgaagaagtgaagatcgctgaggcctaccagatgctgaagaagcaagggatcgtcaaatccgatcctaaactaccagacgacactacatttccactcccccctcctaggcccaaaaatgttatttttgaagacgaggagaaatccaaaatgctggcaaggttgctgaagtcttctcaccccgaggaccttcgcgcagctaataagcttattaaggagatggttcaggaagatcagaaaagaatggaaaagatctctaaacgcgtcaacgccatcgaggaagttaacaacaatgtgaaactgctcacagaaatggtgatgtcacatagtcagggaggcgcggcggcaggttcctctgaagatttgatgaaggaactgtaccagcgatgcgaacggatgcggcccaccctgtttagattggcttcggatactgaagacaacgacgaagctctcgcagagatccttcaagccaatgataacctgacccaggtcatcaatctgtacaagcagctggtacgcggagaagaggtcaatggggacgcaacggctgggagcatacctggcagtacaagcgccttgctggatcttagcgggctggatctgcctcccgcaggcactacctatccagctatgcctactcgacccggagaacaggcctccccagagcagccctccgcttctgtcagtttgcttgatgacgaactgatgtcattgggactgtctgaccctacgcctcccagcggaccatcgctggatggcaccggttggaactcgttccagtcatcagatgctacggagccgcctgcccctgccctggcccaggctccgagcatggaaagtcgcccaccagcgcagacctcgcttcctgcgagcagcggacttgacgatcttgatttactggggaaaacgctgcttcagcaatcacttccccctgagagccagcaggtgcggtgggagaagcagcagcccaccccccgcttgaccctccgcgacctgcaaaacaagtcaagttcctgctcctctcccagtagctccgcaacatcgctcttgcacacagtgtcccccgagccaccacgccccccccaacagccagtccccaccgaactgtcccttgccagtatcactgtgccattggagtctataaagccgtccaacattttacccgtaacagtctacgatcagcacggctttagaatccttttccatttcgcgcgcgaccccctgcccggacgtagcgacgtccttgtggtggtggtgtcaatgctcagcaccgcgcctcagccaatccgcaatatcgtgttccaaagcgcagtgccaaaagtaatgaaggtgaaactccagccaccctctggtacagagctgcctgccttcaatcccattgtgcatccatctgccatcactcaggtgctcctgttagcaaatccgcagaaagaaaaggttcgactgcggtacaagctaacctttaccatgggcgatcagacctacaacgagatgggtgacgttgaccagttcccccccccggaaacctgggggtcactttag

SEQ ID NO: 189731 - DNA, 1701 bp, synthetic construct
  misc_feature 1..1701: note = Description of Artificial Sequence: Synthetic coding sequence
  source 1..1701: mol_type = other DNA
atgaagagctgcggcaagcggttccacgacgaggtgggcaagttcagatttctgaatgagttaataaaggtagtgtctcctaagtacctcggcagccggacttccgaaaaagtaaaaaataagattctcgagctgctgtactcttggacggtaggtctgcccgaggaggttaaaatagccgaggcctaccagatgttgaagaagcagggaattgtaaagtccgacccgaaactcccagatgacacaactttcccacttccaccgccaagaccgaagaatgtgatctttgaggacgaggagaagtctaagatgctggctcgactgctgaagtccagccatccagaggacctacgcgccgctaacaaattgattaaggaaatggtgcaagaggatcagaagagaatggaaaagatctccaagcgagtgaatgcaatagaggaggttaataataatgttaagctgctaacagaaatggtgatgagtcacagtcaaggaggagccgccgctggaagcagcgaggacctcatgaaagagctctatcagcgctgtgagcgcatgcgcccgaccctgttccggctagccagcgacaccgaggataacgacgaagcactggccgaaatcctgcaggccaacgataacctcactcaggttatcaatttatacaaacaactcgtgcgcggagaagaggtgaacggcgacgctacggcaggatccataccaggatccacatcagccttactcgatttgtcgggtttagatctgccaccagccggtacgacatacccggccatgccaactaggcctggggagcaggcgagccctgaacagccttccgctagcgtgtcactgctggacgacgaactcatgagtctcgggctgagcgatcccaccccaccatccggccccagtctggatgggactgggtggaacagtttccaatcatccgacgcaaccgagcctcccgccccagcattagctcaggctccaagtatggaatcccggccaccagcccaaacctcattgccagcctcttcagggcttgacgacctcgatctgctgggaaagacattgcttcagcagagtctcccacctgagtcccagcaggtcagatgggaaaagcagcagcctaccccccgcctgactctgagggacttgcagaataaaagctccagctgttccagccccagttctagcgccacctccctcctccatacagtttctcccgagcccccacgaccaccccagcagcccgttcccaccgaactctcattggcctcaattaccgttcccctggaatccatcaaaccctcaaatatccttcctgtgacagtctacgaccagcatggcttcaggattctctttcatttcgctagggatccgttacctggccgaagcgacgttttggtagtagtggtcagcatgctctccacggctccccaacccatcagaaacatcgtattccaaagtgcagttccgaaggtgatgaaggtgaagttgcagccacctagcggcactgagctccctgcctttaatcccattgttcaccctagcgccatcacccaggtactattactggcgaacccacaaaaggagaaagtgaggctccggtataagctgaccttcaccatgggcgaccagacctacaatgagatgggggacgtcgaccagtttccgccccccgagacgtggggctctctgtag

SEQ ID NO: 189732 - DNA, 123 bp, synthetic construct
  misc_feature 1..123: note = Description of Artificial Sequence: Synthetic coding sequence
  source 1..123: mol_type = other DNA
atgaagagctgcggcaagcggttccacgacgaggtgggcaagttccgctttctgaatgagctgatcaaggttgtgtcacctaagtatctcggtagcaggacatcagagaaggtaaaaaactag

SEQ ID NO: 189733 - DNA, 330 bp, synthetic construct
  misc_feature 1..330: note = Description of Artificial Sequence: Synthetic coding sequence
  source 1..330: mol_type = other DNA
atgaagagctgcggcaagcggttccacgacgaggtgggcaagttcaggtttctcaatgagttaatcaaagttgtatcacccaaatacctcggctcaaggaccagtgaaaaagtgaaaaataaaattctggagctgctctactcctggaccgtcggtctgcctgaggaggttaaaattgccgaggcatatcaaatgctgaagaaacagggcattgtgaaaagcgacccaaagcttccagacgacactactttccccttgccgccccctcggccaaaaaatgttattttcgaggatgaggagaaaagcaaaatgctcgcgcggctattatag

SEQ ID NO: 189734 - DNA, 270 bp, synthetic construct
  misc_feature 1..270: note = Description of Artificial Sequence: Synthetic coding sequence
  source 1..270: mol_type = other DNA
atggagcccgccatggagcccgagaccctggaggcccggatcaaccgtgctacgaatccactcaacaaagagttggactgggcatcaattaacggcttttgcgagcagctcaatgaggacttcgagggcccaccattagccactagactgcttgctcataagatccaaagcccacaggagtgggaggccatccaggctcttaccgtacggcgaggggaggccacaattcgccctcctccctgtgatgacaccaaagggggccaggactag

SEQ ID NO: 189735 - DNA, 330 bp, synthetic construct
  misc_feature 1..330: note = Description of Artificial Sequence: Synthetic coding sequence
  source 1..330: mol_type = other DNA
atgaagagctgcggcaagcggttccacgacgaggtgggcaagttcaggtttttaaatgaacttatcaaggtggtctctccaaaatacctcggctcccgcacaagtgagaaggtcaagaacaagatactagagctcctgtatagctggactgtcgggctacctgaagaggtgaagatcgcagaggcttaccaaatgcttaaaaaacagggaattgttaaaagcgatccaaaacttcctgacgatactacatttcctctgcccccgcctcggcccaagaacgttatttttgaggacgaagagaagtccaagatgctcgcccgccttctctag

SEQ ID NO: 189736 - DNA, 327 bp, synthetic construct
  misc_feature 1..327: note = Description of Artificial Sequence: Synthetic coding sequence
  source 1..327: mol_type = other DNA
atgaagagctgcggcaagcggttccacgacgaggtgggcaagttccggtttctgaacgaactgattaaagtcgtcagtccgaagtatctgggttctcgcacatctgaaaaggtgaagaataagattctggagcttttgtactcatggaccgtgggtctccctgaagaagttaaaattgctgaggcctaccagatgctaaagaagcaggggatcgtgaaatccgaccctaagcttcccgacgatacaacattccctttgccacctcctagacctaaaaacgtaatttttgaggacgaggagaagtcgaaaatgttggctcgcttgtag

SEQ ID NO: 189737 - DNA, 57 bp, synthetic construct
  misc_feature 1..57: note = Description of Artificial Sequence: Synthetic coding sequence
  source 1..57: mol_type = other DNA
atgaagagctgcggcaagcggttccacgacgaggtgggcaagttccgatttctttag

SEQ ID NO: 189738 - DNA, 183 bp, synthetic construct
  misc_feature 1..183: note = Description of Artificial Sequence: Synthetic coding sequence
  source 1..183: mol_type = other DNA
atgaagagctgcggcaagcggttccacgacgaggtgggcaagttcaggtttctgaatgagttgatcaaagtggtctcccccaagtatttgggatctcgaacctccgaaaaagtcaagaacaaaatacttgagctcctctacagttggacagttgggctgcccgaagaagtcaagatcgcctag

SEQ ID NO: 189739 - DNA, 87 bp, synthetic construct
  misc_feature 1..87: note = Description of Artificial Sequence: Synthetic coding sequence
  source 1..87: mol_type = other DNA
atgaagagctgcggcaagcggttccacgacgaggtgggcaagttcagatttttgaatgaactgattaaggtggtgagtccaaagtag

SEQ ID NO: 189740 - DNA, 741 bp, synthetic construct
  misc_feature 1..741: note = Description of Artificial Sequence: Synthetic coding sequence
  source 1..741: mol_type = other DNA
atgacccccggcaccgccaaccgggccaccaaccccctgaacaaggagctcgattgggcatcgatcaacggtttctgtgaacagcttaacgaggatttcgaaggcccaccactggccactcggctgctcgctcacaagatccagtccccacaagagtgggaggccattcaagctttgactgtcctggaaacatgcatgaagtcatgcgggaaacggttccacgatgaggtcggcaagtttcggtttcttaatgagcttattaaggtggtgagtcctaagtatctgggctctcgcacctccgagaaagtgaaaaataagatccttgagttactatattcatggaccgtcgggcttcctgaagaggtcaaaattgcggaggcgtatcagatgctcaagaaacaggggatcgtcaaaagtgaccccaagcttcccgacgacaccacattccccctcccaccaccgaggcccaagaacgtcatttttgaggatgaggagaagtctaaaatgctggcccgtttgctgaaatccagtcaccctgaggacctgcgggctgcaaacaagcttatcaaggagatggtacaagaagaccagaaaagaatggagaagattagcaaacgcgtcaatgccatcgaagaggtaaacaataacgtgaagctcctcacggagatggtcatgagccactctcaaggtggagccgccgctggatcgagcgaggatctgatgaaagaactttatcagtag

SEQ ID NO: 189741 - DNA, 213 bp, synthetic construct
  misc_feature 1..213: note = Description of Artificial Sequence: Synthetic coding sequence
  source 1..213: mol_type = other DNA
atgaagagctgcggcaagcggttccacgacgaggtgggcaagttcagattcttaaatgagctgataaaggtggtgtcccctaagtacttggggagcaggaccagtgaaaaggtcaagaacaagatactggagctcttgtatagctggacagtaggtttgccagaagaagtcaaaattgctgaggcttaccagatgctgaagaaacagggatag

SEQ ID NO: 189742 - DNA, 2172 bp, synthetic construct
  misc_feature 1..2172: note = Description of Artificial Sequence: Synthetic coding sequence
  source 1..2172: mol_type = other DNA
atggccgaggccgagggcgagagcctggagagctggctgaacaaggccactaacccaagtaatagacaggaggactgggaatatatcattggattctgcgatcagatcaacaaagagctcgaaggcccacaaattgccgtgcgcctactcgcccataaaattcagtccccgcaggagtgggaggccctccaggccctgacggtcctcgaggcctgcatgaagaattgcggcagacgctttcataatgaagtgggcaagttcagatttctcaacgagctgataaaggtcgtgagccccaagtacctgggtgatcgcgtgtctgagaaggtcaagacaaaagttatagagctcctatacagctggacaatggccttaccggaggaggccaagatcaaggatgcttaccacatgctaaagcgacagggcatcgtacaatctgatcctcccattcccgtagaccggactcttattccttctccgccaccacgcccgaaaaaccccgtgtttgatgatgaggagaagagcaaactgctggccaagctcttgaagtctaaaaatcctgacgacctccaagaagcaaataagttgatcaaatccatggtcaaagaggatgaagccagaatccagaaagtgaccaaacgattacatacactggaggaagttaacaacaacgtgcgcctattgagtgagatgcttctccattatagccaggaggattcttcagatggtgaccgagaactgatgaaggagttgtttgatcagtgtgagaataagcgacggactctctttaagctggcaagcgagacagaggataacgataacagtctgggtgatattctccaggccagcgataacctgagtcgggtgattaattcctacaagactatcatcgaaggtcaagtgatcaatggcgaagtggctactctgacactgcccgactctgagggaaattcccagtgctcgaaccaggggacacttattgacttagccgaactagatactaccaactccctgagctccgtgcttgcccctgccccaactccccccagctctgggatccctatcctgccgccaccaccacaagctagcggacccccacgatccagatcaagcagtcaagcagaggctacattgggtccgtcaagcacctccaacgcccttagctggctggacgaagagttactgtgtctcggactggccgatcctgctcctaatgttccccccaaagaatccgcgggcaacagtcaatggcatctattgcagcgcgagcagtctgacttggatttttttagtcctcgccctggaactgccgcttgcggcgccagcgacgcacccctgctgcagccctcggctcctagtagcagctcatcccaagctcctttgccacctcccttcccagcgcctgtagttcctgcgtccgtgccagctccttctgctggctcgtcattattttccaccggggtggcccctgctctggcccctaaagttgagcctgcagtcccgggtcaccatggcctggctcttgggaattcagccctccatcacctggacgctttggatcagctcctcgaggaagccaaagtcacatccggcttggtgaagccaactaccagtcctctgatccccacgacaacccctgctcgaccgcttttgccattcagcaccggccctggctctccgcttttccagcccctgagttttcagtcacaagggtcgccccccaagggccctgagctctccttggcctctatccacgtcccactggaatcgatcaaaccgtccagcgctttacctgtgactgcctatgacaaaaatggctttcgcatactgtttcactttgccaaagagtgtccgcccggacgccctgacgttttagttgtggtcgtgtccatgctcaacaccgctcctctcccggtgaagtctatagtactccaggcagctgtgcccaaatcaatgaaagtcaaactgcagccaccctcaggaacagaactttcacctttttctcctatacagcctccagccgcgattacacaggtcatgttgcttgcaaacccacttaaagaaaaggtgcgcctccggtataagctgaccttcgcactcggtgaacagctgtctacagaggtgggggaagttgatcagtttccgccagttgaacagtggggaaatctctag

SEQ ID NO: 189743 - DNA, 2073 bp, synthetic construct
  misc_feature 1..2073: note = Description of Artificial Sequence: Synthetic coding sequence
  source 1..2073: mol_type = other DNA
atggccgaggccgagggcgagagcctggagagctggctgaacaaggctacaaacccttcaaatcgccaagaggattgggagtacattattggcttctgtgatcagattaacaaagagctagagggtcctcaaatcgcagtgcggctgctagctcataaaattcagagccctcaagagtgggaggctcttcaagccttgacctacctaggggatagggtgtccgagaaagtcaagacaaaggttatcgagctgttgtactcttggaccatggcactcccagaagaagctaagatcaaggacgcgtatcacatgttgaagcggcaaggaatcgtgcagtctgacccgcccattcctgtggatcgaaccctgatcccctccccgcccccccggccgaaaaaccccgtattcgacgacgaggagaaatccaaactgctggctaaactgttgaagtccaaaaatccagacgatctgcaagaggcaaataagctgattaagtctatggtcaaggaggatgaggcgagaatccagaaggtgacaaagcgacttcataccctggaggaagtcaataataatgttagactcctctcggagatgctcctgcattattctcaagaggactcttcagacggtgaccgcgaactgatgaaagagctgttcgatcaatgcgagaataagcgcagaactctttttaagttggcaagcgagactgaagacaacgataattcgctgggggacattctgcaggctagtgataatctcagtagggtgataaactcatacaaaacaatcattgagggacaggtaatcaacggagaggttgccaccttgacactgcccgacagcgagggaaactctcagtgctccaatcaaggaacattaatcgatctcgcagaattagacaccacaaactccctcagttccgtactggccccggctccaactcctccaagcagcggcatcccaatactgccccctcccccacaggcttcagggccgccgagatctcgctctagctctcaagcagaggccaccctgggcccgtcttccacgtctaatgccctctcctggctggatgaggaactcctttgcctgggacttgcagaccctgcacctaatgtgccacccaaggagagcgcaggcaatagccagtggcatctactacagagggaacagagtgacttggattttttttccccccgccctggcacggctgcctgcggggcatccgatgctcctctgctgcagcccagcgcgccttccagctctagctcacaggccccgcttcctcctcctttccccgcccctgtggtacctgcgtctgtgccggccccaagtgctggtagtagcttgttcagtaccggagtggcacccgccttagctcccaaggtggaacctgcagtgcccggccaccacggtctggcacttggaaacagcgctctacaccacctcgatgctttggatcagctgcttgaagaagcaaaggttaccagcggcctagttaaacccaccactagcccgctcatcccaacaaccaccccagccagacccctgcttcccttctccaccggaccgggttctccactgttccagccactcagtttccagtcccagggaagccctcctaagggtccagagttaagtctcgccagcatccatgtcccgctcgagagcatcaagcctagctcggccctgcccgtcacggcatacgataaaaatggatttcggatactctttcatttcgctaaggagtgcccacccggcagacccgatgtgctggttgttgtggtgagcatgctgaacactgcacctctcccagtaaagagcatcgttctgcaggctgctgtaccgaagagtatgaaggtgaaactgcagcctccatccggcacggagctctccccattttctcctatccagcctcctgcagctatcacacaggttatgttgctggccaaccccctcaaggagaaggttagactgagatacaagctgacctttgccctgggcgagcagctgtccacagaagtcggggaggtcgatcagttcccacctgtcgagcagtggggaaacctctag

SEQ ID NO: 189744 - DNA, 1956 bp, synthetic construct
  misc_feature 1..1956: note = Description of Artificial Sequence: Synthetic coding sequence
  source 1..1956: mol_type = other DNA
atgaagaactgcggccggcggttccacaacgaggtgggcaagttccggttcttaaacgaactgatcaaggttgtgtctcctaagtacctcggggatagagtatcagagaaggtgaaaacaaaagtgattgagctcctgtatagctggacgatggccctgcctgaagaagctaagataaaggatgcttaccacatgctgaaacggcagggtatagtccagagcgacccacctattccggtcgaccgcacccttatcccctccccgccaccccggccgaaaaacccagtgttcgatgacgaggaaaagagtaagcttctagccaagctgttaaagtcgaaaaacccagatgacctgcaggaggcaaataagctcatcaaaagtatggtgaaagaggacgaggctagaattcagaaggtgacaaagcggctgcatactctggaagaagtgaacaataacgtcaggctactgtccgagatgctgctgcattatagccaggaggacagctcggacggagaccgtgagttgatgaaagagttgtttgatcagtgtgaaaataagcgtagaacgctgtttaagctggccagtgagaccgaagacaacgacaacagtctcggcgatatcctacaggctagcgacaatttgtcccgggtgattaactcttacaaaacgatcattgagggacaggtcatcaacggggaagtggccacactaacactgccagattcagaggggaattcacagtgctccaatcagggtactttaatcgacctcgctgagctggacactacgaactctctttccagtgtccttgcaccagcacctactccaccctccagcggaataccaattctgccaccaccccctcaggcgtcaggtcccccccgctctcgatcttctagccaggccgaagccacactaggcccaagtagcacaagcaacgctctttcatggctcgatgaagaactgctgtgtctcggactcgcagatcccgcacctaatgtgcctcctaaggagagcgcgggcaattcccagtggcatctgttgcagcgggaacaatcggatcttgatttcttcagcccccggccaggcacagctgcctgtggtgcttccgacgcacccctgcttcagccaagtgcacctagcagcagctctagccaggcccccctgccacctccatttccagctcccgtggtgcctgcctcggttccggctcccagcgccgggtcgtccttattctctacaggggtggccccggctctggctccaaaggtggagccagccgtgccaggtcaccacggcctcgctctgggcaattccgcgctgcatcacctggacgcattggatcagttgttagaggaagccaaggtgacctccggactcgtcaaacctacaacttccccacttatcccgacgactaccccggctcggcccctcctgcccttctccacggggcctggatcaccactttttcaaccactttccttccagtcacaaggaagcccacccaaggggcctgaactctcccttgcgagcatccatgttccgttagagtccattaagccttccagcgccctgcccgtgactgcgtacgataaaaacggatttcggatccttttccattttgctaaggagtgtcctcccgggaggccagatgtcttggtggttgtagtatcaatgctgaatactgcccctcttcctgtgaagtccatcgtactgcaggccgcggttccgaagtccatgaaggtcaaactgcagccaccttctgggacagagctgagtcctttctccccaattcaaccacctgcggccattacccaggtgatgcttttggcaaaccccctcaaagaaaaggttcgcttgcgctataagcttacctttgctcttggtgagcagctgtccactgaggttggagaggttgaccagttcccgcccgttgagcagtggggcaacctctag

SEQ ID NO: 189745 - DNA, 462 bp, synthetic construct
  misc_feature 1..462: note = Description of Artificial Sequence: Synthetic coding sequence
  source 1..462: mol_type = other DNA
atggccgaggccgagggcgagagcctggagagctggctgaacaaggccactaatcctagtaaccgccaggaggattgggaatacatcatcggattttgtgaccagattaacaaagagctggaaggcccacagatcgctgtccgcctgctggcacataagattcagtccccgcaggagtgggaagcccttcaagccctcacagtgctcgaagcctgtatgaagaactgcggaagaaggtttcacaacgaggtcgggaaatttaggttcctcaatgaactgatcaaagttgtgtcccccaagtaccttggggacagagtgagcgaaaaagtgaagactaaagtaatcgagctgttgtattcttggaccatggccctgcccgaggaggcgaaaattaaggatgcctaccatatgttgaagaggcaggctttcagtcaggccgccgaaaaacagaaaccacggtag

SEQ ID NO: 189746 - DNA, 1806 bp, synthetic construct
  misc_feature 1..1806: note = Description of Artificial Sequence: Synthetic coding sequence
  source 1..1806: mol_type = other DNA
atggccctgcccgaggaggccaagatcaaggacgcctaccacatgctgaagcgccagggaatagtgcagtccgaccctcccatacctgtagaccgaactctgatacccagtcctcctccccggcccaagaatcccgttttcgacgatgaggaaaaaagcaagctgctcgcaaagctgcttaagagtaaaaatccggatgacctgcaggaggcaaacaagctcatcaagtccatggtaaaggaggacgaggcacggattcagaaggtgacaaaacggttgcacacgctggaagaggtcaataataatgtcaggctcctcagtgaaatgctgcttcactactcacaggaagattcatctgacggcgacagggaactgatgaaagagctattcgaccagtgcgagaacaagcgcagaacgctgttcaaactggccagtgaaactgaggacaatgacaactctctgggagatatcctccaggccagcgacaatcttagcagggtgattaactcttataaaactatcatagagggccaggtgatcaatggggaggtcgccacactaaccttacccgactctgaaggaaactcacaatgcagcaaccagggaacattaattgacctcgccgagctggacacaacgaactccctctccagcgttctggcccctgcacctaccccacccagttcagggatccccatccttcctccgccacctcaggcgtctggtcctcctcgaagtagaagttccagtcaggcagaggcaacattaggtccatcaagcacatcaaacgcactctcctggctggatgaagagttactctgccttggcctggccgaccctgcacccaacgtgccgcctaaggaatccgcgggcaacagccagtggcatctacttcaaagggagcaaagcgacctggacttctttagtcctcgtcctggcactgctgcgtgcggcgcaagcgatgctcccctgttacaacccagtgctccatcatcctccagctcacaggctccactacccccccctttcccggccccagtggtacctgcaagtgtgcccgccccatccgccgggtcttcacttttcagtacaggggtcgcccctgccttggccccaaaggtagagcccgcagtccctgggcaccatggcctggctttaggaaattcagcacttcaccacttagatgccttagatcagctgctggaggaagcaaaagtgaccagcggactcgtcaaacctaccacaagcccactgatccctactacaacccctgctaggcctcttttgcccttctcaacagggccggggtctccactgttccagcctctgtcctttcagtcccaagggagtccaccaaaaggacctgaactgagcctagcctcaattcatgtcccacttgagagtataaaacccagcagcgcattgccagtgaccgcttacgataaaaatggatttcgtatcttgttccatttcgccaaggaatgtccccctggcaggccggatgtgctagtggtggtggttagtatgctcaataccgctccacttcctgttaagtctattgtgttgcaggccgctgtgcccaagtcaatgaaagtgaagctacagcctccttctgggaccgaactgtcaccattctctccaatccagccccctgccgccatcactcaggtcatgctcctcgccaatccactgaaggaaaaggtccgactgagatacaagctgaccttcgctctcggcgagcagctgtcgacagaggtgggagaggttgaccaatttccccctgtggagcagtggggaaacctctag

SEQ ID NO: 189747 - DNA, 918 bp, synthetic construct
  misc_feature 1..918: note = Description of Artificial Sequence: Synthetic coding sequence
  source 1..918: mol_type = other DNA
atggccgccggcctggcccggctgctgctgctgctgggcctgagcgccggtggtcctgcccccgcgggggccgcaaaaatgaaagtagtggaggaaccgaatgctttcggcgtcaacaacccgttccttcctcaggcatctcgcctgcaggccaaacgggatcctagccccgtaagcggtcctgtgcatctatttcggctgtctggaaagtgctttagcctggttgagagtacatataagtacgaattctgtcccttccataatgtgacacaacacgaacagaccttcagatggaatgcttacagcggaatacttgggatatggcacgaatgggaaattgctaataatacattcactggaatgtggatgagggacggcgatgcctgcagaagccggtctagacagagcaaggtggaacttgcttgcgggaaaagcaaccgactcgcacatgtttcagaacccagcacctgcgtctatgccctcactttcgaaactcccttagtgtgccacccacatgcactcctcgtctatcccaccctgcccgaagcactgcagaggcagtgggaccaggtggagcaggatctggcagacgaacttataaccccccagggccacgagaaactgttgaggaccctcttcgaagatgctggataccttaaaacacctgaggagaacgagcctacacagctggagggcgggcctgattcacttggcttcgagaccctagaaaattgccgcaaggcccacaaggagttgtctaaggaaatcaaacgcctgaagggcctgctgacgcagcatgggatcccatatacccgcccgacagaaacgagtaatttagagcatctaggtcatgagacccctagggccaagtcacccgaacaactacgcggtgaccctggtcttcgtggctctttgtag

SEQ ID NO: 189748 - DNA, 4497 bp, synthetic construct
  misc_feature 1..4497: note = Description of Artificial Sequence: Synthetic coding sequence
  source 1..4497: mol_type = other DNA
atggacggcgccagcgccgagcaggacggcctgcaggaggaccggtctcactcgggcccaagcagcctcccggaggcgcctctaaaacccccaggtcccctggttcctccagaccagcaggacaaggtgcaatgtgctgaggtcaacagggcttcaacagagggagagtcgcccgacggtccagggcagggcggtctctgccaaaatgggcccaccccgccctttcccgatccgccatctagtctggaccctacgactagtcccgtcgggccagatgcatcccctggtgtggccggcttccacgacaacctgcgcaagtcacagggtacctctgccgaagggagcgtgcggaaggaagcactccagtcactgcggctctcccttcccatgcaggaaacccagttgtgctccacagatagccctttacccctggagaaagaggagcaggtccgacttcaggcccggaaatggctcgaggaacagctgaagcagtacagagtgaagcgccaacaggaacggtcatcccagccagctacaaagacccgactgttttcaacactggatccagaattgatgctgaatcccgaaaacttgcccagagcctccactcttgccatgactaaagagtacagttttctgcgaacatctgtgcctcggggtcccaaggtggggtctctgggccttcctgctcacccccgggaaaaaaaaaccagcaagagctcaaaaatccggtcactagcggattatcgaactgaggactctaacgccggcaatagtggtggcaatgttcccgcaccagattcaactaagggttctctcaaacagaacaggagctctgctgcttctgttgttagcgagatcagcttatccccagatactgatgacaggctcgagaacacatcgctcgctggagactccgtttccgaggtggacggtaatgattcagatagctcttcatactcatcagcttccacaaggggcacttatggtatcctgtcgaaaactgtgggcacccaggataccccctacatggtgaacgggcaggagattccagccgacacacttggccagttccccagcatcaaagatgtattgcaggccgccgctgccgagcaccaagatcagggccaggaggtgaacggcgaagtcaggagtcgccgggattcgatttgttcctctgtgagtttagagtcatccgcagctgagacccaggaggaaatgctgcaggtgttgaaagagaagatgcggttggagggtcagctcgaagcgctcagcctcgaggctagccaagccctgaaagagaaagcagaactacaggcacagcttgcagccctgagcaccaaactccaggcccaggtggaatgctcacacagctcccagcagcgtcaggacagcctctctagtgaggtggacacattaaagcaatcatgctgggatctggagcgggctatgacagatctgcagaatatgctcgaggcgaagaatgcttctctggcgagtagtaataacgatttacaggtggccgaggaacagtaccagagactcatggctaaggtggaggacatgcaacgctccatgttatcaaaagacaatacagtgcacgatctgagacagcagatgacggcactgcaaagtcagcttcaacaggtccagttagagagaacaacattgaccagcaaactcaaggccagccaggctgagatctccagtttgcagtctgtcaggcagtggtaccagcagcagcttgcactagctcaggaggcccgagtacgactgcagggagaaatggctcacattcaagtgggccagatgacccaagctgggttgttagagcacctgaagttggagaacgtatcgctttctcagcagctcaccgaaacacagcatcggagcatgaaggaaaaaggacgaatcgccgcccagttgcagggtatcgaggccgacatgctggatcaggaggctgcgtttatgcagatccaggaagctaagaccatggtggaggaagatcttcagcgccgcttggaagagttcgagggggaaagagagaggcttcagcggatggctgactccgcagcttcccttgagcagcaactggagcaggtcaagttgaccctgttgcagagagatcagcaacttgaggcccttcagcaggaacacctggatttaatgaaacaactcactttgacccaagaggctttacagagccgcgagcagagcctcgacgcattgcagacacactacgacgaactgcaggctcggcttggagaattgcagggcgaagccgcctctcgcgaagatacaatctgcctgttacaaaatgagaagatcattctggaagcggccttacaggccgccaagtctggcaaggaggagctggaccgcggagcccggaggctggaggagggaactgaggagacctccgagacactcgagaagctaagagaagagctcgccataaagtctggacaagtggaacatctccagcaggagaccgccgctttgaaaaaacaaatgcagaaaatcaaagagcagtttctccagcagaaagtaatggtggaggcctatcgtcgggatgcgacgagtaaagatcagcttatttccgaactcaaggcaacccggaaaaggttagactctgagctgaaggaactcaggcaggagctcatgcaagtacacggcgaaaagcgcacagctgaggcggagcttagccggttgcatagggaagtcgctcaggtgagacagcatatggccgacttagagggtcacctgcagtcagcccaaaaggaaagggatgagatggaaacccatctgcaaagcctacaattcgacaaagagcagatggtcgcagtaacagaagccaacgaagccctgaagaagcaaatcgaggagctgcagcaggaagctcggaaggctattactgagcagaagcagaaaatgcgtagactggggtccgacctgacttccgcccagaaggagatgaagacaaaacataaagcttatgaaaacgctgtgggcatcctttcacggcgattacaggaggccctggccgcaaaggaagcggcagacgcggaactgggccagttaagagctcagggagggtccagtgactcttcacttgcactccacgagcgtattcaggctctggaagcagagctgcaggctgtctcacactcaaagactctcctcgagaaggaactgcaagaagtgatcgccctgactagccaggaactggaagaaagtagggagaaggtcttagagctagaggatgagctccaggagtcccgcggctttagaaaaaaaattaaaagattagaagagagcaacaaaaaactagctcttgaattggagcatgaaaaaggcaagctcacgggcctcgggcaaagcaacgccgcactcagggagcacaactcgatcctggagacagccctagcgaagcgagaggctgatcttgttcagctgaatttgcaggtccaagctgtcttgcagcgcaaagaggaagaagaccggcagatgaagcatttggtacaggctttgcaagccagcctcgagaaagaaaaagagaaggtaaacagtctgaaggagcaggtggcggctgcaaaagtggaagcgggtcataatagaagacactttaaagccgccagcctggaactatctgaagtgaagaaggaacttcaggcaaaggagcacttggtccagaaactgcaagcagaggccgacgatctgcaaatcagagagggcaaacactcacaggagattgcccaattccaggcagagctggccgaggccagagctcaactacaactcctgcagaagcaattggatgagcagctcagcaaacagccagtcggaaaccaggagatggagaatctgaaatgggaggtggatcagaaagaacgagaaatacagtcgctaaagcaacagcttgacttgaccgaacaacagggccggaaggaattggagggcctgcagcagctgctacagaatgtcaagagcgagctcgagatggcccaagaagacctgtccatgacacaaaaagataaattcatgttgcaagcaaaagtctccgaactgaagaacaacatgaagacccttctgcagcagaatcagcagctgaaactggatctgcggcggggtgcagccaaaactagaaaggaacccaaaggagaggcaagtagtagtaatcctgcaacacctattaaaattcctgactgccctgtgcccgcctccttactcgaagagctcctcaggccgccacccgccgtgtccaaagagcccctgaagaatctgaactcctgcctgcagcagctgaaacaagaaatggactctcttcaacggcagatggaggagcacgcgctgacagtacacgagtccctgtcttcctggacccccctcgagccagccacagcatcacccgtaccccctgggggtcatgctggccctcgtggcgatccgcagcggcattcccaaagccgggccagcaaagaagggccaggtgaatag

SEQ ID NO: 189749 - DNA, 4173 bp, synthetic construct
  misc_feature 1..4173: note = Description of Artificial Sequence: Synthetic coding sequence
  source 1..4173: mol_type = other DNA
atggacggcgccagcgccgagcaggacggcctgcaggaggaccggtcccacagcggcccttcctctctacccgaggcacccttaaagcctccaggtccattagttccgccagaccagcaggacaaggtgcaatgcgctgaggttaatcgggcaagtaccgaaggcgagagcccagatggtcccggccagggtggcctttgtcaaaacgggcccaccccaccattcccagaccctccaagctcgttggaccctacaacctcacctgttggcccggacgctagtcccggcgtcgccggcttccacgacaatctgcgcaagagccagggaacctcggcagagggatcagtccggaaggaagccctgcaatccctgagattaagcctccccatgcaggagacccaactgtgtagcaccgattcgcctctccccctggagaaagaagaacaggtgaggctccaagctcggaaatggctggaggaacagctaaaacagtatagagtaaaacgccaacaggaaaggtccagtcagcccgcgaccaagaccagactgttttcgacgctggatcctgagctgatgctgaaccccgagaaccttcctcgtgcctcaacacttgctatgaccaaagagtatagcttcctacgcacgagcgtgcccagaggacccaaagttggaagcttgggcttacctgcgcatcccagagagaagaaaacatctaagagcagtaagatcagaagtctggccgattacagaacagaggacagtaatgcaggtaacagcggcggcaacgtgcccgcaccagatagcacgaaaggatctttgaagcagaataggtccagtgcagcatcagtggtctctgagatttctctgtcccccgacactgacgaccgcctggagaatacaagtctggccggggacagcgtgtcagaagtcgacggtaacgatagtgatagctcctcctacagcagcgccagcactcgaggcacatacgggatcctcagcaaaacagttggaacccaagacacgccctatatggtaaatggtcaagaaattcccgctgacaccctcgggcagttcccatctatcaaagacgttctacaggctgccgcggccgaacaccaagatcagggtcaggaggtgaacggggaagtcaggagcagacgggactcgatatgctcctctgttagtttagaaagctcagctgcggagacacaggaagagatgctgcaagtgttgaaggaaaaaatgcgcctggagggtcagctcgaagccctgtccctggaagccagccaagcgctgaaagaaaaagcagagcttcaagcacagcttgcagcactttcgactaagctgcaggctcaggttgagtgcagtcacagcagccagcaaagacaggattcattgtcttctgaggtcgatacactgaaacagagttgttgggacctggaacgggccatgacagatctgcagaatatgcttgaagcaaaaaacgcttctcttgcaagttcgaacaacgatttacaagtggctgaggagcagtaccagaggcttatggccaaagttgaggatatgcagagatcaatgctttctaaagacaataccgtccacgatttgcgtcagcagatgacagccttacagtctcaacttcagcaggttcagcttgaacggacaactctgacctcaaaactgaaagctagccaggccgagattagcagtcttcaaagcgtgaggcagtggtaccagcaacaactggccctcgctcaggaggcaagggtacggcttcagggtgagatggcacacatccaggttggccagatgacccaggcgggcctgttggagcatttaaaactagagaatgtgtcactatcccagcagctcacagaaactcaacatcgctccatgaaggagaaaggacggatcgccgcccagttacagggcatagaagccgatatgctggaccaggaggcggcattcatgcagattcaggaggcaaaaactatggtggaggaggacctgcagcgacgactcgaggagttcgagggcgaaagggaacggctccagcggatggctgatagcgccgccagcctggagcagcaattggaacaggtgaaattgaccctcttgcagcgcgatcaacagctggaggcgctgcaacaggagcacctggacctgatgaaacaacttaccctgactcaggaagccctgcagtcacgggaacagtccctcgatgccctgcagacgcactacgatgagctgcaagcccgtctcggggagctgcaaggggaggcagctagccgagaggatactatttgcctgttgcagaatgaaaagatcatcctcgaggctgccctccaggccgccaagtctggcaaagaggagctggataggggggcgcgaaggcttgaagagggcacagaagagacgtccgaaactcttgagaagctgcgcgaggagttagccattaagtcaggccaggtcgagcacttgcagcaggagacagcagcactgaagaagcagatgcaaaaaatcaaagagcagttcttacaacaaaaagtgatggtggaagcataccgacgcgacgctaccagcaaggaccagttaatctccgaacttaaggctactagaaaaagacttgatagcgagctcaaggagttacgccaggagctgatgcaggtgcacggcgaaaaaaggactgctgaagccgagctgtcacgcctccaccgagaagtagctcaagtccgccagcatatggccgatctggaagggcacctccagtcagctcagaaggaaagagatgaaatggagactcaccttcagtccctgcaattcgataaagaacaaatggtggcagttaccgaggccaacgaagcactgaagaagcagattgaggagcttcagcaggaggccagaaaagctattactgaacagaaacagaagatgcggcgcctgggtagtgatctgaccagcgcacaaaaagaaatgaaaaccaagcacaaggcttatgagaacgcagttggcatcttatcacggcggctgcaggaggctcttgccgcgaaggaggcagcagacgccgaactggggcaactgagagctcagggcggatcctctgattcttccctcgctctgcacgagaggatacaagcgctagaggcggaattgcaggcggtgtcgcacagcaaaaccctgctcgagaaggaactgcaggaggtcatagcattaactagtcaggagttagaggagagcagagagaaggttttagagcttgaagacgagttacaggagtcacgaggtttccgcaagaaaatcaaaagattggaagaatccaataaaaaactggcactggaactcgaacacgagaaagggaaactgacgggcctcggacagagtaacgccgctctgcgcgagcacaactctatcttggagaccgcactggctaagagggaagctgacctggtgcagttgaacctccaggtccaggcagtgctccaacggaaggaggaggaagatcgccagatgaagcatcttgtgcaagcgctccaagcaagtcttgagaaagagaaagagaaagtaaacagtctaaaggagcaggtggcggcagcaaaggtcgaggcgggccacaataggaggcattttaaggcagcttccctggaattgtcagaagttaagaaagagctccaggccaaggaacatctggtgcaaaagcttcaggcggaagctgacgacttgcagattagagaggggaaacatagtcaggaaatcgctcaatttcaggcggaattggccgaagcgcgtgctcagttgcagctcctgcagaagcagctagacgaacaactgtccaaacaacccgtaggcaaccaagagatggagaatctgaagtgggaagtcgatcaaaaagaacgggagatacaaagcttgaaacagcaactggacctcactgagcagcaggggagaaaagaactcgagggcctgcagcagctgctacagaatgttaagtctgagcttgagatggcccaggaggacctctccatgacacagaaagacaagtttatgttacaggcaaaagtgtcagagctcaaaaataacatgaagaccctgttgcaacaaaaccaacagttgaaattagacctgaggcgcggcgcggctaaaactgtgctgcgccctgcttccctcccagggtag

SEQ ID NO: 189750 - DNA, 3405 bp, synthetic construct
  misc_feature 1..3405: note = Description of Artificial Sequence: Synthetic coding sequence
  source 1..3405: mol_type = other DNA
atggacggcgccagcgccgagcaggacggcctgcaggaggaccggagccactctgggccttccagcctcccggaggcacccctcaaaccccctgggccactggtcccaccagatcagcaggataaagtgcaatgcgccgaagtcaaccgcgccagtaccgagggagagtcccccgatggacctggccagggaggactctgtcaaaacgggcccactccaccttttccggatcctcccagctctcttgacccaactacgtctccagtgggtccggacgcatctccaggtgttgcaggattccatgacaacctgcggaaatcacagggtacgtccgctgaggggtccgtgcgtaaagaggctctccaaagcctgagactgagtctgccaatgcaggagacacagctgtgtagtacagactcacccctcccactcgagaaagaagagcaagtacggcttcaggcgcggaaatggctcgaagaacagctgaagcagtatagggttaagcgccagcaggaacgctcatcccagcccgccaccaagacaagacttttttccaccctagatccagagctcatgctgaacccggagaacctcccccgggccagtaccctcgctatgaccaaagaatatagcttcctcagaaccagtgttcctcgcgggcctaaagttgggtctctaggcctccctgcacacccaagggagaagaagacatccaaatcatcaaagattagatctctcgcagattatcgcaccgaggactcgaatgcaggtaactctgggggcaatgtgcctgctcccgattcaacgaaggggtctttaaagcagaataggagttccgccgctagcgtggttagtgaaatctccctgagccccgacacagacgaccgactggagaacaccagcctggcgggcgactcagtgtcagaagtcgacgggaatgactcagattcaagtagctattcctccgcgtctactagagggacatacggcatcctctctaaaacagtaggcactcaggacaccccctacatggtgaatggacaggaaatccctgctgataccttggggcagttcccttccattaaagacgtccttcaagccgccgccgccgagcatcaagaccagggccaggaggtaaacggtgaggtacgtagtagacgggattcaatttgctcaagcgtatccctggagtcatctgccgccgagactcaggaagaaatgctccaggttctaaaagagaagatgaggctagaaggacagcttgaggccctatccctggaggcaagccaggcccttaaagaaaaagccgagttgcaggcacagcttgccgccctgtcaacaaagcttcaggcccaggtggagtgttctcactcaagccagcagcggcaagattctctttcatcggaggtggatacccttaagcagtcttgctgggacctggagagagcaatgactgacctgcagaatatgctggaggccaaaaacgcaagcctggccagcagcaacaacgatctgcaagtggcagaggagcaataccagcgactgatggcgaaggtggaggatatgcagagaagtatgctgtccaaagacaataccgtacatgatttgcggcaacagatgacggcactgcagtcccagcttcaacaagtgcagctggagagaactaccttaacgagcaaactgaaggcttctcaggcggagatatccagcctccagtccgtgcggcagtggtaccaacagcagctggctctagctcaggaggccagagtccggctgcagggtgagatggcccacattcaggttggtcagatgactcaggcgggcttattagagcatcttaagctagagaacgtgtcactttcacaacagctgaccgagacacaacatcgctccatgaaagagaagggcaggatagcagcccagcttcaaggcattgaagccgacatgctggatcaggaggccgccttcatgcagattcaggaggcgaaaaccatggtcgaggaggatttgcagagaagattagaggaattcgaaggtgagagggagcgcctccaacgcatggctgacagcgcagcatctttggaacagcagttagagcaggtgaaactgacattgctgcagcgcgatcaacagctcgaagccctccagcaagaacaccttgacctgatgaagcagctcactcttacacaggaagcccttcaatccagagagcagagcttggacgccctccaaacccactacgatgagttgcaagcacgcctaggggaactgcagggagaagcagcctccagggaagatacaatatgtctgctccagaacgaaaaaataattctggaagccgcattgcaagcagctaaatcaggaaaagaagagctggacagaggggcacgccgtctggaggagggtactgaagagacaagcgaaaccctcgagaaactcagggaagagctggcgattaagtcagggcaggtcgagcacctacagcaggaaaccgcggctttaaagaagcaaatgcagaaaatcaaagagcaatttctccagcagaaggtgatggtcgaagcttatagaagggatgctacatccaaagaccagctgatatcagagctgaaggcgaccaggaagaggctggattctgagttaaaagagctgcgccaggagctgatgcaggttcacggagagaagaggacggcagaggcagaattgtctcgactgcacagagaagtggctcaagtcagacagcacatggccgacctggaaggacatctgcaaagcgcgcagaaggagagagatgaaatggagacacatttgcagagcctgcaatttgataaggaacagatggtggctgtgaccgaggcaaatgaggctctgaagaagcagattgaagaacttcagcaggaagcaaggaaggccataaccgagcaaaaacagaagatgaggcggcttggcagcgacctcacatcggcccaaaaggaaatgaaaacaaagcacaaagcatacgaaaatgcggtcggcattctgagtaggcgcttgcaggaggctctcgccgcgaaggaagcagccgatgccgaactggggcagttacgcgcacagggtgggagttctgacagctccctcgctttacacgagagaatccaggccctcgaggcggaactacaggccgtaagtcactctaagaccctgcttgagaaagaactgcaggaagtcatcgcgctcacctctcaggagctggaagagtcccgcgagaaagtgttggagcttgaagacgaggtgaggcctggacatctgctctggcgtcagagaggagccggtcacgtgtccccaggtcacgcagccacgcgcgaaacaaggcgcaccaaactccacagagtgccttcagtagccacattcggggttgccacattttag

SEQ ID NO: 189751 - DNA, 6693 bp, synthetic construct
  misc_feature 1..6693: note = Description of Artificial Sequence: Synthetic coding sequence
  source 1..6693: mol_type = other DNA
atgttcaagaagctgaagcagaagatcagcgaggagcagcagcagctgcagcaggccctcgcacccgcccaagcttcatccaatagcagcacccccacaaggatgcgctctaggacatccagctttacagaacagctcgacgagggcacccctaatcgagagagtggagatactcagagcttcgctcagaaactgcagctgcgggtgcccagtgtggagagcctgtttcggagcccgattaaggagagcttgttcagatcctcgagtaaagagtctctggttcggaccagcagcagggaatccttgaacaggttggatctcgatagctcaactgcctcttttgatccccccagcgacatggactccgaagccgaagatctggtagggaattctgattccctgaacaaggaacagcttattcaacgacttcgacggatggaacggagcttatcgagttacagaggaaaatactcagagctggtgacggcctaccagatgctgcagagagaaaagaaaaagttacaggggattctgtcccaaagccaggacaaaagcttgcggcggattgcagagctccgcgaggagctgcagatggatcagcaggccaaaaaacatctccaggaagagttcgatgccagtcttgaagagaaggatcagtacatctccgtgctccagactcaggtatcattactgaagcagcggttacgcaacggacctatgaatgttgacgtgctgaaacctctgccgcagctcgaaccccaggccgaggtgttcaccaaggaagagaacccagagtcagatggggagccagtggtggaggacggaacctcagtgaaaaccctggagaccctccagcagcgagtcaaacgacaagagaacctgcttaaacgctgcaaagagacaatccaaagccacaaggagcagtgtaccctcctcacatcagagaaggaagccctgcaagaacaactcgacgaacgacttcaggagctggagaagattaaagacctacacatggcggagaagactaaactcattacacagttgagggatgcaaaaaatctcatagaacagctggaacaggataagggaatggtgatcgccgagacgaagcgccagatgcacgagactcttgaaatgaaggaagaagagattgcgcagcttcgatccagaataaaacagatgaccacccaaggcgaggaacttagagaacagaaagagaagagcgaaagagctgcattcgaggaactcgagaaggccctctccaccgcgcagaaaacggaggaagcgcgaaggaagcttaaagcagagatggacgagcagattaaaaccatcgaaaagacaagtgaagaagaacgaatttcgctgcagcaggaattgtctcgcgtgaaacaggaggtggtcgacgtgatgaagaagagctctgaagagcagatcgcgaaactccagaagctgcatgagaaagagttggcgagaaaagagcaggagctaactaaaaagctccagaccagagaacgggagttccaggagcagatgaaggtggcattagagaagtcccaatctgaatatctgaaaatttcccaggagaaagagcagcaagagagtctggctctggaagagctggagctccagaagaaggccatcctaaccgaatcagagaataaactgcgagatctgcagcaagaagccgagacttatagaactagaattctagaactcgagagctcgcttgagaaatccctgcaagagaataagaatcaatcaaaagatttagctgtgcacctggaagccgagaagaacaagcataataaggaaattacagtaatggtcgagaagcataagactgagctcgagtcccttaagcatcagcaggatgccctgtggactgagaaacttcaagtgctcaagcagcagtaccaaacagagatggaaaagcttcgggagaaatgcgaacaagaaaaagagaccctgctgaaagacaaagagatcattttccaagcacatatcgaggaaatgaacgaaaagaccctcgagaagctggacgtcaagcaaaccgagcttgaaagcctcagctccgagctctccgaagtgctgaaagcccgtcataagctagaggaggagctgtcagtccttaaagaccaaacggataagatgaaacaggagcttgaggccaaaatggatgaacagaaaaaccaccatcagcaacaggtcgacagcatcatcaaggaacatgaggtctccatccagcgcacggaaaaagcccttaaggaccagattaatcagctggaattgctcctgaaagaaagggataagcacctaaaagaacatcaagcccacgtggagaatctggaggccgatattaaacggtctgagggggagctgcagcaggcctcagcaaagcttgacgtgttccagagctaccagagcgcgacccacgaacaaacaaaggcctacgaggagcagctagcccagttgcagcagaaactattggacctagaaactgaaagaatcctactcacaaaacaggtggccgaagtggaagcccagaagaaagacgtctgtaccgagctcgacgcccataagatccaagttcaggatctgatgcagcagcttgagaaacagaactcagaaatggagcagaaagtaaaaagccttacgcaggtgtacgagtcaaagctggaagatgggaataaggagcaggagcagacaaaacagatcctggtcgagaaagagaatatgattctgcagatgcgcgaaggtcaaaagaaggagatcgagatcctgactcagaaactgagcgctaaagaggactcaatccatatcctgaacgaggaatacgagaccaagtttaaaaatcaggaaaagaagatggagaaggtgaagcagaaggccaaggaaatgcaagagacactcaaaaaaaaactgctcgatcaggaggccaagctaaaaaaagagttggaaaatacggcgttggagctctctcagaaggagaaacagttcaatgcaaagatgctggaaatggctcaagctaacagcgcaggtatatctgatgccgtgtcaaggcttgagactaaccaaaaggagcaaatcgagagtctcactgaagttcatcgtcgcgagctaaatgacgtcatcagtatatgggagaaaaaactcaatcagcaggctgaggagttgcaagaaattcacgagatccagcttcaggagaaggaacaggaagtggcagagctcaagcagaaaatcctgctctttggctgcgagaaagaagaaatgaacaaggagattacgtggctgaaagaggagggtgtcaagcaagataccaccctgaatgagctgcaagagcaattgaagcagaaatctgctcacgtgaattccctggcacaggatgagaccaagttgaaggcccaccttgaaaaactggaggtggacttgaataaaagcctaaaggagaacacatttctgcaagagcaactcgttgagctgaagatgctggcagaagaggacaagagaaaggtgagcgagctcacaagcaagctcaagactactgacgaagagtttcagagcctgaagtccagtcacgagaaaagtaacaaatcactggaagacaagtcccttgagttcaagaagttgtccgaggaactggccattcaattggatatctgttgcaagaaaactgaggctctcctggaagcgaaaactaacgagcttattaacatctcttcaagtaagactaacgccatcctgtcaagaatttcccactgccaacaccgtacaaccaaggtgaaggaggcacttttaataaagacctgtaccgttagtgaactggaggctcaattgcgtcaactgactgaggagcaaaacaccctgaatatcagtttccagcaggctacacaccagctggaggagaaagagaatcagatcaaatcaatgaaggcagacatagagtctctagtgaccgaaaaagaagcgctgcagaaggagggggggaatcagcagcaggccgccagcgagaaagaatcatgcatcacacagctgaagaaggaactctctgaaaacattaacgccgtcacactcatgaaagaggagctcaaagagaaaaaagtggaaatatcgagcctttccaaacagctgacagacctcaacgtgcagctgcagaactcgatcagcctgtccgagaaagaggctgccatctcctctctgcggaagcaatacgatgaagagaagtgtgaacttctggaccaagtccaagacttgagctttaaggtggacactctgagtaaagaaaaaattagtgctcttgagcaggttgatgactggtctaataagtttagcgaatggaagaaaaaggcgcagtccagattcacccaacatcagaacactgtcaaggaattgcagatccagcttgaactgaagtcgaaagaagcttatgagaaagacgagcagattaacctgttaaaagaggaattggatcagcagaataagaggttcgactgcttgaaaggagagatggaggacgataagtctaagatggaaaaaaaggagtccaatctggagaccgaacttaagtctcagacagctcgaattatggagttagaggatcacatcacacaaaaaaccatagagatcgagtcactcaatgaagtattgaagaattataaccagcaaaaagacatcgagcataaggagctggtacagaaattacagcatttccaggaactcggagaagagaaggataacagggtaaaggaagccgaagaaaagattttgaccctggagaaccaagtgtactctatgaaagctgaactggagaccaaaaaaaaggaactggagcatgtcaacctgagcgttaagagcaaggaggaggagttaaaggcgctggaggatcgcctagagtctgaatcagcagcaaagctagctgagttaaaaaggaaagcagaacagaagattgccgccatcaagaaacagctgctgagccagatggaggagaaagaagaacaatacaaaaaaggaaccgaatctcacctgtcagagctcaatacgaaactacaggaaagagaacgcgaggtacatattctcgaggaaaagctgaaatccgtggagagctcacagtctgagaccctaatagttccacgatctgccaaaaacgtggcagcttatacagagcaagaagaagccgactctcagggatgtgtgcaaaaaacttatgaggagaaaatcagcgtcctccaacgcaacttgacggaaaaggagaagcttctacagcgggtgggccaggaaaaagaggaaactgtgagttcccacttcgaaatgcgctgtcagtaccaagagcggttaattaagcttgagcatgcagaggcgaagcagcacgaggatcagagtatgattggccatttgcaagaggagcttgaagaaaagaacaagaaatattccttaatcgtggctcagcacgtggagaaggaaggtggtaagaataatatccaggcaaagcagaacctcgaaaacgtcttcgacgacgttcaaaaaacactccaggaaaaagagttgacatgtcagatactggagcagaagatcaaggaattggactcctgtctagtccggcagaaagaagtgcaccgcgtcgaaatggaagagttgaccagcaagtacgaaaaattgcaggcgttgcagcagatggacgggagaaataagcccacagaactgctcgaggaaaatactgaggagaaatccaagagtcatctggttcagcccaagcttctgtccaacatggaagcccagcacaatgaccttgagttcaagctggcaggagcagagcgggagaagcagaagctgggtaaggaaattgtcagactccagaaggatctcagaatgctacgcaaggaacaccagcaggaactggagatcctgaaaaaagaatatgaccaagagcgggaagaaaaaattaagcaagagcaggaggatctagagctaaaacataactccacgctgaaacagctgatgagagagtttaatacgcagttggcccagaaggagcaggaactagagatgaccattaaggaaacaattaataaggcccaggaagtcgaagctgaactgctcgaatcacaccaggaggaaaccaaccagctgctgaaaaagatcgctgagaaagacgatgacttgaaaaggaccgccaaaaggtatgaggagatcctcgatgcacgagaggaggagatgacagcaaaggtgcgagacctgcagactcagctggaggagctgcagaaaaagtatcagcaaaagctggaacaagaagagaatccgggcaacgacaatgtgaccattatggaactgcagacccagctggctcaaaaaaccacactcatcagtgattccaagttaaaagagcaggagttcagggagcagatacacaatctggaggacagactgaaaaaatatgagaagaatgtctacgcgaccaccgtgggtacgccatacaagggaggcaatttataccacactgatgtgtcacttttcggggagcccaccgagttcgaatacttaaggaaagtcctgtttgaatacatgatggggagggagactaagaccatggccaaggttatcacaactgttcttaagtttcccgatgatcagacacagaagatccttgagcgggaggacgcccgactcatgttcaccagcccgcgctccgggatcttttag

SEQ ID NO: 189752 - DNA, 6732 bp, synthetic construct
  misc_feature 1..6732: note = Description of Artificial Sequence: Synthetic coding sequence
  source 1..6732: mol_type = other DNA
atgttcaagaagctgaagcagaagatcagcgaggagcagcagcagctccagcaggccctcgcaccagcccaggcctcttccaactcctcaaccccaacccgaatgcgctctcgaaccagctctttcacagagcaactggacgaaggtaccccaaatcgggaaaatgctagcacccacgctagcaaaagccccgatagcgtgaatggttctgagccatccattcctcaaagcggtgacacacagagctttgcacagaaattacagctgagagtgccttccgttgagtcactgtttcggagcccgatcaaggaatccctgtttagatctagtagtaaggaatccctggtgcgcacctcctcccgggaatctttgaaccgcctcgatctagattcgagcaccgcatcttttgatccaccatctgacatggactctgaagctgaagacttagttggcaacagcgatagcctaaataaagagcagctgattcagcgcctgcggcgcatggagcgatcgttgtcctcatatagaggaaagtacagcgagctggtgacagcttaccagatgctgcagcgggaaaaaaaaaagttacaaggcatcctttcgcagagtcaggataaaagtctgaggcggattgccgagctcagggaggagctacagatggatcagcaggctaaaaagcaccttcaggaggagtttgacgccagcctggaggagaaagaccagtatatttctgtgctgcaaacgcaagtatccttactgaagcagaggttgcggaacggaccaatgaacgtcgatgtgttaaagccccttccccagcttgaacctcaggcagaagtcttcacaaaagaggaaaaccccgagagcgatggcgagcccgttgtcgaggatggcacttccgtcaaaaccctggagacactgcaacagcgtgttaagaggcaggaaaatttgctcaaacgctgtaaggagactattcagtcacataaggagcagtgcactttgctgactagtgagaaggaagccttacaggagcagctcgatgaacgcctacaagagctcgagaaaataaaagacctgcacatggcagagaaaactaaattgatcacgcagttgagagatgccaagaacctcatcgagcaacttgagcaggataaagggatggtgatcgccgagaccaagagacaaatgcatgagacactagaaatgaaagaagaggaaattgctcagctgagaagtagaataaagcagatgacaactcagggcgaggaactgagggagcaaaaggagaagagtgaacgcgccgcattcgaggagctggaaaaagctctgtccaccgcacaaaagacagaggaggccaggagaaagttgaaagctgaaatggacgaacaaatcaaaactattgaaaagacaagcgaagaggagcgaatcagcctgcagcaggagctgtcccgcgttaaacaggaggttgttgacgtgatgaaaaaaagcagcgaagaacagatagctaaactgcagaagctgcacgaaaaggagctggctcgcaaggaacaagagctgacaaagaaacttcaaaccagagagcgtgaattccaggagcagatgaaggtggcgcttgagaaatcccagtctgaatatctgaaaattagccaggagaaggaacagcaagagagtctagctcttgaggagctggaactgcagaaaaaagcaatcctgaccgaaagtgaaaacaagctgcgtgacctgcagcaagaagctgaaacttataggaccaggatcctggagctcgagtccagtctggagaagtctctccaggaaaataaaaaccagtcgaaagatctagctgtccacctggaggccgaaaaaaacaaacacaacaaagaaattacggtgatggtagagaagcataaaacggagctagagagtctgaagcatcaacaggatgcattatggaccgagaagcttcaagtattgaaacaacagtaccagaccgaaatggaaaagcttcgtgaaaaatgcgagcaggaaaaagagaccctcttgaaagacaaggagattattttccaggcacatattgaggaaatgaatgagaaaacactggaaaaactagatgtaaaacaaaccgaattagagagtctgagtagtgagctgtccgaggtgctgaaagctaggcataaactggaagaggagctgagcgtgctgaaagatcagactgacaagatgaagcaggagttagaagcgaagatggacgagcagaagaaccatcatcagcagcaggtagacagtataatcaaagagcatgaggtgtccatccaaaggaccgaaaaggcactgaaggaccagattaatcagctagagctcctccttaaggagcgagataaacacctgaaggaacaccaggcacacgtggagaacctggaggccgacataaaaaggtccgaaggcgaattgcaacaggcttccgctaaactggacgtctttcagagttatcagtcagcaactcatgagcagaccaaggcatacgaagagcagcttgcgcagctgcagcaaaagctgctcgacttagagaccgaacgcatcctgcttacaaagcaggtcgcggaggtagaggcccagaaaaaggacgtgtgtaccgagctcgatgctcacaagattcaggtgcaggacctcatgcagcaactggaaaaacagaactctgaaatggaacagaaagtgaaatctctaacacaagtgtacgagtcgaagctggaggacggcaacaaagaacaagagcagaccaaacagatacttgtggaaaaagagaacatgatcttgcagatgcgggagggccaaaagaaggaaattgagatactgactcagaagttaagtgccaaagaagacagcatccacatcctaaacgaggagtacgaaacaaaattcaagaaccaagaaaagaagatggaaaaggttaaacagaaagctaaggagatgcaagaaactctgaagaagaaactgctggatcaggaggctaagctcaagaaggagctcgagaacactgctctggaactgtcccagaaggaaaaacaatttaatgccaagatgttagagatggctcaggcaaacagtgccgggatcagcgatgctgtttcccggctcgagacaaaccagaaggagcaaattgagtctctcacagaagttcacaggagggaactcaacgacgtgatcagcatctgggagaagaaactgaatcaacaagctgaagagctacaggaaatccacgaaatccagctgcaggaaaaagagcaagaagtggccgagctgaaacagaagatactgctcttcgggtgcgaaaaggaagaaatgaataaggagattacctggcttaaggaagagggcgtaaaacaagacacaaccttaaatgagttgcaggaacagctcaaacagaaatccgctcatgttaattctctggcccaagacgagaccaagctgaaggctcacctagagaaactcgaggttgatctcaataagtccctgaaggagaatacgttcctccaggaacaactggtagagctgaagatgctggccgaggaggacaagcggaaagtatcagagcttacctccaagctgaaaaccaccgatgaggaatttcagtcactcaaatcttcacacgagaagtctaataaatccttggaggataagagcttggaatttaaaaagctcagtgaagaacttgcaattcagttggatatctgctgcaaaaagactgaagctttgctcgaagccaagacaaacgaacttatcaacatatcctcatccaagaccaatgctatcctcagccgcatctcacactgtcaacaccgcactactaaggtcaaggaggcactgctgattaagacatgtactgtgagtgaattggaagcacaactgaggcaattgaccgaagaacaaaataccctcaacataagtttccagcaggcaacccaccagctcgaagagaaggaaaatcagattaaatctatgaaggccgacatcgagagtcttgtcaccgaaaaggaggcactgcagaaggagggcggaaaccagcagcaggctgcttcagaaaaagaatcctgcattactcagctcaaaaaagaactgtcagagaatatcaacgcagtgacacttatgaaagaagaactgaaggagaaaaaggtggaaattagcagcttgtctaagcagctgacagacttaaatgtacagctgcaaaactctattagcctgtcggaaaaggaagctgcaatctcttccctccggaaacagtacgacgaagagaaatgcgagttgctcgaccaagtgcaggacttatcctttaaggtggacactttgtctaaggagaaaatatctgccctggaacaggtggacgactggtctaataaattctcggaatggaaaaagaaggcccagagcagattcacgcagcaccagaacaccgtcaaagagctgcaaatacagttagaactcaagtcgaaggaggcatatgagaaagacgagcagatcaacctccttaaggaggagctcgatcagcaaaacaagagatttgattgcttaaaaggcgaaatggaggacgacaagtccaaaatggagaaaaaggaatccaacctggaaaccgagctgaagagtcaaacggcacgcatcatggaacttgaagatcacatcacccaaaagactattgaaatcgagtccctgaacgaagtgctgaagaattacaatcagcagaaggacattgagcataaggaactggtgcagaaactgcagcacttccaagagctgggagaggaaaaggataatcgggtcaaggaggcagaggagaaaatactcactcttgagaaccaggtctattcgatgaaagccgagctagagaccaagaagaaggaattagagcacgtgaacctcagtgtcaagtccaaggaggaggagctcaaggccctggaggacaggctggaaagcgagtccgccgccaaacttgctgaactgaagcgaaaagccgaacaaaaaattgcagcaattaaaaaacagctgctgtcccagatggaggaaaaggaagagcagtataaaaagggcaccgagtcacacctctctgagctgaataccaagctgcaggagcgggagcgcgaggtgcacatccttgaggagaagctgaagtctgtcgagagcagtcaatctgagaccctcattgtgccccgctccgccaaaaacgtcgcagcatataccgaacaggaggaggccgactcgcagggttgtgtgcaaaaaacctatgaggagaaaattagcgtgctgcagcggaatttgaccgaaaaagaaaaactgctgcagcgggttggccaggaaaaggaggagactgtgtcaagtcatttcgagatgagatgccaatatcaggaacgactcattaaattggagcacgccgaagctaaacagcacgaagaccagagtatgattgggcacctgcaggaggagctggaagagaagaataaaaagtattccttaatcgttgcccagcatgtcgagaaagaaggggggaagaataacatacaggcaaagcaaaatttagagaacgtgttcgacgacgtgcaaaagaccttacaggaaaaggaacttacatgccagattctggaacagaaaatcaaagagttggattcttgtctcgttcggcagaaggaggttcaccgtgtggaaatggaagaattaacctcgaagtatgagaagctgcaggctttgcaacagatggatggaaggaataagcctactgaattgctggaggagaatacagaagaaaaaagtaagtctcatcttgtgcaaccaaagctcttgagtaatatggaggcccagcacaatgatctggaatttaaacttgccggagccgagcgcgagaagcagaaactgggaaaggagatcgtgaggctgcagaaggacctgagaatgctccggaaagagcaccaacaggaactcgagatcctcaaaaaggaatacgatcaagaacgggaggagaagattaagcaggaacaggaggacttggaactcaagcacaacagcactttaaagcagctcatgagggaattcaatacgcagctggctcagaaagagcaggagctcgagatgaccattaaggagacaataaataaagcccaggaagtcgaggctgagctgctggaaagccaccaggaggagacgaaccagctgctcaagaagatcgccgaaaaggatgacgatctgaaaaggactgccaaacgctacgaggagattctcgacgccagggaggaagaaatgaccgcaaaggtccgggacctgcagactcaacttgaggagctgcagaagaagtaccagcagaagttggagcaggaggaaaaccccggaaatgataacacacagcttgctcagaaaacaaccctgataagtgactcgaaactcaaggaacaggagtttcgcgagcagatccataatcttgaagaccggctaaagaaatacgagaaaaacgtatacgcgacgacggtgggcacaccttacaaaggcgggaacctgtatcatactgacgtatccctgtttggcgagcctactgagttcgaatatctccgcaaggttctgttcgagtatatgatgggacgcgaaacaaagacaatggcaaaagtaatcaccactgtgctcaaattcccagacgatcagacccaaaagatcctggaacgggaggacgcccggttgatgagttggttaagatcaagctcctag

SEQ ID NO: 189753 - DNA, 2196 bp, synthetic construct
  misc_feature 1..2196: note = Description of Artificial Sequence: Synthetic coding sequence
  source 1..2196: mol_type = other DNA
atgagctggttcgtggacctggccggcaaggccgaggacctgctgaaccgagtggaccagggcgctgccactgcactgtcacgtaaggataacgcctccaacatatattcaaagaacacagactataccgaactgcaccagcagaacactgacctgatatatcagacaggtcccaagtctacttatatctcaagtgcagctgacaatatcaggaatcagaaagccactatcctcgccgggacagctaatgtcaaggttggcagtcggaccccggtagaagcgagtcatccagtggaaaacgccagcgtgcctcgcccttcttctcacttcgtccgacgcaagaagagtgagccagatgatgagctcttattcgacttcttgaatagtagtcagaaagagccaaccggacgggtagagatccggaaagaaaagggtaaaacacccgttttccagtcctctcagacaagcagtgtgagctcagttaatcctagtgtgacgacaataaagactatcgaagaaaactccttcgggtcacagacccacgaagcagccagcaactcagactcatctcatgaagggcaggaagagagttctaaggagaacgtgagtagtaatgcggcgtgccccgaccatacccccaccccgaacgatgacgggaagtcccatgagctgtcaaatctgaggctggagaaccagctcctaaggaatgaagtccagagcctgaatcaggaaatggcgtctctgttgcagcggtccaaggagacccaggaggaactcaacaaagcccgcgcgagggtagagaaatggaatgccgatcacagcaaaagcgaccgaatgacaagaggacttagagctcaagttgacgatctgactgaagcggtagctgcgaaggattcccagctggctgtattgaaggtgaggctccaggaggctgaccagctccttagcacccgcactgaggcattagaagccctgcaatccgaaaagagccgcatcatgcaagaccagtccgagggtaattctctgcagaatcaggccctccagaccttccaggaaaggctccacgaagccgacgcaacccttaaacgcgagcaagagtcttataagcagatgcagtctgaattcgcagcgcgcctgaacaaagtggaaatggaacgccagaacctggctgaagcgatcacactggccgaaaggaagtattctgacgagaagaagagggtggacgagcttcagcagcaagtaaagctgtacaagctgaatctggagagcagcaaacaggagctgatagattacaagcagaaagcaacacgcattcttcaaagtaaagagaaattgattaacagccttaaggaggggagtggctttgaaggactcgacagcagcaccgcaagctccatggagcttgaggaactgcggcatgaaaaggagatgcagcgggaggaaattcagaagctgatgggacagattcaccaactcagatctgagttgcaagacatggaggctcaacaagttaatgaggccgagtccgccagggaacagttacaggatctgcacgatcagatcgccggacagaaggcctctaaacaggagctggagacggaactcgaaagacttaagcaagagtttcactacatcgaggaggatctataccgaactaaaaatacacttcagtcccgaatcaaagatagggatgaagaaattcagaagctgcggaaccagttgaccaataagaccctgagcaactcctctcagtccgaactcgaaaaccgccttcatcagctcactgagactcttattcaaaaacagacgatgcttgaatcattgtcgactgagaaaaattctctggtgtttcaactggagcgcctggagcagcagatgaattcagccagcggatcctcctccaatggcagttccatcaacatgagtggaatcgacaacggagaagggactcggctgcggaacgtccccgttctgttcaacgacacagaaaccaacctggccgggatgtatggcaaagttcgaaaggctgcttccagtatagaccagttctctatcagattgggtatttttctaagacgctaccccatcgccagagtgttcgttatcatctacatggcgctcttgcacctgtgggtaatgatcgtcctgctgacatatactcccgagatgcaccacgatcagccttacggcaaatag

SEQ ID NO: 189754 - DNA, 2076 bp, synthetic construct
  misc_feature 1..2076: note = Description of Artificial Sequence: Synthetic coding sequence
  source 1..2076: mol_type = other DNA
atgagctggttcgtggacctggccggcaaggccgaggacctgctgaacagagttgaccagggagccgcaacagcgctgagccgcaaggataacgcttccaacatttattccaagaacaccgactatactgaactgcaccagcagaataccgacctgatttatcaaactgggccaaaaagtacctacatcagctctgccgccgacaacatcagaaatcagaaagcaacgattctagccggcaccgcaaatgtcaaagtggggagccgaacccccgtcgaagcaagtcatcctgtggaaaatgcctccgtgccacgccccagcagccacttcgtccggcggaaaaagagcgagccagacgatgaacttctatttgacttcctaaattccagtcaaaaagaaccaacgggcagggttgaaattcggaaggagaaaggcaagacacctgtgtttcagtcatcccagacctcttccgtatctagcgtgaacccaagcgtaaccaccatcaagaccatagaggaaaacagttttgggagccagacacatgaagcggcctccaactcagatagctctcatgaggggcaggaggagtcgtccaaagagaacgtgagctcgaatgctgcctgtccggatcatacaccaacacctaacgacgatgggaagtcacacgagctgtcaaatctccgcctggagaatcaactgctcagaaatgaagtccagagcctcaatcaggagatggcatctctgctgcagcggtcaaaagagacgcaggaagagctgaacaaggccagggccagggtggagaagtggaacgctgaccactcaaagtcagaccgtatgaccagaggacttcgagcacaagtcgatgatttgactgaggccgtcgctgccaaagactcgcagctggcagttctgaaggtgcgtctgcaagaggcagaccaactcctcagcacacggaccgaagcactggaagccctgcaaagcgagaagtccaggattatgcaagatcagtcagagggaaattcactccagaatcaggccctgcagacgttccaggagcggctccacgaagccgatgccaccctgaaacgggagcaggaatcttataaacagatgcagagtgagtttgccgcccgcctcaacaaggtcgaaatggaaagacaaaacctggctgaggctataaccctggcagagagaaagtactcggatgaaaaaaagcgcgtggacgaactgcagcagcaggtcaagctctataagctgaaccttgagtcatccaagcaggaactgatcgattacaagcagaaggctacccgcattcttcaaagcaaagagaagctgatcaacagcctgaaagaaggatccggcttcgaggggctggactcatcaacggccagcagcatggagctcgaggaactgagacatgaaaaggagatgcagagagaggagatccagaagctgatgggtcagattcatcagctccgatcggagctacaggatatggaagcccaacaggtgaatgaggctgaatccgcccgcgaacagttgcaagacttgcacgaccagatcgccggccagaaagccagcaagcaggagttagagactgagctcgagaggttgaaacaagaatttcattatatcgaagaagatctatatagaacgaagaacacgctccagagccgaatcaaagatcgagacgaagaaatccagaagctccgcaaccaacttaccaataagaccttaagtaactcgtcgcagagcgagttagaaaatagactccatcagttgacggagactctcattcagaaacaaaccatgctcgagtccctgtctacagagaagaactcccttgtttttcaactggagcggttggagcagcagatgaactctgcatctggaagcagtagcaacggcagtagcatcaatatgtcaggcatcgacaatggcgaggggacacggctgcgcaatgtgcctgtgcttttcaacgacaccgagactaatcttgcgggcatgtatgggaaggtaaggaaagccgcgagctcaatcgatcagtttagactgtgtttcacctccggctcttag

SEQ ID NO: 189755 - DNA, 1923 bp, synthetic construct
  misc_feature 1..1923: note = Description of Artificial Sequence: Synthetic coding sequence
  source 1..1923: mol_type = other DNA
atgagctggttcgtggacctggccggcaaggccgaggacctgctgaaccgtgtggaccagggtgccgctacagccctgagccgaaaagataacgcttccaatatctactcaaagaataccgattatacggaactccaccaacaaaatacagatctcatttatcagaccggcccaaaaagcacctatatatcctcagccgccgataatatccgcaaccagaaggcaaccataaagactattgaggaaaactcattcggatctcaaacgcacgaagctgcttctaatagcgactctagccacgaagggcaggaggagagttccaaagagaatgtgagcagcaacgccgcctgtcccgaccatactcccactccaaatgacgatggcaagtcccacgaactctcaaatctgagactcgagaaccagttgctgcgtaatgaagtacagagtttgaatcaggaaatggctagtctgctgcagcgttctaaagagactcaggaagaactcaacaaggcccgtgcacgcgtggagaagtggaacgctgaccattctaagagtgacaggatgacacgggggctgcgggcccaagtggatgacctgaccgaggccgtggcagctaaagatagtcagctcgccgtgctcaaagtcaggcttcaggaagcggaccaattactctccactcgcactgaggctctggaagccctgcagagcgaaaagagccgcatcatgcaggaccagtccgaagggaatagcctccagaatcaggcgctccagaccttccaggagcgattgcacgaagcagacgccaccttaaagcgagagcaggaatcctacaagcaaatgcagtcagagtttgctgcgagactgaataaggttgaaatggaaagacagaatctggctgaggccatcacgctcgctgagcgtaaatattctgatgagaagaagcgagtggacgagctccagcagcaagtgaaactctataaactgaacctggaaagcagcaaacaggagctcattgattataagcaaaaggcgactaggatcctgcaaagcaaggagaaactgattaattccctgaaggaagggtcaggatttgaaggcctggactcttctactgccagttctatggagctcgaagagctccggcatgagaaggagatgcagcgggaagagatacagaagctgatgggccagatacaccagctgcggagtgagttacaggatatggaagcgcagcaggtcaatgaggctgagtcagctcgggaacaactgcaggacctgcatgatcagatcgcaggccagaaggcttccaagcaggagctggaaaccgagctagaacgccttaaacaggaattccactacatcgaggaggacctctaccggaccaagaacaccttacagtcccggataaaggaccgtgatgaagaaattcagaagctgagaaatcaattgaccaataaaaccctatccaattcttcccaaagtgaactggagaatcgactgcatcagctcaccgaaaccctaatccagaaacagacaatgcttgagtctctctccacagaaaaaaattctttagtgttccagctggagcgcctcgagcaacagatgaattccgcctccggcagcagctcaaatggctctagtatcaacatgtctggaattgataacggcgaggggacgaggctgcgcaatgttccagtactatttaatgacacggagaccaacttagcgggtatgtatggcaaggtgcggaaagctgcctcatcgatcgaccagttttctatcaggctcggcatttttctgagaaggtaccctatagccagggttttcgtgataatttatatggccctgcttcatctgtgggtgatgatcgtcctgctgacatatactccagagatgcatcatgaccagccctacggtaagtag

SEQ ID NO: 189756 - DNA, 504 bp, synthetic construct
  misc_feature 1..504: note = Description of Artificial Sequence: Synthetic coding sequence
  source 1..504: mol_type = other DNA
atggccaccgaggtgcacaacctgcaggagctgcggcggagcgcctccctcgccactaaagtgttcatccagagagactactctgacggcacaatctgccagtttcagacgaagtttccacccgaactggactcgcgcatcgaaaggcaactgtttgaggaaaccgtcaagacgcttaatgggttctacgccgaggccgaaaagatcggggggagctcctatcttgagggctgtcttgcctgtgccacagcatacttcatctttttatgcatggaaacacactacgagaaagtgctgaagaaaataagccgctacatccaggaacagaatgagaagattttcgctccaagggggcttctgctgacagatcctgtcgagcgtggtatgcgcgtcatcgagatctcgatctacgaggatcggtgcagctccgggagttcctcctcaggttctagctccgggagtggctcttcatccggtggaggggggggagctggagcccggtag

SEQ ID NO: 189757 - DNA, 1812 bp, synthetic construct
  misc_feature 1..1812: note = Description of Artificial Sequence: Synthetic coding sequence
  source 1..1812: mol_type = other DNA
atggccgaggagaccggccagagcaagctggccgccgccaagaagaaatttaaagagtattggcagagaaatcgccctggagtaccagctgcggcgaaacggaatacaaaggcaaacggcagctctcctgaaacggccgcatctggagggtgccattccagcgaagcatcctcttccgccagctcatctctgcacgcccgccagtcgccctgccaggaacaggcagccgttttgaactctcggagcatcaaaatctctagactgaatgacaccatcaagagcctcaaacagcagaaaaaacaagtggaacatcagctggaagaagaaaagaaagccaacaatgagaaacagaaggctgaaagggaactggaaggtcagattcagcgacttaatactgagaaaaagaagctgaatacagatctgtaccacatgaagcactccctacggtattttgaagaggaatctaaggatctggcagggcgcctgcagaggtctagccagcggatcggcgaacttgaatggagcctatgtgcagtggcggccactcagaaaaagaaacccgacggtttttcatccagatccaaagcactcctgaaacgtcagctcgaacaaagcattagggagcagatcctgttaaagggccacgtcacgcagctgaaggagtctctgaaagaagttcagctggagcgggaccaatacgccgaacagattaagggcgaaagggctcagtggcagcagaggatgcggaagatgagccaggaagtctgtacccttaaggaagagaagaagcacgacactcatcgcgtggaagagctcgagagaagcctgtctagactgaagaaccaaatggcagagcccctcccaccagacgctcctgccgtgagcagtgaggtggaactgcaggatctcaggaaagagctggagcgggtcgcaggcgagctgcaggcgcaggttgaaaacaaccagtgcatatcgctgctgaaccgcgggcagaaggagcgcttgcgcgagcaggaggaacgcctacaagaacagcaagagcggcttcgggagcgcgaaaaaaggctgcagcagctggctgaacctcaaagcgatttggaagaactcaagcatgaaaataaatctgccctgcagttggagcaacaagtgaaagaactccaagagaagctgggccaggtgatggagaccttgacaagcgcggagaaagaacctgaggccgccgtgcctgctagcggcaccggcggggagagcagtggccttatggacctgttggaggagaaggccgacctcagggagcatgtagagaagttagagctaggctttatccagtaccggcgcgagcggtgccatcagaaagttcataggctgctcaccgagcccggtgactccgccaaagatgccagccccggaggggggcatcatcaagccggcccaggtcaggggggagaagagggagaagccgctggcgccgcaggggacggtgttgccgcttgtgggagctacagcgagggacatggaaagttcctggccgcggctcggaatcccgccgcggagcctagccccggtgcacccgctccccaggagctaggggctgcagacaaacacggcgacttatgcgaggcaagtcttacaaattccgtggagcctgcacagggagaagcccgagagggttcctctcaggataaccctacagcccaacccgttctgcagctgctgggcgagatgcaggatcatcaggagcaccctggcttaggcagcaactgttgtgtgccgtgcttctgttgggcttggttaccccggaggagacggtag

SEQ ID NO: 189758 - DNA, 1485 bp, synthetic construct
  misc_feature 1..1485: note = Description of Artificial Sequence: Synthetic coding sequence
  source 1..1485: mol_type = other DNA
gagaagaaggccaacaacgagaagcagaaggccgagcgggagctggaaggccaaattcagagattaaatacagagaaaaagaagctcaacaccgatctgtaccacatgaagcactctctgcgctattttgaggaagaatcaaaagatctggccgggagacttcagcgcagctcacagagaattggagagcttgagtggtccctgtgcgctgttgcagcaactcagaagaaaaagccagatggattctcttcacgcagtaaagccctgctgaaacgccagttagagcaatcaattagggagcagatcttgctcaagggccacgtgacccagttgaaggaaagccttaaggaggttcagctggagcgagaccagtatgccgagcaaattaaaggtgagagggcccagtggcagcagaggatgcggaagatgtcccaggaggtctgcaccctgaaagaagaaaaaaagcacgacactcaccgtgtggaagagcttgagcgtagtcttagtaggctcaagaatcagatggccgagccgttgcccccggacgctccagctgtgagttccgaggtggagttacaggatttgcgaaaagaattagaacgcgttgccggtgaattacaggcacaagtcgagaacaatcaatgtatttccttgctgaatcgcgggcagaaggagagactgcgcgagcaggaagagcggttacaggagcagcaggaaaggctgcgcgagcgagaaaagcggctgcagcaattggccgagccacagagtgaccttgaagaactgcacgagaataagtcggcccttcagcttgaacaacaagtgaaggaactccaggagaaactcggtcaggttatggagacacttacatcagcagaaaaagagcccgaggctgcggtgcccgccagcggcactggcggtgaaagcagcggcttaatggacctcttggaagaaaaggccgacctgagggagcatgtggaaaaactggaacttgggtttatccaatatcgcagggagaggtgccaccaaaaggtacacagactgctgactgagcctggggatagcgccaaagacgcgagcccgggaggggggcatcaccaggccggacccggccagggaggagaagaaggggaagccgcaggggccgcaggggacggcgtggctgcatgcggctcttatagtgagggacacggaaaatttctggccgctgcccgcaatcctgccgcagaacccagtcctggagcacctgcgccacaggaactgggtgccgcagataagcatggagacctctgtgaggcatcgttaactaactctgtggagccggctcagggcgaggccagagagggaagcagccaggacaatccgaccgcacagcctgtgctccagcttctaggcgagatgcaggatcatcaggaacacccagggctgggatcgaactgctgtgttccttgtttttgctgggcatggctccccagaagaaggcgatag

SEQ ID NO: 189759 - DNA, 1812 bp, synthetic construct
  misc_feature 1..1812: note = Description of Artificial Sequence: Synthetic coding sequence
  source 1..1812: mol_type = other DNA
atggccgaggagaccggccagagcaagctggccgccgccaagaagaagttcaaggagtactggcagcgaaaccggcccggcgttcccgcagcagccaagcgcaacacaaaggcaaacgggagctctcctgaaactgctgcctctgggggctgtcatagtagcgaggcttcaagcagcgccagcagcagtttgcatgctcgacagtcaccgtgccaggagcaggcagccgttcttaattcacggtccattaaaatctctcggctgaatgacacaattaaaagtctgaaacagcaaaaaaaacaagtcgaacatcagctggaagaggaaaagaaggcaaataatgagaagcagaaggccgagagggaactggagggccagatccagagattaaatactgagaagaaaaagcttaacacagatctttaccacatgaagcacagcctgagatactttgaggaagaatcaaaggaccttgcaggtagactccagcgaagcagtcagcgcatcggcgaactcgaatggagcctgtgcgctgtcgctgcgacccagaaaaaaaaaccagatgggttttcctctcgctcaaaggcgctgctcaaaagacagctggaacagtctattcgcgagcagattctcctcaaggggcacgtcacccagctcaaagagagcctcaaggaagtccaactcgaacgagaccagtacgctgagcaaatcaaaggcgaacgagcgcagtggcagcagagaatgcgtaaaatgtctcaggaggtctgcactttgaaagaagagaaaaaacacgacacacaccgagttgaagagctcgagcgctctctgtctcgattgaagaaccagatggctgagcccctgccgccagacgcccccgctgtgtctagtgaagtcgaattacaggacctgaggaaagaattggagcgtgtggctggtgaattgcaggctcaggtggagaataatcagtgtatcagcctccttaacaggggtcagaaagagagactgagagagcaggaagaacggctgcaggaacaacaagaaagactgagagaaagggaaaagcgcctgcagcagcttgcagaaccacaatcagatctggaagagctgaaacatgaaaataaatctgcactgcagttagagcagcaggtcaaagaattacaggaaaagctaggacaggtgatggagactctcacaagcgccgagaaggaacccgaggctgctgtacccgcctccggtaccgggggcgagagttctggtctcatggacctgttggaagaaaaagccgatctgagagagcacgttgaaaagctagagctgggtttcatccagtatcggcgcgagagatgccatcagaaggtccatcggctcctgaccgaaccaggcgattcagccaaggacgctagtcccggcggcgggcaccatcaggccggccctggccagggcggggaggagggtgaggcggcaggcgccgctggtgatggggtggccgcctgcggttcttattctgaggggcatggaaagttcctcgccgcggctcgtaaccccgccgccgagccctcccctggtgcaccagctcctcaggagcttggagccgcagataaacacggcgacctttgtgaagctagcctcaccaactcagtggaaccagcccagggcgaggcgcgggaaggttcttctcaggacaacccaacggcacagcctgtcctccagctgctcggtgaaatgcaggaccaccaggagcatcctggtctggggagcaattgctgcgtgccttgcttctgttgggcctggctgcctcgccgacgtcggtag

SEQ ID NO: 189760 - DNA, 1902 bp, synthetic construct
  misc_feature 1..1902: note = Description of Artificial Sequence: Synthetic coding sequence
  source 1..1902: mol_type = other DNA
atgctgcccgtggacggcgaggagcggaagagcgagggcagcgacaccgaaggcgacagaaccagtccttgcgctggaccaacctcatcagccaccctcaaggacctggaagtgggagggtcaggatggagatgtagcgatccggcaggccagcccagcaatctactaccacagagaggccttggcgcacccttgcccgccgaaacggcacacactcagccttcccccaatgaccgaagcctttacctgtcaccgaagtcatcatcagcttcaagctctttgcacgctaggcagtctccatgtcaagaacaggccgcagtgttgaattcgcgatcgataaagatttctcggctgaacgatacaatcaagtcactgaagcagcaaaaaaagcaggtcgagcatcagctggaggaggaaaaaaaggcgaacaatgaaaaacaaaaggcagagagagaactggagggccaaattcagaggctcaacactgaaaagaagaaattaaacactgatttgtatcacatgaagcactctctgcggtacttcgaggaggagagcaaggacctggctggacgcctgcagcgttccagtcagcgcattggtgaactcgagtggagtctgtgtgctgtggctgcgacgcagaaaaagaagcctgacggcttctcaagtcggagtaaagctctcctgaagcggcaactggaacagagtattagagaacaaatcctgctaaagggacacgtgactcaactgaaggaaagcctcaaggaggttcagctagaaagagaccagtacgcagagcaaatcaaaggtgagagggcccagtggcaacagagaatgaggaaaatgtcacaggaagtctgtactctgaaggaggaaaaaaagcatgacacgcatagggtggaagagctggaacgatcactatctagacttaaaaaccagatggccgaacctttacccccggacgcgcctgcagtgtcatctgaagtcgaactccaggatctgagaaaggagctcgagagggtcgccggggaattgcaggcacaggtggaaaacaatcaatgtatcagtctactgaataggggtcaaaaggagcgtttacgggaacaggaggagaggcttcaggaacagcaggagaggctcagggagagggaaaaaaggctccaacaactcgcggagcctcagtctgacctagaggagcttaagcatgagaacaagtctgccttgcagctagaacagcaggtgaaggaattgcaagagaaactcggtcaggtgatggagaccctgacttccgcagagaaagagcccgaggccgcggtacctgcctcaggcactggcggggagtcctctggattaatggatctgctggaagagaaagcagacctaagagagcatgtggagaagctcgagctcggctttatccaatacagaagagaaagatgccaccagaaggtacaccgcctcctgactgaaccaggtgactccgccaaagacgcctcaccaggcgggggacaccatcaggccggccctggacaaggaggcgaggaaggtgaagccgcgggcgccgctggcgacggggttgctgcgtgcgggtcttattcagaggggcacggtaagttcctggctgctgccagaaaccctgctgccgaaccatctccaggagcgcccgcaccccaggaactgggcgctgcagataagcacggggacctttgtgaggcttctcttactaacagtgtggaacccgcccagggtgaggcccgtgaggggtccagccaggataatcctacagcacagccagtccttcagctcctgggagagatgcaggatcaccaggagcatccgggactaggaagtaactgctgtgtgccctgcttctgttgggcgtggctccccaggaggaggagatag

SEQ ID NO: 189761 - DNA, 9780 bp, synthetic construct
  misc_feature 1..9780: note = Description of Artificial Sequence: Synthetic coding sequence
  source 1..9780: mol_type = other DNA
atgctgagccggctgagcggcctggccaacgtggtgctgcacgagctgagtggcgacgacgatacagatcagaatatgcgggcgcctcttgaccccgaactgcaccaggagtcagacatggagttcaataacacaacgcaggaggatgtccaagagaggctggcctacgcagaacagttggtcgttgagcttaaggatatcatccgccaaaaggatgtgcagctccagcagaaggacgaagcgctgcaggaggagagaaaggcagctgataacaagattaagaagctgaaattgcatgcgaaggccaaactgactagcctgaacaagtacatcgaggagatgaaagcacaggggggaaccgtcctccctacagaacctcagtcagaagaacagctaagtaaacacgacaaatcatcaaccgaggaggagatggagatcgagaagattaaacacaagctccaggagaaagaagaactgatttcaacgctgcaagcacagttaacacaggcccaggcagagcagcccgcacagtcttccactgagatggaagagttcgtcatgatgaaacagcaactgcaggaaaaagaagagtttatttcgactctccaagcacagctctcacagacccaggctgagcaggctgcccagcaagttgtacgtgagaaagatgcaagattcgaaacccaggtccgacttcacgaagatgaattactccagctcgtgacccaagccgacgttgagacagaaatgcagcagaaactgcgcgtgctgcagcgcaaactggaagagcacgaagagtctcttgtgggacgtgcacaggtggtggaccttttgcagcaggagctcaccgccgccgagcagaggaaccagatcctgtcccagcagctgcagcagatggaagccgagcacaacacactgcgcaataccgtagaaacagaacgcgaggagtcaaagatccttctggagaagatggagctggaggttgccgaacgcaaactttcattccataacctgcaggaggagatgcaccatctgcttgagcaattcgagcaagccgggcaggcccaggccgagcttgagagtagatacagcgcactggagcagaaacataaggcagagatggaagagaaaacctctcacattttgagtttgcagaaaaccgggcaggaactgcaatccgcatgtgacgccctgaaagaccagaattctaaactgctccaggacaaaaatgaacaggccgtccagagcgcacaaacaatccaacagctggaggatcagcttcaacagaagtccaaggagatctctcagtttcttaatcggctacccctgcagcagcacgagacagccagccagacaagtttccctgacgtctataacgagggaacccaggcagtaacagaggaaaatatcgccagtctgcaaaaacgggtggtagagttggagaatgaaaagggcgccctcctgctttccagcatcgagctggaggaactcaaggctgagaacgaaaagttaagttcccagattaccctcctagaagctcagaaccggacaggcgaggcagatcgagaagtctccgaaatttcaatcgttgacatcgccaataagagatcctctagcgccgaagagagtggccaagatgtgctggaaaatacattcagccaaaagcacaaagaactgtccgtcctgctgttggagatgaaagaggctcaggaagagatcgcgtttttgaaactgcagctgcagggcaagagggccgaggaagccgaccacgaagtgctagaccagaaggagatgaagcagatggaaggtgagggcattgctcctataaagatgaaggtgtttctggaggacactggtcaggatttccccctcatgcctaatgaagaatcttccctccccgccgtggaaaaagagcaggcctcaaccgagcaccagtcacggacctcagaggaaatatcccttaatgacgccggggtggagttgaaatccactaagcaggacggcgacaagtcgctctctgcagtgccagacataggtcagtgccaccaggatgagcttgagcggctcaagtcgcagatcctggagttggagctcaatttccataaggcccaagaaatatatgagaagaatctggatgaaaaagccaaggaaattagcaatctgaaccagctgatcgaggagtttaagaaaaacgctgacaacaactcttccgcgtttaccgccctgtcagaagagagagatcagctactgtctcaggtcaaagagctgtctatggtgacggaattgcgggcacaggttaaacaattggaaatgaaccttgccgaggctgaacggcagcgccgtctcgattacgagagtcagacagcccatgataatctacttacagagcaaattcatagcttgtccattgaggccaagtcgaaggatgtgaagatcgaagttctgcagaatgagcttgatgatgttcagctgcaatttagcgaacagagtacgctcattagatctctgcaatctcaactacagaataaggaaagtgaggtgctcgagggtgccgagcgtgttaggcacatctccagcaaggtggaggaacttagccaggcactttcccagaaggaattggagatcacaaagatggatcaactcttattggaaaagaagagggacgtggagacgctgcagcagacaatcgaagaaaaggaccagcaggttactgaaatttccttctccatgactgaaaagatggtgcaactcaacgaggaaaagttttcactgggcgtcgaaataaagactctcaaggagcagttaaatctcctctctagggcggaagaggccaagaaagagcaggttgaagaggataacgaggtctcttccggtttaaagcagaattacgacgaaatgagtcccgccggccaaatttcgaaagaggagctgcagcacgagtttgacctgctgaagaaagaaaatgagcagcgaaagcgcaaacttcaggctgctctgattaacagaaaagagctcctacaaagggtctcacgcctggaagaagagctcgcaaatttgaaagatgaatcaaagaaagagatccccctgagcgaaactgaacgcggagaagtagaagaggacaaggagaacaaagaatactcggagaagtgtgtgacaagcaagtgtcaagagatcgagatatacttaaaacagaccatctccgagaaggaagtggagttgcagcatataagaaaggacctagaggagaagctagcagcagaggaacaatttcaggccctggttaaacagatgaatcaaaccctccaggataaaaccaatcaaattgacctgctgcaggctgagattagtgaaaatcaggctatcatccagaagctgattacgtctaacaccgatgcctccgatggcgattcagtggcgctggtgaaggaaacagtggtgatttctcccccatgcaccgggagcagcgaacactggaagcctgagctcgaggagaaaattttggcccttgaaaaagagaaagaacaacttcagaagaagctgcaggaagcactgaccagcaggaaggcgattttgaagaaagcacaggagaaggagcgacatctaagagaggaactgaagcagcagaaggatgactacaacaggctgcaagaacaatttgacgagcagtctaaggagaatgaaaatatcggtgaccagctccggcagctgcaaattcaggtgcgggaaagcatcgatggcaaattgccttccacggaccagcaagaatcttgttcatccacccccgggctggaggagccattatttaaagccactgagcagcaccacacccagccagtgctggaaagtaacctgtgccccgattggccgagtcactctgaggatgccagtgcgctgcaggggggcacttcagtggcccagatcaaagcgcagctgaaagagatcgaggcagaaaaagtggaactggagttgaaggtgtcctccaccaccagcgagctcactaagaaatccgaggaggtgtttcagctccaggagcagatcaacaaacaagggctcgaaatcgagtctctcaaaactgtctcgcacgaggccgaagtgcatgccgagagtttgcaacagaaactcgaatcttctcagctgcagattgccgggctggagcaccttcgcgaacttcagcccaaacttgacgagctgcaaaaactcatctcgaaaaaggaggaggacgtcagctacctctccggacaactgagtgagaaagaggcggccttgacaaaaatccagacggagattattgagcaggaggatctgattaaagccctccatacccagctagagatgcaagccaaggagcacgacgaacggatcaaacaactccaggtggagctgtgcgaaatgaagcagaagcctgaggagatcggagaagagagccgcgcaaagcaacagatccagcgcaaactccaggcagcccttatctcccgaaaagaagctctgaaagagaataagagcctgcaggaggagctctcactggcgagggggactatagaacggctgactaaaagcctggcagacgtcgaatcccaagtcagcgcgcagaataaagaaaaggataccgtactcggacgtcttgctttgctacaggaggaacgagacaaacttatcacagaaatggaccgctctctcctggagaaccaatctctaagtagtagttgtgaaagtctcaaactggctctcgagggactgactgaggataaggagaaactggtcaaggagatcgaaagtctgaagtcatccaagatagccgaatcaactgagtggcaggagaagcataaggagttacagaaggaatatgagattcttcttcagtcatacgagaacgtctctaatgaggccgaacggattcaacatgtcgtcgaagctgtgcggcaggaaaaacaagaactctatggcaagctgagatccacggaggcaaataagaaggagacagagaagcagttgcaggaggcggagcaggagatggaggagatgaaggagaaaatgaggaagttcgcgaaatcgaaacaacaaaagattctggagcttgaggaagagaacgatcgtctaagagcggaagtgcaccccgctggagacacagctaaggagtgtatggagaccctgcttagtagcaacgcttcaatgaaggaggagcttgaacgggtgaagatggagtatgagactctgtccaaaaagtttcaatctctgatgtctgaaaaggacagccttagcgaggaggttcaggatctcaaacaccagattgagggaaatgtctccaaacaagcaaatctcgaggcaactgagaaacatgacaatcagactaatgttaccgaggaaggcacacagagcatacccggcgagaccgaagaacaggacagcctcagtatgtctacaaggcccacatgcagtgagtccgtgccttctgctaaaagcgccaatcctgccgtcagtaaggacttttctagccatgacgagatcaacaattacctgcaacagatcgaccagctgaaagagagaatcgcgggactcgaagaagagaaacagaaaaacaaagagtttagtcagacactcgaaaacgaaaaaaacaccctgctgagccagatttcgaccaaagatggagagcttaaaatgctgcaggaagaagtgaccaagatgaacttactgaaccaacagatccaagaggagctgagccgggtgaccaaactgaaagagacggccgaggaggaaaaagatgatctggaggaacgcttgatgaaccagctggccgaattgaatgggtccatcgggaactattgtcaagacgttactgatgcccagattaagaacgagctcctggaatctgagatgaagaatttaaagaagtgtgtgtctgagctggaggaggaaaagcagcaactggttaaagagaagaccaaggtcgagagcgagatccggaaggagtatctcgaaaagatccagggtgctcagaaagagcccggtaacaagtcccacgccaaagaactgcaggagcttcttaaggagaaacagcaggaagttaaacagctgcagaaagattgtatcaggtatcaagagaagattagcgccctggagagaacggtcaaggctttagaatttgttcagacagaatcacagaaggacctagagattaccaaagagaatctagcacaggccgtcgagcacaggaaaaaagcacaagctgagctcgcatcctttaaagtcctacttgatgacactcaatccgaagccgcacgggtattagctgataatctgaagctcaagaaggaattgcagagcaataaggagtctgtcaaatctcagatgaagcagaaggatgaggacttagaacgccgtctggagcaggcagaagaaaaacatttgaaagaaaagaagaatatgcaggagaagctggatgccctgaggagagagaaggtccacctggaagaaacaataggtgagattcaagtcacactgaacaaaaaggataaggaggtacagcagttacaggaaaacctggacagcacagtcacccagttggctgccttcacaaagagcatgtcctcgctgcaggatgaccgcgatagggtgattgacgaggcaaaaaaatgggagaggaagttctccgatgccattcagtcgaaagaagaggaaattaggctgaaggaggataactgctccgtgcttaaggatcagttaaggcaaatgtctattcacatggaggagctcaagatcaacatctctaggcttgagcacgataaacaaatctgggagagcaaggctcaaactgaggtgcaattgcaacagaaggtttgcgacacccttcagggtgagaacaaagagttgctgtcccagttggaggagacgagacacctctaccactcctcacaaaatgaactagccaagctcgagtcagagttgaaaagtcttaaagatcagctgaccgacctctccaattctctggagaagtgcaaggaacagaaaggtaatctcgagggcatcatcaggcaacaggaagccgacattcaaaactccaagttttcctatgaacagctggagactgacctgcaagcctctagagaacttacatctcgactgcatgaagagattaatatgaaggagcagaaaatcatctcgttactgtctggaaaagaggaagcaattcaggttgcaatcgccgaactgaggcaacaacacgacaaggagatcaaagagctggaaaatcttctctctcaggaggaagaagaaaatattgtacttgaagaagagaataagaaggccgtggataaaaccaaccaactgatggagaccctcaaaactataaagaaagaaaatattcaacagaaggctcagttggacagtttcgtcaaaagcatgagtagcctccagaatgatcgagacaggatcgtaggcgattaccagcagctggaggagagacatctttctataattttagaaaaggaccagctgatccaggaggcagccgctgagaacaacaagctgaaagaggagattcgaggtctgagatcccacatggacgacttaaatagcgaaaatgccaagcttgatgccgagttaattcaatatagggaggacctcaaccaagtaatcactatcaaggactctcagcagaaacaattgctggaagtgcagttacaacagaacaaggagctggaaaataaatatgccaagcttgaggagaagctgaaggaatccgaagaagcaaatgaggacctgcggagatcctttaacgccttgcaggaagaaaaacaggatctttcaaaagagatcgagtccctgaaagtttctatctcccagctaacccgccaggtcacagctctccaggaggaaggcacactgggactataccatgctcagcttaaagtaaaggaggaagaggtgcaccgccttagtgctttgttctccagtagccaaaaaagaatcgccgaattggaagaggagctagtgtgtgttcagaaagaggccgcaaagaaggttggagagatcgaggacaaactcaaaaaggagctgaagcacctgcatcatgacgctggcatcatgaggaatgagacagagaccgcggaggaacgagtggcggagctagcccgggacctggtagagatggaacagaagctactgatggtgacaaaagaaaacaaaggcctcactgctcaaatacagagctttggcaggtctatgtcaagcctgcagaatagtcgagaccatgccaatgaagagttagatgagctgaaaagaaagtatgatgcctccctcaaagagctggctcagctgaaggagcagggcttactgaatcgcgaaagggatgctttactgtccgaaaccgccttttcgatgaactctacagaggagaattcattatctcatctggagaagctgaatcagcagcttttgtcaaaagacgaacaactgttgcatctttcctctcagcttgaggatagttataaccaggtccagagtttctccaaggccatggctagcttacagaatgagcgggaccacctctggaatgagctggaaaagttcaggaaaagcgaggagggaaagcaacgatcggccgctcagcccagcaccagtcctgctgaggtgcagtcactcaaaaaggcaatgtcatcactgcagaatgaccgcgaccggctgctgaaagagcttaagaacctacagcagcagtacctgcagatcaaccaggaaatcacagaactgcatcccctaaaagctcagctacaggagtaccaggacaaaaccaaggcgtttcagattatgcaggaagagttgcgccaagagaacttgtcctggcaacacgagctacaccagctcaggatggagaagtcctcttgggaaatacacgagcggcgtatgaaagagcagtatctcatggctattagtgataaggatcaacaactctcgcacctgcagaacctcattcgggaactaaggtcctctagctctcagacccagcccttgaaagtgcagtatcagcgccaagccagcccagaaacaagcgcttccccggatggcagccagaacctggtctatgaaacagagctgctgcggacccagctgaacgattcgctaaaggagattcatcagaaagaactgcgcattcaacagttaaatagcaatttttcccagctgctcgaagaaaagaatacattgtccattcaactgtgtgataccagccaatcgctgcgggagaaccaacagcactatggtgatctgctgaaccactgtgcagtgctggaaaagcaggtgcaggaactgcaggcaggtccactcaacatagatgtagcccctggagctcctcaggagaaaaacggcgtccatcgcaagtcagatcctgaggagttacgcgagcctcagcagagtttctcagaggcccaacagcaactatgcaatacccgccaggaggtgaacgaactaaggaagttactggaggaagagcgagaccagagagtcgctgccgagaacgcactgagcgtagcagaggaacaaatcaggcgcttggaacattccgagtgggactcctctcgcaccccaatcatcggttcctgcggaacacaggaacaggcattacttatagatctcaccagcaactcctgtcggcgtacacgctccggagttggctggaaaagggtacttcgcagcctgtgccacagtcggaccagagttcccctcctggcagctatatatttcctgatgattcatgttctcctgattctgtgtttcacgggtcatctctag

SEQ ID NO: 189762 - DNA, 2919 bp, synthetic construct
  misc_feature 1..2919: note = Description of Artificial Sequence: Synthetic coding sequence
  source 1..2919: mol_type = other DNA
atgaaggcccagggcggcaccgtgctgcccaccgagccccagagcgaggagcagctgtcaaagcatgataagagcagtactgaggaggagatggaaatcgagaaaattaaacacaagctgcaagaaaaggaagaactgatatctacccttcaagcgcagctgacccaggcccaggctgaacagcctgcacagaagctgcgggttctgcagcgaaagctggaagagcatgaggagtccctggtgggacgcgcacaggtggtggacctccttcagcaagaactgaccgcagcagagcagcggaatcagatcctcagccagcagctccagcaaatggaagcagagcacaatactctgaggaatacagtagagacagaacgtgaggaatccaagatcctgctcgaaaaaatggagctggaggtggcggaacggaaacttagtttccacaatctgcaggaggagatgcatcatctgcttgagcaattcgaacaggcgggccaggcacaggccgaactggagagccgttatagcgccctcgaacagaagcacaaagccgagatggaagaaaaaacgagccatatcctgtcattgcagaagactggccaggaacttcagtccgcttgcgacgctcttaaagatcagaactccaaattgctgcaggacaagaatgagcaggctgtccaatccgcacagactatacagcaactcgaggaccagctgcagcaaaagtccaaagaaatttcacagtttcttaatcgcctccctcttcaacagcacgaaaccgcctcacaaaccagctttccagatgtgtacaatgagggtacgcaggctgtgaccgaggagaacattgctagcctgcagaagcgagtggtcgagttggaaaatgagaaaggagccctactcctttcatcaatcgaactggaagagctcaaggcggagaacgaaaaacttagcagccaaatcaccctcctcgaagcacaaaatagaactggtgaagccgaccgggaggtttcggagatctccattgtggatatcgccaacaagcgttcaagctctgcagaggagagtgggcaagatgtccttgaaaatactttttcccaaaaacataaggagctctcagtgcttttgcttgagatgaaagaggcccaggaagaaattgcatttctgaagttgcagttacagggcaaaagagctgaagaggccgaccatgaagtgttggaccaaaaggaaatgaaacagatggagggggaaggcatagcccccatcaaaatgaaggtgttcctagaggacactgggcaggacttcccattgatgcccaacgaagagtcctcattaccagcagtggaaaaggaacaggcctcaacggaacaccagagtaggacatccgaagagatctctctgaacgacgccggagtcgagctgaagagtacaaagcaagacggtgacaaatccctctccgctgtgcccgatatcggacagtgccatcaggacgaactggaaagactgaagtcccagattcttgagcttgagctgaattttcacaaggcacaagaaatttacgagaagaatctcgacgagaaagctaaagagatatcaaacctaaatcaactgatcgaagaatttaaaaaaaatgccgacaataatagcagtgcttttaccgctctttcagaggagagagatcagctcctgtcacaggtgaaagagctcagcatggtgaccgagctcagagcacaggtgaagcagctcgagatgaacctggctgaagccgagcgtcagagacgcctagactatgagtctcaaacggcccacgataatctcctgactgaacaaattcattccctcagcatcgaagccaaatctaaagatgtcaaaatcgaagttctgcaaaacgaacttgatgacgtgcaattgcaatttagtgagcagtcaaccctgattaggtcgctccagtcacaactccagaataaggagagcgaagtgcttgagggagctgagcgggtgcggcatattagctctaaggtcgaagaactatcacaggcactttcacagaaggagctcgagatcacgaagatggaccagcttttgttggagaaaaagagggacgtagagaccctgcagcagacaattgaggagaaagatcagcaggtaactgagatctctttttccatgacggaaaagatggtgcagctcaatgaagagaaattctccctgggcgtggaaatcaagaccctaaaagagcagcttaatctgctcagcagggccgaggaggccaaaaaggagcaggtcgaggaggataacgaggtgtcatccgggctaaaacagaattacgatgagatgagtcccgcgggtcagatatctaaagaagaacttcagcacgaattcgaccttcttaagaaggagaatgagcagaggaagcgaaaactccaagccgccctgatcaatagaaaggaactgctccagcgggtaagcaggctggaagaagagttagcaaaccttaaagacgagagtaagaaagaaattccattgtcagagaccgaacgaggcgaagtcgaggaggataaagagaataaagagtatagcgagaaatgtgtaaccagcaagtgtcaggaaatcgagatttacctaaagcagaccatctcagaaaaggaagtggaactgcagcacatcagaaaggatctggaagaaaaattggccgctgaggagcaatttcaggctctcgtcaagcagatgaaccagacgctgcaggacaagactaaccaaattgacctgctacaggctgagatatccgagaatcaggctataatccagaagctgatcacgagcaatactgatgccagcgacggcgattctgtggcactggtcaaggagaccgtggtaatttctccaccatgtaccgggagctcggaacactggaagccttag

SEQ ID NO: 189763 - DNA, 126 bp, synthetic construct
  misc_feature 1..126: note = Description of Artificial Sequence: Synthetic coding sequence
  source 1..126: mol_type = other DNA
atgctgagccggctgagcggcctggccaacgtggtgctgcacgagttgtctggcgatgatgacacagatcagaatatgagagctcctctggatcctgagctacaccaagagtctgatatggagtag

SEQ ID NO: 189764 - DNA, 4923 bp, synthetic construct
  misc_feature 1..4923: note = Description of Artificial Sequence: Synthetic coding sequence
  source 1..4923: mol_type = other DNA
atgctgagccggctgagcggcctggccaacgtggtgctgcacgagctctcgggagacgacgacacggaccagaatatgagagccccactggaccccgaactgcaccaggagtcagacatggaatttaataacacaacccaagaagacgtgcaggaacgattagcttacgctgagcagctggtcgtagaactcaaggatatcatacgtcagaaggatgtgcaactgcagcagaaagacgaagccctgcaagaggaacgcaaagcagctgacaacaaaattaaaaagctgaaattacacgcaaaagccaaacttacgtctctgaataagtacatagaggagatgaaggcacaaggtggaacagtgctgccaaccgagccacagtcggaagaacagctaagcaagcacgacaaatcctcgaccgaagaagaaatggagatagagaaaattaaacataagttgcaggagaaagaagagttgatcagcacattacaggctcagctgacccaggcccaggctgaacaaccagctcagtccagtactgaaatggaagaattcgtgatgatgaaacaacagctgcaagagaaagaagagtttatatccaccctgcaggctcaactgtctcagactcaggctgaacaggcagctcaaaaactgcgggtactgcagcgtaagctggaagagcacgaagagtccctagttgggagggcccaggtggtcgatctgctgcaacaagaacttaccgccgccgagcaaagaaaccagattctgtctcagcagctgcaacagatggaagccgaacataatacactaagaaacaccgtcgagactgagagggaagagtctaaaatcctcctggagaagatggaattggaggtggctgagcgtaaactgtcctttcataatttgcaagaggagatgcatcacctcctcgagcaattcgagcaggcgggacaggcacaggcagagcttgaaagcaggtactcagctctggagcaaaagcacaaagccgaaatggaagagaagaccagccatatcctgtctctgcagaagacgggccaggaactacagtccgcttgcgatgctctgaaagaccaaaattccaaactgctccaggacaagaacgaacaggccgtgcagtccgcccaaaccatccaacaattggaggaccagctgcagcagaaaagtaaagagatcagccagtttctgaaccgtctaccgctgcagcagcacgagacggcctcacagacatcattcccggatgtttacaacgaagggacacaggctgtaaccgaggagaacattgcatcattgcagaagagagtggttgaactggagaacgagaagggtgctttgctgctcagcagcattgagcttgaggagctgaaagcagaaaatgagaagctgtcatctcagatcacactcttggaggctcagaaccgcaccggcgaggctgatagagaggttagcgagatttccattgtggacatcgccaataagcgctcaagctctgccgaggagagcgggcaggacgtgctggaaaataccttttcacagaagcacaaggaattaagcgtgctgttgctcgaaatgaaggaggctcaggaagagatcgcatttctgaagcttcagctgcagggaaaacgggccgaagaggctgaccacgaagtcctcgatcaaaaggaaatgaagcagatggagggcgaagggatcgcaccaatcaagatgaaagtgtttcttgaggatacaggacaggacttcccactgatgcctaatgaggagagttcactacctgccgtggagaaggagcaggcatctactgaacatcagtctaggacctcggaggaaattagccttaatgacgctggcgtagagctgaagagtacaaagcaggatggggacaaaagtctttccgcggtcccagatatcggacagtgccatcaagacgaactcgagaggctgaaatctcaaatcctggaactggagctaaactttcacaaggctcaggaaatctacgagaaaaacttggacgagaaggccaaagagatctccaaccttaaccagctaattgaagaatttaaaaaaaatgccgataacaacagtagcgcattcaccgcactttctgaggagcgggatcaactactgagtcaagtcaaagagctgtctatggtgaccgagctgcgcgcccaagtcaagcagctcgagatgaacttagccgaagcagagcggcagagacggctagactacgagtcgcagaccgctcacgacaacctcctcacagaacagatccacagcttgagcatcgaggcaaagagcaaggacgtaaagatcgaggtgctccaaaatgagctggatgacgtacagctgcagttcagtgagcagtccacactcatcagaagtctgcagtcccaactccagaataaagaatctgaagttttagaaggcgccgaaagggtaaggcacatatcttctaaggtggaggagctgtcccaggccctcagccagaaagagctcgaaatcacgaagatggaccagcttctgctggaaaaaaagagagacgttgagacactccagcagactatcgaggaaaaagatcagcaggttacagagatcagtttttctatgactgagaaaatggtgcagctcaatgaggaaaagttcagcctgggagttgagattaagacccttaaggaacagttaaatctgctgtctcgtgctgaggaagccaaaaaggagcaggtggaagaagacaatgaggtgagttcaggcctgaagcagaactacgatgagatgtcccccgccgggcaaatttccaaagaggagctgcaacatgaatttgacttgcttaagaaggagaatgaacagcggaagaggaaattgcaagccgccttaatcaatcgaaaggaactccttcagcgagtgtcccggcttgaggaggaactcgcaaatttgaaggatgagagcaaaaaggagatcccgctgtccgagactgaacgaggtgaggtggaggaagacaaagagaacaaggagtactcggagaagtgcgtaaccagcaagtgccaggaaatcgagatttatttaaaacagaccatttccgagaaagaggtagagctgcagcatatacgcaaggacctggaggagaagctggccgcagaggagcagttccaggccttggtcaagcagatgaatcagacgttgcaggacaaaactaaccagattgatttgcttcaggctgaaatttctgagaatcaagctatcattcaaaagctcattacctctaataccgatgcttctgatggtgacagcgtcgcattagtcaaagaaactgtagtgatctcacccccctgcaccgggagctctgagcactggaagccggagctggaggaaaagatcctggctctcgagaaagagaaagaacagttgcagaagaagctgcaagaagccttgacttctcggaaggctatactgaagaaggcacaggagaaggagcgacatctgcgtgaagagctgaaacagcagaaggatgactacaaccggttacaggagcagttcgacgagcagagtaaagaaaatgaaaacataggggaccagctgcgtcagttacaaattcaggtcagagaaagtatcgatggaaagctcccgagtactgatcagcaggagtcatgcagttctaccccagggctggaagagcccttgtttaaagcgaccgagcagcatcacacgcagccagttctggagagcaatctgtgcccggattggccctcccattccgaggacgcctccgccctacagggcgggacgtccgtggcccaaattaaagcccaactgaaagagattgaggccgagaaagtggaactggaactgaaggtatccagcactactagcgaactcaccaagaagagtgaggaagtgttccagctgcaagaacagatcaacaagcaaggactggaaatcgaaagtctcaagaccgtctctcatgaggccgaggtgcacgctgaatctctgcagcagaaactagaatcaagtcagctgcagattgctggtttagagcatctgagagagctgcagcccaagctcgatgagctccagaaattgatcagcaaaaaggaagaagatgttagctatctgagtggccagcttagcgaaaaagaggcagctttaacgaagattcagaccgaaatcatcgaacaagaggatctcatcaaggccctccacacccagctggagatgcaagcaaaagagcatgatgaaagaatcaagcagttacaagtggaattgtgtgagatgaaacagaagcccgaagagatcggagaagagagtagggctaaacaacaaattcaacgaaaactgcaggcagctctgatatctaggaaggaggccctaaaggaaaataagtctctgcaggaagagctaagcctggctcgcggaaccattgaacgtctaacgaagtcacttgcggacgtggaaagccaggtgagcgcccagaacaaggagaaagacactgtgctaggaagattggcgttactgcaggaggagagggataaactcataaccgagatggaccggtctcttctcgaaaatcagagcctgagttctagttgcgagtcactgaaactagctttggaggggctaactgaagataaagagaaacttgtgaaggaaattgaatcactgaaatcctctaagatagccgagtcaacagaatggcaggagaaacacaaggagttgcaaaaggaatatgaaatccttctacagtcttatgagaacgttagtaatgaggccgagcggatccagcatgtggttgaggccgtaagacaggaaaaacaagagctttatggcaagcttagaagtaccgaggcaaacaagaaggagaccgaaaaacaactgcaagaagcggagcaggagatggaagaaatgaaggagtag

SEQ ID NO: 189765 - DNA, 9810 bp, synthetic construct
  misc_feature 1..9810: note = Description of Artificial Sequence: Synthetic coding sequence
  source 1..9810: mol_type = other DNA
atgctgagccggctgagcggcctggccaacgtggtgctgcacgagctgtctggcgacgatgatactgatcagaacatgagggcccccctcgatccagaactgcatcaggagagtgacatggaattcaataacaccacccaggaagatgttcaggaaagactggcctacgctgaacagctagtggttgagttgaaagatataatccggcaaaaggacgtccagttacaacagaaagacgaagcattgcaggaagagaggaaagcagccgacaacaaaattaagaaactaaagctgcacgctaaggcaaaactaacatcactgaataagtacatagaggagatgaaggcgcagggtggtaccgtgctgcccaccgagccacagtcagaagagcagctgagcaaacacgacaagtcctcgaccgaagaagagatggaaattgaaaaaattaaacacaaactgcaagagaaggaggagctgatcagcaccctgcaagcccagcttacacaggctcaagccgagcagcctgctcaatcttcaacagagatggaggagttcgttatgatgaagcagcagttgcaggagaaggaggagttcatatcaacattgcaggcgcagctgtcacaaactcaggctgagcaggccgcacagttgagctctatgcagcaggtagtccgagaaaaggatgctaggttcgaaacacaggtgcggctccacgaagacgaactgctccaactggtgacacaggccgatgtggagacagaaatgcaacagaaactgagagtgctccaacgaaagcttgaagagcacgaggagtcgctggttggcagagcgcaggtcgtggacttgctccagcaggagttgacggcagccgagcagcgcaatcagattctaagtcagcagcttcagcaaatggaggccgagcataacacactcagaaatacagtcgagactgaaagggaagaatccaagatcttattagaaaagatggagcttgaagtagccgaaagaaagctgagtttccataacctgcaggaagagatgcaccatctccttgagcagtttgaacaggccggtcaggcgcaggccgaactcgagtccagatatagtgcgttggagcaaaaacataaagccgaaatggaagagaagactagccacatcttgagtctccagaaaaccggtcaggagttgcagagtgcctgtgatgccttgaaggatcagaattcaaaactgctgcaggataagaacgagcaagccgtgcagagcgcgcagaccatccagcagctggaggatcagcttcaacagaagtccaaggagataagccagtttcttaatagactgcccctgcagcagcacgaaaccgccagtcaaaccagctttccggatgtgtataatgagggcacacaagccgtgactgaggagaacattgcctccctgcaaaagagagtggtggaacttgaaaacgagaaaggagcactcttgctttcttccatcgaattagaggaattaaaggccgagaacgaaaagctcagctcacagatcacactgcttgaggcccaaaaccgaaccggggaggcagacagggaggtttcagagatctccattgtggatatcgccaataagcggtcgtcgagtgccgaagaaagcggtcaggatgtgttggaaaacacatttagccaaaaacacaaggaattatctgtcctgctcctggagatgaaggaagcgcaggaagagattgccttccttaaacttcagctccaaggcaagagggccgaagaggcagaccatgaagtgttggatcagaaagaaatgaagcagatggaaggagagggcattgcccctataaagatgaaggtcttccttgaagataccggccaggactttcctctcatgcctaacgaggagagctctctgcctgccgtcgaaaaggaacaggccagcactgagcaccagtcaaggacatctgaggagatctcattaaatgatgccggcgtcgaattgaagagcaccaagcaagacggcgataagtctctcagcgcagttcctgacataggacagtgccaccaagacgagctggagcgactgaaatcccagatcctggagcttgaactgaactttcataaagctcaggagatttacgagaaaaatcttgatgagaaagccaaagaaattagcaatttgaaccagcttatcgaagagttcaagaaaaacgctgacaacaactcgtccgctttcacagcccttagcgaggaacgggaccagctgttgagtcaagtcaaagagttgagtatggttactgaactgcgtgcacaggtcaaacaactggagatgaacttagctgaagccgaacgccaaagacggctggactacgagagtcaaactgcgcacgataatctccttaccgaacagatccactccctgagcatcgaggctaagtctaaagacgttaaaattgaggtgctgcagaacgaactggacgatgtgcagctccagttcagcgagcaatcgactctcataagatccctccaaagtcaattgcaaaacaaggaatccgaggtgctggaaggagccgagcgagtgcggcacatcagcagtaaagtggaagagctgagccaagcattgagtcagaaagagcttgagatcactaaaatggatcagttgctcctagagaaaaagcgtgatgtggaaacgctgcagcagacgatcgaggaaaaggatcagcaagtgacagaaatttcttttagcatgactgagaagatggtgcaattgaatgaggaaaaatttagtctgggcgtggagatcaagacactcaaggagcagctcaaccttctaagtcgggccgaggaagcaaaaaaagagcaggttgaagaggacaacgaggtttcttctggtcttaaacagaattacgatgagatgtctccggcaggacagatctccaaagaagagctgcagcatgagttcgatctgctaaaaaaggaaaatgaacagaggaaaaggaagttacaagctgcccttatcaaccggaaggaactgctgcaacgggtctccagactggaggaagagctagctaacttaaaggacgaaagcaaaaaggagattcctttgagtgaaactgagaggggcgaggtggaagaggacaaagagaacaaagagtactccgagaaatgtgtgactagcaagtgccaagagatagagatatatctgaaacagaccatttctgaaaaggaagtggagctgcagcatatacggaaggatctggaggagaaactggcggcagaggaacagttccaggcacttgtgaaacaaatgaaccagactctgcaggataaaaccaatcagattgacctcttgcaagccgaaatcagtgaaaatcaagctataattcaaaagttgatcacttctaatacagatgcatctgatggtgactccgtagccctcgtgaaagaaaccgtggtgataagtcctccctgcactggtagttcagagcactggaaacccgagctcgaggagaaaattctcgcgctggaaaaggagaaggaacagctccagaaaaaactgcaagaggctctaaccagccgcaaggctatcttaaaaaaagcacaagaaaaggagaggcatctccgagaagaattgaagcagcaaaaagacgattataaccgtttgcaggagcagtttgacgaacagtcaaaagaaaatgaaaatatcggcgaccagctgagacagctgcaaatccaagtgagggagagcatcgacggcaaactcccaagtaccgatcaacaggagagttgcagttccactcccgggctagaagagcctttgttcaaggccactgaacaacatcatacgcaacccgtgctggagtcaaacctttgccctgattggccttcacactctgaagacgcaagcgccctgcaaggaggaacgtccgtcgcgcaaataaaggcccagctcaaggaaatcgaggccgaaaaagtggaacttgagctgaaggtatcaagcacaacaagcgaactcacaaaaaaatcagaggaggtcttccaactccaggagcagatcaacaaacagggtctggagatcgagagcctgaaaaccgtctcacacgaggccgaggtacacgctgaatcgctacagcagaaactggagtcaagccagctgcagattgcggggctggagcacctcagagaacttcagccaaagctggatgaactgcagaaactaattagcaaaaaggaggaggatgtgtcatacctctccgggcagctctcagaaaaagaagcggccttgaccaaaatccagacggaaatcatagaacaagaggaccttattaaggcccttcatacccagctggaaatgcaggcaaaggaacatgacgagcgcattaaacagctgcaggtggagctttgcgaaatgaaacagaagcctgaggagataggagaggaatcgcgcgctaagcaacagatccagaggaagctgcaggccgcgctgatcagccgaaaggaggccctgaaagagaataagtcattgcaggaggaactctccttggcccgcggtacaatcgagaggctgacaaaaagcctggccgatgtggaatctcaggtgagcgctcaaaataaagagaaagataccgtgctgggccggctggcgttgctgcaggaagagcgcgataaactgatcaccgaaatggatcgatcgttgctggaaaaccagtcactttccagctcttgtgaatcccttaaactcgccctggaaggcctgactgaagacaaagagaagttggtgaaggaaattgaaagtcttaagtcatctaaaatcgcagaatccacagaatggcaggaaaagcataaggaactgcagaaggagtacgaaatactcctgcagagctacgaaaacgtctctaacgaggcggaaaggattcagcacgtcgtggaggccgtgcgccaggagaagcaggaactctacggcaaacttaggagtacggaggcgaataagaaggaaactgagaaacagctccaggaggcagagcaagaaatggaagagatgaaagagaagatgaggaaattcgccaagagcaagcagcagaaaatactcgaacttgaagaggagaacgatcgccttagggccgaagtgcaccctgctggcgacaccgcaaaagaatgcatggaaactctgctctcatccaatgcgtctatgaaagaggagctggaacgcgtaaaaatggagtatgaaactctgtccaagaaatttcagagcctgatgagtgagaaagattccctgagcgaggaagtccaggacttaaagcatcagattgaaggaaatgtgtcaaaacaggccaatctggaagcaaccgaaaagcatgataatcaaactaacgtcacggaggaagggactcagtccatccctggagagaccgaggaacaggactccctcagcatgagtactcggcctacgtgcagtgaatcagtcccatctgctaagtctgctaatcctgctgtttctaaggactttagttcccatgacgaaatcaacaattatctgcagcagatcgatcagttaaaggagagaatagccggcttagaggaagaaaaacagaagaataaagagttttctcagaccttagagaacgagaaaaatactttgctctcgcaaataagtactaaggatggtgagctgaaaatgctgcaggaagaggtcactaaaatgaacctgctgaatcagcagattcaggaagagctttctcgtgtcaccaaactaaaggagactgcagaagaggaaaaggacgatttagaggagcggctgatgaaccagctagctgagctgaatgggagtattggaaattattgccaggatgtaactgatgcacagatcaaaaacgagcttttggaatctgaaatgaaaaacctcaaaaaatgcgtgagtgagctagaggaagaaaaacagcagctagtcaaggagaagactaaggtggagtccgaaatccgtaaggagtatttagagaagattcagggcgcccaaaaggagccgggcaataaatcacatgccaaggaactccaggagctcctgaaggagaagcagcaggaagtgaaacaactccagaaggactgcattcggtatcaggaaaaaataagcgctctggaacgaactgtgaaggcgctggagtttgtccagacggagagccagaaagatctggaaatcaccaaagaaaatctggctcaggccgtagagcaccggaaaaaagcacaggccgaactggcatcatttaaggtgctgttagatgacactcagtccgaagctgccagagttctggcagacaatctcaagctgaaaaaagagctgcagtctaataaggaatcagtcaaatctcaaatgaaacaaaaggacgaagaccttgaaaggcgacttgaacaggcggaagagaaacacttgaaggaaaagaagaatatgcaagaaaagctcgatgccctgagacgggagaaggtgcatcttgaagaaaccataggtgaaattcaagttactctgaataagaaggataaggaagtgcagcagctccaagaaaacctggattcaactgtcactcaactggctgctttcaccaaaagcatgagctccttgcaggacgatcgggatagggtgatcgacgaagccaaaaagtgggagagaaaattttctgatgcgatccagtcaaaagaagaggagatccgacttaaggaggataattgctccgtccttaaggaccagctaagacagatgtccatacacatggaggagctgaaaatcaacatctccaggctggagcatgataaacagatctgggagagcaaagctcaaacagaagtgcagttacagcaaaaggtatgtgacacactccaaggcgagaacaaggaattactgtcgcagttagaggaaacgcgccatttataccatagctctcaaaatgagctggctaagttagagtctgagttaaagtctctcaaggaccagctcaccgacttgtctaatagcctggagaaatgcaaggagcagaaagggaatctcgagggcatcattagacaacaggaggccgacatccagaactccaagttctcctatgagcagctagagaccgatttacaggccagtcgggagctgacttcacggttgcatgaagaaatcaatatgaaggaacagaaaattattagccttctctctggaaaggaggaagccattcaggttgccatagccgagctgcggcagcagcacgataaggagataaaggagctcgagaatctcctgtctcaggaggaggaggaaaatattgttttggaagaagagaacaaaaaggccgtggataaaacaaatcagcttatggaaacccttaagactatcaagaaagagaatatccagcaaaaagcgcagctagactccttcgtcaagagtatgagcagcctgcagaatgaccgggataggatcgtaggggactaccagcagcttgaagagaggcacttgtcgattattctagaaaaagaccagctgatacaggaggcggcagccgagaataataagttaaaggaggaaatcaggggcttgagaagtcacatggacgatctaaatagcgaaaatgctaagctcgacgctgaactgatccagtatagagaagatctgaaccaggtgatcaccatcaaagattctcagcagaagcagctgctcgaggttcagcttcagcaaaacaaggagcttgagaataagtatgcaaagctggaagagaaactcaaggagagtgaagaggcaaacgaagacctccgacggtccttcaacgccctgcaggaagaaaaacaggacttgagtaaagaaatagaaagtctgaaggtatccatatcccagctcacccgacaggtgacagcattgcaggaggaggggacactcggtctctaccatgcccagctgaaggtgaaggaggaggaagtccataggctgtctgctctcttctcttccagccaaaaaaggatcgccgagcttgaagaggaactggtgtgtgtgcagaaggaagctgctaagaaggttggggagatagaagataagctgaaaaaggagctcaagcaccttcaccacgatgcagggattatgcgcaatgagaccgaaaccgcagaagaacgagtcgcagagctggctagggacttggtagagatggagcagaagcttttgatggtgaccaaggaaaacaagggcctgacggcgcagatacaatcttttggtcggagcatgtcgagtttgcagaacagtagggatcacgctaatgaagaactagacgagctgaagcggaaatacgatgccagtctgaaagagttagctcaactcaaagagcaggggctactgaatagggagagagatgcgctgttgtccgagaccgctttcagtatgaattcaacagaagagaactccctctcgcacctggagaagctgaaccagcagctgttgtccaaagacgagcagctcttgcacctttcgtcccagctggaggattcctataaccaggtgcaatcatttagcaaggccatggctagtttgcaaaatgaacgggaccacctgtggaacgagttggagaagttccgaaagtctgaggaaggtaaacagcgatctgcagctcaaccttccacctctcccgcagaggtccagagccttaaaaaggccatgtctagcctgcagaacgatcgagatcgcctgctgaaggagttaaagaatcttcagcaacaatacctacagattaatcaggaaattacagaactccacccactgaaagctcaactacaagagtaccaggacaaaactaaggcatttcagattatgcaggaagagctccgtcaggagaacttgtcctggcagcacgaactgcatcagctacgcatggagaagagctcctgggagatacacgaaagacgcatgaaggagcagtacctgatggctatcagcgacaaagaccagcagctaagccatctgcagaatctgatccgcgagttaaggtcttcctcaagtcagacgcagccccttaaagtgcagtaccagagacaggcctccccagaaacgtccgcttcgccagacggctcacagaacttggtctacgagacagagctgctccgcacccagcttaacgattccctcaaggaaatccatcaaaaagaacttcgaatacagcagctgaacagtaacttttcccagctacttgaggagaagaatactctgtcgatccagctgtgcgatacctcccaaagcttgcgtgaaaaccagcagcattatggtgatctgctcaatcactgtgcagtgcttgagaagcaggtccaggagctccaggccgtgagcaaggagaagggacctcttaatattgacgtggcccctggcgctcctcaggagaaaaacggtgtccacaggaagtcagatcccgaagagctgcgtgaaccccagcagagcttttctgaggcgcagcagcagctatgtaacacccgccaggaggtgaatgaactgagaaagctgctcgaggaggaaagggatcagagggtggctgccgaaaatgccctgtcagtggcggaagagcagatccgccgcctggagcactcagaatgggatagcagcaggaccccaattattgggtcctgcggcactcaggagcaggccttgctgatagaccttaccagtaactcctgccggcggaccagaagcggggtggggtggaaaagagtgctgagaagcctctgccacagccgcactagggtacctctgttggccgccatttacttcttgatgatccacgttctgctgatcctctgctttactgggcatctctag

SEQ ID NO: 189766 - DNA, 741 bp, synthetic construct
  misc_feature 1..741: note = Description of Artificial Sequence: Synthetic coding sequence
  source 1..741: mol_type = other DNA
atgagctgggccgccgtgctggccgtggccgccgcccggttcggccatttttggggatgccgctggcctggccccatggcccagggctgggccggcttttccgaggaagagctccgtagactgaagcaaacaaaggaccctttcgaaccccagaggagacttccggctaagaaatctcgccagcagttacagcgggaaaaggccctggtggaacagtctcagaaattaggccttcaggacggaagcacaagtctcttacccgaacagctgctgtctgccccaaagcaacgtgttaacgtacagaaacccccattctcctcaccaacactccctagtcactttacactgacttcccccgtcggcgacggccagccacagggcatcgagtcacagcctaaggagctggggctggagaattcgcatgatggccataataatgttgaaatcctccctccaaaacccgactgtaaactggagaagaagaaggtggaactgcaggagaagagtaggtgggaagtgcttcagcaggaacagcggttgatggaggagaaaaacaagcgcaaaaaagctctgctggctaaagcaatcgccgagaggtccaagagaactcaggcagagactatgaaactgaagcgcattcagaaggagctgcaagccctggacgatatggtttctgccgacattggaattctgcggaacaggatagaccaggcctcactggattactcatatgctagatag

SEQ ID NO: 189767 - DNA, 1185 bp, synthetic construct
  misc_feature 1..1185: note = Description of Artificial Sequence: Synthetic coding sequence
  source 1..1185: mol_type = other DNA
atgagctgggccgccgtgctggccgtggccgccgcccggttcggccacttctggggatgtcggtggccaggccctatggctcaggggtgggctggatttagcgaagaagagctgcggcggttgaaacaaactaaggaccctttcgagccacagagacggctcccggctaagaaatctcggcaacaattgcagcgggaaaaggccttggtagagcaatcccaaaagcttggtctgcaggacggcagcacttccctgctgccagaacaactactgtctgcccctaagcagagggtcaacgttcaaaagccccctttttcctctcctacactcccatcgcatttcactctgacaagtccagttggcgacggtcagccacagggcatcgagagccagccaaaggagctgggactggagaactcacatgacggccacaataatgtagagatccttccacccaaaccggattgcaagctggaaaaaaaaaaggtagaactgcaggagaaatcccgctgggaggtgttgcagcaggaacagaggctaatggaggagaagaacaagcgcaagaaggccctcctagctaaagcaatcgccgagaggtcaaaacgaacgcaagccgagaccatgaaactgaagcggatacagaaagaacttcaggctctggacgatatggtcagcgcggatatcggtattctgcgcaatcggattgatcaggcttcactggactactcatatgccaggaagagattcgacagagccgaggcagagtatattgccgccaagctggatattcagagaaagaccgaaattaaggagcagcttactgagcatctgtgtacaattatccagcaaaatgagctgcgcaaggctaagaaactagaagaactgatgcagcaattagatgtggaggccgacgaggagactctcgagcttgaggttgaggtagaacgtctgctgcatgagcaggaggtggaatcaagacggcccgtggtgagactcgagcggccctttcagcccgccgaggagtccgtcaccctggagtttgctaaggaaaatagaaagtgccaagaacaggctgtgagccccaaggttgatgaccagtgcggaaatagtagttccataccgttcttaagtccaaactgtcccaatcaggaaggcaatgatatctctgccgcactggcaacctag

SEQ ID NO: 189768 - DNA, 861 bp, synthetic construct
  misc_feature 1..861: note = Description of Artificial Sequence: Synthetic coding sequence
  source 1..861: mol_type = other DNA
  misc_feature 1..255: note = DNA
  misc_feature 256: note = RNA
  misc_feature 257..861: note = DNA
atgcccctggacgccacctggaacatcaccgtgcagtggctggccgttgacatcgcttgtcgtactctcatgtttctcaaactgatggcaacttactctgcagcctttctccctgtggtcatcggtttggaccggcaggcagccgttttgaaccccctggggtccagatccggcgtgaggaaactattgggcgctgcttggggtctctcatttctcttggcgtttccacagctctttttattccatactgtgcactgagctggccctgtgccatttactcaatgcgtcactaaaggctctttcaaggcccagtggcaggagacaacctacaatttgtttaccttctgttgcctgtttctgctccctttaaccgcgatggctatctgctattctagaattgtgttgtcagtctcaagaccccagacccggaagggtagccatgccccagccggggagtttgcactacctcgatcatttgacaattgcccccgggtcaggttacgggcattgaggcttgcattgttaatattgctgacgtttatattgtgctggaccccatactacctactcggaatgtggtattggttctcgccaacgatgctcaccgaagttcctccgagcctcagccatatcctgttcctacttggtctgttgaatgcaccccttgatcctctactgtatggcgcttttaccttagggtgcagacggggtcatcaggaactttccatcgactctagtaaggagggctctggacgaatgctgcaggaggaaattcacgcatttcggcagttggaggtgcaaaagaccgtgactagcagacgggcgggtgagaccaagggcatcagtattacatcgatctag

SEQ ID NO: 189769 - DNA, 879 bp, synthetic construct
  misc_feature 1..879: note = Description of Artificial Sequence: Synthetic coding sequence
  source 1..879: mol_type = other DNA
  misc_feature 1..273: note = DNA
  misc_feature 274: note = RNA
  misc_feature 275..879: note = DNA
atgagcgccggcaacggcaccccctgggacgccacctggaacatcacagtgcaatggctggccgtggatattgcatgtagaaccctgatgtttcttaaactgatggcgacatactccgccgccttcctccccgtggtcatcggccttgacaggcaggcagcagtgctgaatccactgggttccaggtccggtgtgagaaagcttctgggagctgcgtgggggctctcgttcctactggcctttccacaactgttcctcttccacaccgttcattgagctggacccgtgcccttcacgcagtgtgttacaaagggttctttcaaggctcagtggcaggagactacttacaatctcttcacattttgctgtttatttctgctgccccttacagctatggcgatatgctactccaggatagtcctatctgtcagccgaccacagacgaggaaaggctcgcacgccccagccggtgaattcgcactgccccgctcattcgacaactgcccaagggtgcgtttacgcgcattgagactcgcactgttgattttgctgacattcatattatgctggactccgtactatctgttgggaatgtggtattggttcagccctaccatgctgacggaagtgccgccgtccctgagccatatcctctttctgcttggcctgcttaatgcccccctggaccctttattgtatggtgcattcacacttggatgtcggcgcggccatcaggagcttagcatcgatagttctaaagaggggagtggccgcatgctccaagaggagatccatgcctttcgccagcttgaagtccagaagaccgtcacaagccgacgggctggcgaaaccaaggggattagcatcacatcgatttag

SEQ ID NO: 189770 - DNA, 363 bp, synthetic construct
  misc_feature 1..363: note = Description of Artificial Sequence: Synthetic coding sequence
  source 1..363: mol_type = other DNA
atggccagcagccggcggggcctgctgctgctgctgctgctgaccgctcatctcggccccagcgaggcccagcattggtctcacgggtggtatccgggtggaaagcgcgcgctgtcaagtgcccaagatcctcagaatgctctcaggccacccggccgggccctggacaccgctgccgggtcccctgtccagacggcccacggcctgccatcagacgccctcgctccactggatgattccatgccgtgggagggtcgcactaccgcccagtggtccctccacagaaaaaggcatctggcccgaaccttgctgacagccgctagggaaccgcgcccagctcctcccagtagtaataaggtctag

SEQ ID NO: 189771 - DNA, 342 bp, synthetic construct
  misc_feature 1..342: note = Description of Artificial Sequence: Synthetic coding sequence
  source 1..342: mol_type = other DNA
atggccagcagccggcggggcctgctgctgctgctgctgctgaccgctcacctaggcccaagcgaagctcagcactggagccatggatggtatcctggaggtaaacgcgccctgagctctgcccaggatccccagaatgcccttagacccccggctggctcacccgtgcagactgctcatgggctgcccagtgacgccttagcccctctagatgactccatgccatgggaggggagaaccacagctcaatggtctctgcataggaaacgccacttggccaggacgctactcactgcagcacgcgagcctcgccccgctcctccctccagtaacaaggtttag

SEQ ID NO: 189772 - DNA, 339 bp, synthetic construct
  misc_feature 1..339: note = Description of Artificial Sequence: Synthetic coding sequence
  source 1..339: mol_type = other DNA
atggccagcagccggcggggcctgctgctgctgctgctgctgaccgcacatctgggccccagtgaagcccaacactggtctcacgggtggtaccccggagggaaacgcgctttgtcctccgctcaggacccacagaatgctctcagacctcctggtagtccggtccaaaccgctcacggtctcccgagcgatgccctcgcaccgctggatgacagtatgccctgggaggggcggaccaccgcacagtggtccctgcaccggaaaagacatctggcccggactctgctgactgctgcccgagagccaaggcccgcccctccatcttctaataaagtgtag

SEQ ID NO: 189773 - DNA, 339 bp, synthetic construct
  misc_feature 1..339: note = Description of Artificial Sequence: Synthetic coding sequence
  source 1..339: mol_type = other DNA
atggccagcagccggcggggcctgctgctgctgctgctgctgaccgcacacctcggtccatctgaggcacagcattggagtcatggctggtatcccggtggcaaacgggcattatctagcgcacaagatccacaaaatgcactacgccctccggggtctccggtgcaaaccgcacacggcctgccgtcagacgcgctggccccgctggacgattccatgccatgggagggtagaaccaccgctcaatggagtctgcatagaaagcgccatttagcgaggactcttctgactgcagcccgcgagccgcggccagcgccaccttcctccaataaagtgtag

SEQ ID NO: 189774 - DNA, 342 bp, synthetic construct
  misc_feature 1..342: note = Description of Artificial Sequence: Synthetic coding sequence
  source 1..342: mol_type = other DNA
atggccagcagccggcggggcctgctgctgctgctgctgctgaccgcacatctggggccctcagaggctcaacattggtctcacggatggtatcctggcggaaaacgcgcactttcctcggcacaagaccctcaaaatgcgctccgcccacccgcgggatctccggtccagactgctcatggcttgcctagcgatgccttggctccattggacgattcaatgccctgggaaggacggacaacagctcaatggagtcttcataggaaaagacacctcgctagaactctactgaccgctgctcgggagccaaggcctgcccctcccagctcaaacaaggtgtag

SEQ ID NO: 189775 - DNA, 945 bp, synthetic construct
  misc_feature 1..945: note = Description of Artificial Sequence: Synthetic coding sequence
  source 1..945: mol_type = other DNA
atgtacaagatggagtacagctacctgaacagcagcgcctacgagtcgtgcatggccggcatggacacatctagtttagcaagcgcgtatgcagacttttccagttgttctcaagcgtctggatttcagtacaatcccatcagaaccacgtttggtgcaacctcaggctgcccctcattgactcccggatcctgctccttgggcaccctgcgggaccatcagtcctctccctatgcagctgtgccctacaaactgtttaccgaccatgggggtctgaatgaaaagcgcaagcaacgtcgaatcaggacaacctttacttctgctcagcttaaggagctggaacgggtgttcgccgagacacattatccagacatctatacaagggaggagctcgccctgaagatagatctgaccgaggccagggttcaggtatggtttcagaatcgccgagccaaatttcgtaaacaagagagggcggccgccgccgcggccgcagccgccaagaatggcagctccgggaaaaagtcggactcatctagagatgatgagtcaaaggaagcaaaatctaccgacccggactcaaccggagggccagggcccaaccctaatccaactcccagttgcggagcaaatggcggaggaggtggtgggccatctcccgcaggagcgcctggagcagcaggccctggaggtcccggaggagagccaggtaaagggggagccgcggctgcggcggctgcagctgctgcggccgccgctgcagccgctgccgccgctgcgggtggcctggcagctgccggtgggcccggacaaggctgggcacctggccccggccccattactagcatcccggattctctcggtggaccctttgccagcgttctttcaagcttacagcgacctaacggggccaaggcagccctggtcaagagcagcatgttttag

SEQ ID NO: 189776 - DNA, 750 bp, synthetic construct
  misc_feature 1..750: note = Description of Artificial Sequence: Synthetic coding sequence
  source 1..750: mol_type = other DNA
atggccaacagcgccagccccgagcagaaccagaaccactgcagcgccatcaacaacagcatccccctgatgcagggtaatcttccaacattgaccctcagtggaaagatcagagtgaccgtcacattctttttgttcctcctgtcagctactttcaatgctagctttctgctcaagctccaaaaatggacacagaaaaaagaaaagggcaagaaactgtcacgaatgaagcttttgctgaaacatttgaccctagccaatttgctggagacactgattgtgatgcctctcgacggcatgtggaatattacggtgcagtggtacgccggcgaattactctgtaaggtactgagttatctaaagcttttctcaatgtatgcccccgcatttatgatggtagtgattagcctcgacagatctcttgccatcacaaggccgctggcgctgaagagtaactcaaaggtggggcagtctatggtcggcttagcatggatcctaagcagtgtgtttgctggcccccaactgccgctgcaccacccttctttccaccacgctgacctgcagtgtaaaaatcaccttcatcctgacaccgggccaagcagtggccccccaaggacgacaactgagtccgtgcaagaacagtataccaagtccacagccgaggactccaagaatgacggatgtatctgccattttatctattgcctgctggactctcttctttgcccgcgtaatttagtgttagtgtag

SEQ ID NO: 189777 - DNA, 2055 bp, synthetic construct
  misc_feature 1..2055: note = Description of Artificial Sequence: Synthetic coding sequence
  source 1..2055: mol_type = other DNA
atggaggagaacctgatcagcatgcgggaggaccacagcttccacgtgcggtaccgtatggaagctagctgcttagaactggcactcgaaggagagcgcctgtgtaagagtggagattgccgggccggcgtgagcttctttgaggctgccgtacaggtgggcacagaggacctgaaaaccctcagcgctatctatagtcagctgggcaatgcctacttctaccttcatgactacgcaaaagcactggagtatcaccaccatgatttgacattggcgcggaccattggtgatcagctcggcgaagccaaagctagcggaaacctcgggaacactttgaaggtgctggggaactttgacgaggcaatcgtctgctgccaacgtcatctagatatctcacgcgagcttaacgataaagtgggcgaggccagggctttgtacaatcttggtaatgtttatcatgcaaagggtaagagtttcggttgtcctggacctcaagacgtaggcgagtttcccgaagaagttcgggatgccctgcaggctgcagtggatttctacgaggagaacctctctctggtgaccgccttgggagatcgcgcggcccagggacgggcttttggaaatcttgggaatacacattaccttttagggaatttccgagacgccgtgattgctcatgaacagcgcctcctgattgccaaagagttcggggataaagcagcggagagacgagcatactcaaatctgggaaacgcatacatattcctcggcgagtttgagaccgcatctgaatactataagaagacattattactggctcgccagcttaaggatagggcggtcgaagctcagagctgctattctctaggtaatacttacacacttcttcaggattatgagaaggccattgattatcacctcaaacacctggccatcgcgcaggagctcaatgatcggataggcgagggcagggcttgttggtctttgggcaatgcatataccgctttgggcaaccacgatcaagcaatgcattttgctgagaagcatctggagattagcagggaggtgggggacaagagcggcgagcttactgcccgactcaatctgagcgacctccagatggtgctgggactaagctacagcacaaacaacagtatcatgtcagagaacaccgagatagactcgtccctgaacggagtccggcctaagcttggtcgacgtcattcaatggagaatatggagctgatgaagctaacaccagagaaggttcagaattggaattcagaaatactggctaagcagaagccgctaattgccaagccatcagcgaagctgctgtttgtgaacaggctgaaaggaaagaagtacaaaacaaactcttctactaaagtgctacaggacgcctctaattctatagatcaccgcattccaaactcccagaggaagataagcgccgatacaatcggcgatgagggctttttcgatcttctgagccggtttcagtcaaataggatggatgaccagcggtgctgcctgcaggaaaaaaattgccacacagcttcaacaactacctcgtctacaccacccaaaatgatgctcaagacttcttcagttccagtggtgagccctaatacggatgagttcctagatctgttggcctcatcacagagcagacggctcgacgaccagagggcttcattttctaacctgcccggccttaggcttactcagaattcccagtccgtgctgtcccacctgatgaccaacgacaataaggaagcggacgaagatttcttcgacatactcgtgaaatgccagggtagtaggctcgatgatcagcgctgcgcccctcctcccgccacaacgaaaggacccactgtcccagacgaagattttttcagcctgatactgcgctcacagggtaagaggatggatgagcagagagtcttactccagagggaccaaaatcgggacactgacttcggtcttaaggattttctccagaataacgccctgctggagtttaaaaactccggcaagaagtccgctgaccattag

SEQ ID NO: 189778 - DNA, 2055 bp, synthetic construct
  misc_feature 1..2055: note = Description of Artificial Sequence: Synthetic coding sequence
  source 1..2055: mol_type = other DNA
atggaggagaacctgatcagcatgcgggaggaccacagcttccacgtccgctacagaatggaggcaagctgtcttgagctcgcgctggaaggagagagactttgtaagtccggtgactgtagggccggggtctccttcttcgaggccgctgtccaggttggtaccgaggaccttaaaaccttaagcgctatttattcccaactggggaatgcctatttctacttacacgactacgccaaagctttggagtaccaccatcacgacctgaccctagccagaaccatcggggaccaacttggggaggccaaggcatctggtaacctcggtaatacccttaaggtgctcgggaactttgacgaagctatcgtgtgctgtcaaagacatctggacattagccgggagctcaatgataaggtgggggaagccagagctctctataatttgggaaacgtgtaccatgccaagggcaaatcttttggctgccctggccctcaggacgtcggcgagtttcctgaagaagtgcgcgatgctctccaagccgccgtggacttctacgaggagaatctttctctggttaccgcacttggcgatagagcagcccagggccgcgcattcggcaatcttggaaacactcattatttactgggaaattttagagacgccgtaatagctcacgaacagcgtctactcattgccaaagagtttggtgataaggccgcggaacgaagggcttactctaatctgggtaacgcatacatattcttgggcgaattcgaaaccgccagtgagtattataagaaaactctcctcctggccaggcaactaaaagatagggcggttgaggctcagtcctgctactcccttggcaatacgtacaccctcctacaggattacgagaaagccattgattaccacctgaagcacctggctattgcgcaggagctaaacgacagaataggcgagggccgcgcttgctggagcctgggaaacgcctacacagcattggggaatcatgaccaagcgatgcacttcgctgaaaaacatctcgagatttctcgagaggtgggtgataaaagtggcgagctgaccgctagactcaatctgagcgacctgcagatggtgcttggacttagctactcaacaaacaatagcattatgtctgaaaacacagagatcgacagcagcctcaatggagttcgacctaaactgggaaggcggcactcgatggagaacatggagctcatgaaactgacccctgagaaagtgcaaaactggaactctgagatcctggcgaaacaaaaacctttgattgctaaaccaagcgctaagctgctgttcgtgaaccgcctgaaaggtaaaaagtacaagacaaacagtagtaccaaggtgttgcaggatgcaagcaattccattgaccaccgaatacctaactctcagagaaaaattagcgccgacacaattggggatgagggtttctttgacttgttgtcaaggttccagtctaacaggatggatgaccagcgatgctgcctccaggagaaaaactgccataccgccagtaccacaactagcagtactccgcccaaaatgatgctgaagacaagctccgtgccagtagtttcacccaacacggacgagtttttggatttattagcgtcgtcccagtctcgcagattggatgaccagcgcgcctcattcagcaatttaccagggctccgactgacacaaaacagtcagtccgtgctaagtcacctcatgacgaacgataacaaggaagcagacgaagatttcttcgatatactggtgaagtgccaaggatcccggctcgatgatcagcgatgtgcccctcctcccgctaccacgaaaggacctaccgtgccggacgaggacttcttcagcctcatcctgcggtcacagggaaagaggatggatgaacagcgggtcctgctccaaagagatcagaaccgggacacagacttcgggctgaaagactttttgcagaataacgccctgctggagttcaagaattcggggaagaagagcgctgatcattag

SEQ ID NO: 189779 - DNA, 228 bp, synthetic construct
  misc_feature 1..228: note = Description of Artificial Sequence: Synthetic coding sequence
  source 1..228: mol_type = other DNA
atggaggagaacctgatcagcatgcgggaggaccacagcttccacgtcaggtatcgcatggaagcctcatgccttgagctggcactcgaaggggaacgcctctgcaagagcggcgattgcagagccggcgtatcattctttgaggccgcggtgcaggtgggaaccgaggatctgaagaccctgtcagctatctactcacaactgggaaatgcgtacttctacctctag

SEQ ID NO: 189780 - DNA, 642 bp, synthetic construct
  misc_feature 1..642: note = Description of Artificial Sequence: Synthetic coding sequence
  source 1..642: mol_type = other DNA
atggaggagaacctgatcagcatgcgggaggaccacagcttccacgtaagatatcggatggaggcttcctgtttggagctggcgttggagggggagaggttgtgtaaaagtggcgactgccgggcaggcgtgtcttttttcgaggccgccgtgcaagttggcaccgaggaccttaaaaccctttcagccatatactctcagctgggtaatgcttacttttatctgcatgactacgctaaagccctggagtaccatcatcacgatttgacccttgccagaacaattggagaccagttaggggaagcgaaggcaagtggcaacctcgggaataccctcaaagtgttggggaattttgatgaagccattgtctgttgtcagaggcacctggatatctcgagagaacttaacgataaggttggggaagcgcgagctctatacaaccttggcaacgtgtatcacgccaaagggaaatcctttggctgccccgggccgcaagacgtcggggaatttcccgaggaagtgagagatgcgctacaggctgcagtggacttttatgaggagaacttgtcattagtcacagcgcttggagatagagctgcccaggggagagctttcgggaacctgggaaacacacactattag

SEQ ID NO: 189781 - DNA, 159 bp, synthetic construct
  misc_feature 1..159: note = Description of Artificial Sequence: Synthetic coding sequence
  source 1..159: mol_type = other DNA
atggaggagaacctgatcagcatgcgggaggaccacagcttccacgtccggtacaggatggaagcctcatgtctggagttagctcttgagggcgagcgattgtgcaaatccggagactgccgggccggcgtctccttttttgaggcggccgtccaatag

SEQ ID NO: 189782 - DNA, 1290 bp, synthetic construct
  misc_feature 1..1290: note = Description of Artificial Sequence: Synthetic coding sequence
  source 1..1290: mol_type = other DNA
atggccagcctgtgggagagcccccagcagtgcatcatcctgagcccactgtccggatggtggttcagtataggaatctccatcctcacgtcttccgccctagtcctcaagcctcagatgctgaaaggcgagttgcagactaggccttcgcaacgtccgtcccgcaaggcgtttagacgtaacaattttgagtacactctggaggcgtccaagtctcttcgtcaaaagcctggggattctactatgacgtacctgaataaaggacaattttatccaatcactctcaaggaagtgtccagcagcgaaggaattcaccacccaatcagcaaagtaaggagtgtgatcatggtggtgtttgcggaggacaaaagccgtgaagaccagcttagacattggaaatactggcactcccggcaacataccgcaaaacagagatgtattgacattgccgactacaaagagagtttcaacaccatctcaaacattgaggaaatagcctacaacgctatctccttcacttgggacatcaacgacgaagcgaaggtattcatatccgtcaattgcttatccactgatttcagttcccagaagggtgttaaggggctccccttgaatatccaagtcgatacctatagctacaataaccggtccaataaacccgtacatcgagcctactgtcagattaaggtcttttgcgataaaggcgcagaacggaaaatcagggacgaagagcgcaaacagtccaagagaaaagtgagtgacgtcaaggttcctctcctccctagccacaaacggatggatattaccgtcttcaaaccttttatcgacctcgacacccagccagtgctctttatccccgatgtgcattttgccaatcttcagcgcggtactcacgtcctccccatcgctagcgaggagttggagggcgaaggtagcgtactgaaaagaggaccttatggcacagaggatgattttgccgtgccaccttccaccaaactggcacgcatcgaagagccgaagagggtgttgctctatgttagaaaggagagtgaggaggtgttcgacgctttgatgttaaaaaccccatcactgaagggccttatggaagctattagtgataaatacgatgtgccacatgataagatcggaaagatcttcaagaaatgtaagaaaggaattctggtaaacatggatgataacatcgtgaaacactacagcaacgaagacacgttccagcttcagattgaggaggcgggcggcagctacaagttgacactcaccgaaatatag

SEQ ID NO: 189783 - DNA, 1857 bp, synthetic construct
  misc_feature 1..1857: note = Description of Artificial Sequence: Synthetic coding sequence
  source 1..1857: mol_type = other DNA
atgacccaggagtacgacaacaagcggcccgtgctggtgctgcagaatgaagctctgtacccccagcgacgtagctacacaagtgaagatgaagcatggaaaagtttcctggagaatccgctcaccgctgcaaccaaagccatgatgagcatcaatggcgatgaagatagcgccgctgccttgggccttctgtacgactactataaagtgccgagggagcgtcgctcttctacggccaagccagaggtagagcaccctgaaccggaccacagcaaaagaaactccatcccaatagttaccgagcagcccctaatttcggctggagagaatcgggtacaagtcctgaaaaacgttccctttaacatcgtacttccccatgggaaccagctcgggatagacaaacgcggtcacctgacagctccagatacgaccgtaaccgtgtccatagccacaatgcccacacactcaatcaagaccgagactcagcctcacgggttcgctgtcggtatcccaccagccgtctatcacccagaacccaccgagagggtggtcgtgttcgataggaatctcaatactgatcagttttccagcggcgcccaagcaccaaacgcacagcgacggaccccagatagcacattctcagaaacattcaaggagggagttcaggaagtgttctttcctagcgacttgtcgttgagaatgccaggtatgaatagtgaggactatgtgttcgatagcgtttcaggtaacaatttcgaatatacccttgaggcctccaaatcgctccgtcagaaacccggggattccacgatgacctacttgaataaagggcagttctaccccatcaccctgaaagaggtgtcctcttcagagggaattcaccatccaatcagcaaagtccgcagcgttatcatggtcgtgttcgccgaggataaaagcagagaagatcaactgcgtcactggaaatactggcacagtaggcagcataccgccaagcagagatgcatagatatagccgactacaaggagtcttttaacaccattagtaacattgaagagatcgcttataatgcaatcagcttcacatgggatattaacgacgaggccaaggtcttcatctctgtgaactgtctgagtacggatttttcctctcagaaaggggtgaaagggctaccactaaacatccaggtagatacgtatagctacaataatcgctccaacaagcccgtgcaccgtgcttattgccagatcaaggtcttttgtgacaagggagctgaacgtaagatcagggacgaagagcggaagcagtccaagagaaaagtgtcagatgttaaagtgccacttctcccatctcacaagagaatggacatcacagtgtttaaaccttttattgatttggacacgcagcccgtgctatttatacctgatgttcacttcgccaacctgcagaggggaacccacgtccttccgattgcaagtgaagagctggagggtgaaggatccgtccttaagcgcggaccctatggaaccgaggacgatttcgctgtgcctccttcaacaaaattggcccggattgaagaacccaagcgcgtgcttctgtatgttagaaaggagagtgaagaggtttttgacgcccttatgctgaaaacccccagtctaaaaggactaatggaggctatctcagacaagtatgatgtgcctcacgacaagattggtaagatatttaaaaagtgcaagaagggtatcctagtgaacatggatgataacattgtgaagcactactccaatgaagacaccttccagctgcagattgaggaagccggaggttcatacaagttgacccttacggagatctag

SEQ ID NO: 189784 - DNA, 1857 bp, synthetic construct
  misc_feature 1..1857: note = Description of Artificial Sequence: Synthetic coding sequence
  source 1..1857: mol_type = other DNA
ctgcccaaggaggtggagaacaagcggcccgtgctggtgctgcagaacgaagcactgtacccccagcggcgaagctacacatccgaggacgaagcctggaaatcctttcttgagaatccactcaccgcagctacaaaagcgatgatgagcatcaacggtgacgaggattccgccgctgcgttgggtctgctgtatgattattacaaagttccccgcgagaggcgttcttcgaccgccaaaccggaagtcgagcatcccgagccagaccactctaagcgcaactccatcccgatcgtaacagagcaacctctgatttccgctggggagaatcgcgtgcaggtgctcaaaaacgtgcccttcaatatagtgttgccacacgggaaccagctgggcatcgacaagagagggcaccttactgcgcctgacacgaccgttaccgtgagcattgcaacaatgcccacacacagcatcaaaacagagacccagcctcacggattcgctgtggggatcccccctgccgtctaccaccccgagccaaccgaacgagtggttgtctttgaccgcaatctgaacacggatcagttttctagcggagctcaagccccgaatgcacagcgccgaaccccagatagcacattctcagaaacgttcaaggaaggcgtgcaagaggttttctttccttcagatctatccttaaggatgccgggtatgaattccgaggactatgtcttcgacagcgtgagtggcaacaactttgaatacacattggaagcttcgaaaagcctgcgccagaaaccaggggactctacaatgacttacctgaacaaaggtcagttttatcctatcacccttaaggaagtctctagcagtgaaggcattcaccatcctatctccaaagttcgctccgtgattatggtggttttcgccgaggataagtcacgggaggatcagctgaggcactggaaatactggcatagtaggcagcataccgccaaacagaggtgcatcgatattgccgattataaggagagcttcaacacaatttccaacatagaagagatcgcttacaatgcgatcagctttacttgggatattaatgatgaagcgaaggtgtttatctccgtcaactgtctgagtacggacttcagtagtcagaagggagtcaaaggattacctctgaacatccaagtagatacctattcctataacaacagatctaataaaccagtgcaccgcgcatattgtcaaataaaggtgttctgcgataagggagccgaaaggaagatcagggatgaggaacggaaacagtctaagaggaaggtgtctgacgtcaaagttcccctgttgccatctcacaagcggatggatataaccgtctttaaaccatttatcgacctggacacccagcccgtcctgtttattcctgacgtgcactttgctaaccttcagaggggaacccacgtgctcccaatcgcaagtgaggagctggaaggcgaagggtccgtacttaagcgcgggccttatggaacagaagatgatttcgctgtgccgccaagcaccaaattggcaaggatcgaggaaccaaagagggtgctactgtacgtgcgaaaagagtctgaagaggtgtttgacgcgttgatgctgaagacaccgtcactgaaaggcctgatggaagccatctctgacaagtatgacgtcccgcacgataagattggtaaaattttcaagaagtgtaagaaagggatcctggttaatatggacgacaatatagtgaagcactactcgaacgaagatactttccagcttcagatcgaagaggccggcggctcctacaaactgactctgacagaaatatag

SEQ ID NO: 189785 - DNA, 1878 bp, synthetic construct
  misc_feature 1..1878: note = Description of Artificial Sequence: Synthetic coding sequence
  source 1..1878: mol_type = other DNA
atgagccaggagagcgacaacaacaagcggctggtggccctggtgccaatgcctagcgacccgccgttcaatactcgcagagcctatacctcagaggatgaggcgtggaagtcatatttagagaaccccctcacagcagcaactaaagctatgatgagtattaacggggacgaggactcggctgcagcgttggggctgctgtacgattattataaggtccccagggacaaacggctcctctctgtgagcaaggcttccgattctcaggaagatcaggagaaaagaaattgccttggaacctccgaagcgcagtccaatctttccggtggagagaatagggtgcaagtgctgaaaactgtccctgtcaatctttcactcaatcaggaccatctagaaaatagcaaacgcgaacagtacagtatctcattccctgaaagctccgcaattatccccgtgtccgggataaccgttgtgaaggcggaggactttacccctgttttcatggctccgccagttcactacccgagaggggacggcgaggagcaacgcgttgttatctttgagcagacccagtatgacgtgccatccctggccacgcacagcgcatatctgaaagatgatcagcggagtacccccgattctacctacagcgagagctttaaagatgccgcaacagaaaaattccggagcgcatctgtgggcgctgaggagtacatgtacgatcagacatccagcggaaccttccaatatacactggaggctacaaaatcactgagacagaagcaaggagagggccccatgacctatctcaacaaaggacagttctacgccatcacattatcggagacaggcgacaacaagtgcttccgacatcccataagcaaggtgcggtcagtcgtgatggtggtgttcagcgaggacaagaaccgggacgaacagctgaaatactggaaatactggcactctagacaacacaccgccaagcagcgagtgctcgatatcgccgactacaaagagtccttcaataccatagggaacatcgaagagattgcctacaatgctgtctctttcacctgggatgtgaatgaagaagctaagatctttatcacagtgaactgcttaagcacagacttctcatctcagaaaggagtcaaagggctgcccctcatgattcagattgacacatacagttacaataaccgtagtaataagccgattcaccgcgcatactgtcagattaaagttttctgtgacaaaggcgcagaaagaaagatcagggacgaagagagaaaacagaatagaaaaaaggggaagggccaggcctcccaaacacaatgcaacagctcaagtgatgggaaactcgctgcaattcctctccagaagaagtccgatatcacatactttaagaccatgccagatctccatagtcagccagttctgtttattcctgatgtccactttgccaatttacagcgcaccggccaggtgtactacaatactgacgacgagcgagagggcggcagcgtcctggtaaagcgcatgtttagaccaatggaagaggagttcggtccggtcccatctaagcagatgaaggaagagggaacgaagcgcgtcctattgtacgttcgaaaggagactgatgatgtttttgatgctttgatgcttaagtctcccacagtcaagggtctgatggaagctattagtgaaaagtacggcctccctgtggagaagatcgcaaaactgtacaaaaagtccaagaaagggatcttggtgaacatggatgataatattatagagcattactctaatgaggacacattcatccttaacatggagtccatggtggaggggttcaaggtaacactcatggaaatctag

SEQ ID NO: 189786 - DNA, 1830 bp, synthetic construct
  misc_feature 1..1830: note = Description of Artificial Sequence: Synthetic coding sequence
  source 1..1830: mol_type = other DNA
atgcccagcgacccccccttcaacacccggcgggcctacaccagcgaagacgaagcgtggaagtcatatttggagaaccccctaaccgctgctaccaaagcaatgatgagcattaatggggacgaagactctgccgctgcactgggcttactctatgattattacaaagtgccacgggataagcgcctgctttcggtctccaaggccagtgactctcaggaagatcaggaaaagcggaactgcctcggcacaagtgaggcacagagcaatctgtcaggcggagagaaccgagttcaggtcctgaagaccgtgcctgtcaacctcagtctgaatcaggaccacttagagaattccaaaagagagcagtactctatctcttttcccgagagctctgcaatcattcctgtgtctggtataactgtcgtcaaggctgaggactttacgcccgtatttatggccccgcctgtccactacccaagaggggatggtgaagaacagcgcgtggtgatattcgaacaaacacagtacgatgtgccctccttggcaactcatagcgcttacttgaaggatgaccaacgaagcacccccgatagcacttactctgagagtttcaaggatgctgccactgaaaaattccggtccgcgtctgtgggcgccgaagaatatatgtatgaccagacctctagcggtaccttccagtataccttagaggccacgaagtctctgagacagaagcagggcgagggccccatgacatatttgaacaaaggacagttctacgcgataaccctgtccgaaacgggcgacaacaaatgtttccgccaccccattagcaaggttcgatcagtcgtaatggtcgttttcagcgaggataaaaacagagatgagcagttgaaatactggaaatactggcacagtcgccagcacaccgccaaacagcgcgtgctcgatattgctgattacaaggagtctttcaacacaatcggaaatattgaggagatcgcctataatgcggtctccttcacgtgggatgtgaacgaagaagcgaaaatcttcattaccgtcaactgcctgtctacagacttttccagccagaaaggtgtgaaaggcttgcctttaatgattcagattgatacctactcatacaataatagatctaacaaacctatccaccgagcatactgccagatcaaagtgttctgcgataagggcgcagagcgcaagatcagggacgaagagcgaaagcagaatcgcaaaaagggaaagggtcaggccagccaaacacaatgcaactcctcctccgacggcaaattggcagccatacctcttcagaagaaatccgacattacttatttcaaaacaatgcctgacctacactcgcaaccagtgcttttcatccctgatgtccacttcgcgaatctgcaacgtacagggcaggtgtactacaacaccgacgacgaaagggaaggaggcagcgtgcttgttaagagaatgtttcgaccaatggaagaggaatttggtcctgtgccatccaaacagatgaaagaggagggaacaaaacgcgtgctcctttacgtcaggaaggaaacagacgacgtgttcgatgctctgatgcttaagtcccccactgtcaaaggacttatggaggccattagcgagaaatacggactgccagtggagaagattgccaagctgtacaagaagtcaaagaagggtatccttgtgaatatggatgacaatattattgaacactattcgaatgaagacaccttcattcttaatatggagagcatggtggaggggtttaaggtgactctcatggagatctag

SEQ ID NO: 189787 - DNA, 1878 bp, synthetic construct
  misc_feature 1..1878: note = Description of Artificial Sequence: Synthetic coding sequence
  source 1..1878: mol_type = other DNA
atgggcaaggacggccggagcaacaagcggctggtggccctggtgcccatgccctcggacccaccgttcaacacccgacgggcatatacgtctgaggatgaggcttggaagagctacctggagaatccactgacagcagcaacaaaagccatgatgtccataaatggtgacgaagactcggctgctgcacttggcctgctgtatgattactataaggtacccagagataaaaggctgcttagcgtgagcaaggcctcagactcacaagaggaccaagaaaagaggaactgcctcggaacgagtgaagcccagtctaatctgtctgggggggagaacagagttcaggttctgaagacagtgccagttaacctttcccttaaccaagatcatctggaaaatagcaagcgggagcagtactcaattagcttccctgaatcctctgcaataattcccgtgagcggtataactgtggtaaaggccgaggactttacacctgtgtttatggcaccaccagtccattaccctcggggggacggcgaagagcaacgtgtcgtaatcttcgagcagacccagtacgacgtgccttctctcgctacgcacagcgcatacctgaaggatgatcaacggtcgacccctgacagcacttacagcgagagtttcaaggatgcagccactgaaaagtttcggtcagcgagcgtgggcgcagaagagtacatgtacgaccagactagctccggcactttccagtacacactcgaagcaacaaaatcacttagacaaaaacagggagaagggccaatgacatatctgaataagggccagttctatgcaataacactgtctgagaccggcgacaataagtgttttcgacatcccatctccaaagtacgcagtgtggtgatggtggtattctccgaggataaaaatagagatgagcagttgaaatattggaaatattggcactcacgccagcacactgccaaacagagagtccttgatatcgcggactacaaggaatcattcaatactatcggcaacatcgaagagatcgcctacaatgccgtgtcattcacctgggatgtgaacgaggaggccaaaatcttcatcactgtcaattgcctctctaccgacttttcttcccagaagggggtgaaaggactgccccttatgattcaaatagacacctactcatataataaccgaagcaacaagcccatccatagagcatactgtcagatcaaagtgttctgcgacaagggcgccgagaggaaaatccgagatgaggagcggaagcagaaccgcaaaaagggcaagggtcaggcatcccagacccagtgtaactcttcttcagacggaaaattggcggcaatcccactgcagaagaaatcagacatcacatactttaagaccatgcctgacctgcatagccagcccgtgctcttcatccccgacgtgcacttcgccaacctccaaaggactggccaggtgtactataatactgatgatgagcgagaaggtgggtctgtcctggtgaaaaggatgttcagaccgatggaggaagaattcggtcccgtaccctcaaagcaaatgaaagaagaagggaccaagagggtgctgttatacgtacgcaaggagactgatgacgtgttcgatgctcttatgttgaaatcccccacagtgaagggcctgatggaagccatttccgaaaagtacggcctcccagtggagaagatagcaaagctgtacaaaaaatccaaaaaagggattctggtaaatatggacgacaacataattgagcactactccaatgaggacacctttattctcaatatggagagtatggtggagggctttaaagtcacactgatggaaatctag

SEQ ID NO: 189788 - DNA, 21 bp, synthetic construct
  misc_feature 1..21: note = Description of Artificial Sequence: Synthetic coding sequence
  source 1..21: mol_type = other DNA
atgagccaggagagcgactag

SEQ ID NO: 189789 - DNA, 1737 bp, synthetic construct
  misc_feature 1..1737: note = Description of Artificial Sequence: Synthetic coding sequence
  source 1..1737: mol_type = other DNA
atgctgcggcggctggacaagatccggttccggggccacaagcgggacgactttctggaccttgcagagagccctaatgcctccgatacagagtgctcagacgagatccctcttaaggtgccaagaacctctccgcgggacagtgaggagctgcgcgatccagcgggcccaggcacattgattatggcaacaggcgtgcaggattttaaccgaaccgagttcgatagactgaatgagattaaaggtcacctggaaatagccctcctggaaaagcatttcctccaggaggagcttaggaagctgcgcgaggaaacaaacgccgagatgctgcgccaggaattagacagggagcgccagaggaggatggagctggagcagaaagtacaggaagtgttaaaagctaggaccgaggaacagatggcccagcagccacctaaaggacaggcccaagcgtccaatggagcggagcggagatctcaggggctctccagccgccttcagaagtggttttatgagaggttcggagaatatgttgaagattttaggtttcagccagaggagaataccgttgagacggaagaacccctttctgcacgccggttgacagagaatatgagacggctgaagaggggcgctaaacccgtgaccaacttcgtgaaaaacctgtctgctctctccgactggtatagcgtgtatacaagtgcgattgccttcactgtttatatgaacgcagtctggcacggttgggctattccattattcctatttttagcaatcctccggctatctttaaattacctcatagccaggggctggcgaatccagtggagcatagtgccagaagtgtcagaacctgtggaacccccaaaagaagatctcacagtatctgaaaagttccagctagtgttagatgtcgcgcagaaagcccagaatctctttggaaagatggccgatatcctcgaaaagattaagaacctgttcatgtgggtccagcccgaaatcacccagaaattatacgtggctctatgggccgccttcctggcgtcctgcttcttcccctacagactagtcggcctcgcagttggcctctacgctgggataaaatttttcctgatagatttcatcttcaagaggtgccccagacttcgagccaagtacgacaccccatatattatctggcggagcctccccactgatccgcagctcaaggagaggtccagcgcagccgtctctcggcggctccagactacttcttcaaggtcctacgtgccttctgctcccgctggactgggtaaagaagaggacgcgggtcgctttcatagcaccaagaaagggaattttcatgagatttttaatctgaccgagaatgaacggcctctggctgtgtgtgaaaatggctggcggtgttgcctgatcaatcgagaccgcaagatgccaactgactatatacgcaatggagtcctatacgtgactgaaaattatctttgttttgagagtagcaaaagtggctctagcaagcgcaacaaagtcatcaagttggttgacattaccgatattcaaaagtataaagttttgagcgtactgcccggcagcggcatggggatcgccgtatctactccgtcaacccagaaacccctggtattcggagcgatggtacaccgggatgaagcattcgagaccatcctgagccagtacatcaaaattacctcggcggccgcctctggaggtgacagctag

SEQ ID NO: 189790 - DNA, 1737 bp, synthetic construct
  misc_feature 1..1737: note = Description of Artificial Sequence: Synthetic coding sequence
  source 1..1737: mol_type = other DNA
atgctgcggcggctggacaagatccggttccggggccacaagcgggacgatttcttagacttagcagaaagcccgaatgcctcggataccgaatgctccgacgagattccactgaaagttcctcgaaccagccctcgcgattctgaggagctgcgcgacccagcaggccccgggaccctcatcatggcaacgggcgtgcaggactttaaccgtacggaattcgataggctaaacgaaataaaggggcacttggaaatcgccctcctggagaagcattttctccaggaagaactgcgcaagctacgggaggagactaatgccgagatgttgagacaggagctggacagggaacgtcagcggcgaatggagctggaacagaaggtgcaggaagtcctgaaggcacggaccgaagaacagatggcacagcaacctcctaaggggcaggctcaagcctctaacggggcagagcgcaggtctcaaggtctttcgagcagactacaaaagtggttttacgagcggtttggtgagtacgtggaggacttccgcttccagcctgaggaaaacacagtggaaactgaggaacctcttagcgctaggcggctaactgagaatatgaggagacttaagagaggcgccaaacccgtgaccaatttcgtcaaaaacctgtccgccctaagtgattggtatagcgtttacacatcagcaatcgctttcacagtgtacatgaacgccgtgtggcacggctgggcgattccactgttcctcttcctagcaatccttcgactttcactaaactatcttattgctagagggtggaggattcagtggagcatcgtgcctgaggtgtcagagcctgtggagccccctaaggaagaccttaccgtcagtgagaaatttcagctggtgctggacgtcgcccagaaggctcagaacttattcggcaagatggcagacattttagagaaaataaagaacttattcatgtgggtccagccagagatcacacagaagctctatgtggcactgtgggcagctttcctcgccagttgtttttttccataccggcttgtgggcctggctgtcggcctctacgccggcatcaagtttttcttaattgattttatctttaagaggtgccccaggctgcgggcaaaatacgatactccttacattatctggcgaagcctgcctacagatccccaattgaaggaacgctcctctgctgcagtatctaggcgactccagacaacttcttcccgctcctatgtgcccagtgcccccgcaggcttgggtaaagaggaagatgcgggcagattccatagtacgaaaaagggcaattttcatgagatctttaaccttaccgaaaatgaacgccccttggccgtgtgcgagaacggctggcgctgctgcctgataaaccgcgatagaaaaatgcccacggattatatacggaacggggttctctacgtgacagagaactatctgtgctttgaatcctctaaaagcggatcttccaaaagaaacaaggtaatcaaactcgtggatatcacagatatacagaagtacaaggtgctctccgtgttgccagggtctgggatgggaatcgcagtgtctacccctagcacacagaaaccgctggtttttggcgccatggttcaccgcgacgaggccttcgagacaatactcagccagtatattaagattaccagcgctgccgcctctgggggggacagctag

SEQ ID NO: 189791 - DNA, 102 bp, synthetic construct
  misc_feature 1..102: note = Description of Artificial Sequence: Synthetic coding sequence
  source 1..102: mol_type = other DNA
atgctgcggcggctggacaagatccggttccggggccacaagcgggacgactttctcgacctggccgaatcaccaaatgcctccgatacagaatgctcttag

SEQ ID NO: 189792 - DNA, 1782 bp, synthetic construct
  misc_feature 1..1782: note = Description of Artificial Sequence: Synthetic coding sequence
  source 1..1782: mol_type = other DNA
atgtggaccctggtgagctgggtggccctgaccgccggcctggtggctggaacccggtgtcctgacggacagttctgccccgtggcgtgctgtctggatcccggcggggcctcctacagttgctgtcgcccacttttagataagtggccaaccacactgtcacggcacctaggtggcccctgccaggttgatgcgcactgcagcgcaggccacagttgcatcttcaccgtctccggcacatcgtcgtgctgcccattccctgaggcagtggcctgtggcgacgggcatcattgttgcccccgtggctttcattgttccgccgatggtagatcttgtttccaaagatctggtaataactctgttggggccatacagtgcccagattcacaattcgagtgccccgacttttcaacttgttgcgtaatggtggatggcagctggggatgttgtcccatgcctcaggcctcgtgctgcgaggatcgcgtgcattgctgtcctcacggcgccttctgcgacctggtccatactaggtgtatcacccccaccgggactcatccgctagccaaaaagcttcccgcacagaggactaatcgcgcggtcgccctctcctcgagtgtgatgtgtcccgacgctcggtcaaggtgcccagatgggagcacttgctgcgaactcccctccggaaagtacggatgctgcccgatgcctaatgccacttgttgctccgaccacttgcattgttgcccacaggatactgtgtgtgatcttatccagtcgaagtgtctgtccaaagagaacgccactaccgacctgttgaccaagttgcccgctcacaccgtcggagatgttaagtgcgacatggaagtgtcttgtcctgacggctacacgtgttgccggttgcagtccggcgcttggggctgttgccctttcactcaggccgtatgttgcgaggaccatatacactgctgccccgcaggctttacatgtgatacacagaagggaacgtgtgagcaggggccccaccaggtgccctggatggaaaaggctccggctcacctatctttgcctgatcctcaggctctgaagcgggacgttccctgtgataatgttagtagctgtcccagcagtgacacctgctgccagctgaccagtggtgagtgggggtgttgtcccatccctgaggcagtctgctgttcagatcaccagcactgctgcccccagggctatacctgcgtggccgaaggacaatgccagcgcggttctgagattgtggcgggactggagaagatgccggcaaggcgcgcctcgctctctcacccacgagatataggatgtgaccagcacacaagctgcccagtgggccaaacatgctgtcccagcctgggcggctcatgggcctgctgccaactgcctcacgcagtctgttgtgaagacagacaacattgctgtcccgcagggtatacttgtaatgtcaaggccagatcatgcgaaaaagaggtcgtgagcgctcagcccgctactttcctagcccgaagtccacacgtcggggtgaaggatgtcgagtgtggggagggccacttttgtcacgacaatcagacctgctgcagagacaatcgccagggatgggcctgctgcccttatcgccagggtgtgtgctgcgccgaccggcgccactgttgccccgcaggattccgctgcgccgctagaggtactaagtgtctgcgaagggaagcacctcgttgggatgctcccctccgggacccagccttgaggcagctgctctag

SEQ ID NO: 189793 - DNA, 1317 bp, synthetic construct
  misc_feature 1..1317: note = Description of Artificial Sequence: Synthetic coding sequence
  source 1..1317: mol_type = other DNA
atgtggaccctggtgagctgggtggccctgaccgccggcctggtggctggcaccaggtgcccggatgggcagttctgtccagtggcatgctgtctcgatccaggaggcgctagttactcttgctgtcggcccctgctggacaagtggccaacaacgttgagcagacatctgggcggaccctgtcaagtggacgcccactgttccgctggacactcatgcatcttcactgtatccggaacatcctcgtgttgcccgtttcccgaagcagtggcctgcggggatgggcatcattgctgccctagagggttccattgctcagcggatggacggtcctgctttcagcggtcagggaataattcggtgggagctattcagtgccctgactcacaatttgagtgtcctgattttagtacgtgctgtgtgatggtggacgggtcctggggctgctgccccatgccccaggcctcatgttgtgaagatcgcgtccactgttgcccccatggagccttctgcgatttggtgcacacccggtgcatcacgcccaccggaacccatcccctcgcaaagaagctcccggctcaaaggactaacagagctgtggcattatccagcagtgttatgtgtcctgacgcgcggagccgctgtcccgacggaagcacatgctgcgagctgcctagcggtaaatatggttgctgcccaatgcccaatgctacatgctgcagtgaccacctgcactgctgcccccaagacaccgtgtgtgacctcatccagtctaagtgcctctccaaggaaaacgccacaaccgatcttttaacaaaactacctgctcacaccgttggtgacgtcaagtgcgatatggaggtgagctgtcctgacggttatacctgttgtagactacagagcggcgcatggggctgttgccccttcactcaggcggtgtgctgcgaggaccacattcattgttgtcctgcaggcttcacgtgtgatacacagaagggtacttgtgaacagggcccccaccaggtcccgtggatggaaaaggcacccgcgcacttgagcctcccggaccctcaggcgctcaaaagggatgtgccttgcgataatgtctccagttgtccaagtagcgacacatgctgccgcgataaccggcagggctgggcatgctgcccgtacaggcaaggggtgtgttgcgcagaccgaaggcactgttgccccgccggattccgctgtgccgccagaggcactaaatgtcttcgacgcgaagctccacgatgggacgctccattgcgggatccggctctccgtcagctcctttag

SEQ ID NO: 189794 - DNA, 1242 bp, synthetic construct
  misc_feature 1..1242: note = Description of Artificial Sequence: Synthetic coding sequence
  source 1..1242: mol_type = other DNA
atggccatcaccgccgcccacggcgccagcaccgccgtgcagaccggcgaccctgcgtctaaagaccaagtcaccaccccctgggtgcccagctctgccctaatcgtctcaagcaacgctaggaccagcccgcgggctgttctgtggtccatggcccccggtggagctgcaccctgccctcgcctccccgccgtcaagaccggctgcaccgcagtctgtgacttaatacagtcaaagtgtctttccaaagagaacgctacaaccgacttgctaaccaaactgcccgcacacaccgtaggagatgtcaagtgtgatatggaggtttcctgtcccgacgggtacacatgttgtcggctgcaaagcggagcctggggctgctgtccctttacacaggccgtttgttgcgaagaccatatacactgctgccccgcgggttttacatgtgacacccagaaaggaacctgcgaacaaggaccccaccaagtaccctggatggagaaggctccagcccatctctcgctgccagaccctcaggctttgaaaagagacgttccctgtgacaacgtctccagttgcccttcaagtgacacatgctgtcagctgactagcggggagtggggatgttgccccatacccgaggccgtttgttgttccgaccaccagcactgctgcccgcagggttatacttgcgttgccgagggccagtgtcaacgcggatcagagattgtggcggggctggagaagatgccagctcggcgggctagcctgagtcatccgagagacattggttgtgaccaacacacttcatgcccagtggggcagacctgttgccctagcctaggaggaagctgggcgtgctgccagctgccccacgctgtgtgttgcgaagaccggcagcactgctgtcccgcaggttacacctgcaatgttaaggctaggtcgtgtgagaaagaagtagtcagtgcccagcctgccacatttttagctaggtctccccacgtaggagtgaaggatgtggagtgtggggagggccatttttgccatgataaccagacatgctgtcgggataaccggcaaggctgggcgtgctgcccatatcgccagggggtctgctgtgctgaccggaggcattgttgtccggctgggtttcgatgcgctgcccgtggtactaagtgtttgcgacgagaagccccgcgctgggacgctccactgcgcgacccagctctgcggcagttgctttag

SEQ ID NO: 189795 - DNA, 789 bp, synthetic construct
  misc_feature 1..789: note = Description of Artificial Sequence: Synthetic coding sequence
  source 1..789: mol_type = other DNA
atgcggaacagctaccggttcctggccagcagcctgagcgtggtggtcagcctgctcctgattcccgaggatgtttgcgagaaaatcattggtgggaacgaggtcacccctcactctaggccgtacatggtgctgctctccctcgatcgcaaaaccatctgtgccggcgcactgatcgctaaagactgggttctgacggccgcacattgtaacctaaacaagcgttcccaagttatcttgggcgctcactcaattacacgcgaagaaccaaccaaacaaattatgttagtaaaaaaagaattcccctatccttgttacgatccggcgacccgagaaggagacctaaagcttttacagctgatggagaaagccaagatcaataaatatgtgaccattctgcatctgccaaaaaagggagacgacgtgaaacctggaaccatgtgtcaggtggctggctggggccgcacacacaattcagcctcgtggtccgacaccctcagggaggttaacattaccataatcgacaggaaggtctgtaacgacagaaaccattataacttcaatccggtgattgggatgaacatggtctgtgcaggtagtctgcgggggggccgcgactcttgcaacggggactcgggtagtccactgctgtgtgagggcgtgttcaggggtgtgaccagcttcggcctggagaacaagtgtggcgacccaaggggacccggggtttacattctcttgagcaagaagcatctgaactggatcattatgaccatcaagggcgccgtttag

SEQ ID NO: 189796 - DNA, 741 bp, synthetic construct
  misc_feature 1..741: note = Description of Artificial Sequence: Synthetic coding sequence
  source 1..741: mol_type = other DNA
atgcagcccttcctgctgctgctggccttcctgctgacccccggcgcagggacagaagaaatcatcgggggccacgaggccaaaccccactccaggccgtatatggcattcgtccaattcctgcaggagaaaagcagaaagcggtgtggtggaatcttggtgcgaaaagacttcgtgctcaccgccgcccactgtcagggaagcagcatcaacgtgacactcggcgcacacaatatcaaggaacaagagcgaacccagcaattcattccagtgaagcggcctatccctcatcccgcctataatcccaagaacttctcgaacgatataatgctcctgcagctcgagagaaaagcgaagtggaccactgctgtacgtccactcagactcccgtcatcgaaggctcaggtgaagcccggccagctatgtagcgttgccggatggggatacgtctcaatgtctacattggctaccacccttcaggaagtcttgctgactgttcagaaggattgtcaatgtgaacggctgttccacggcaactactcacgggctacagaaatctgcgttggggaccccaagaagacccagaccggttttaagggagattccggcgggccactggtctgcaaggatgtggcgcaggggattctgtcttacggtaacaagaaaggaactccacccggggtgtacattaaggtttcccactttttgccttggataaagcgcactatgaagaggctgtag

SEQ ID NO: 189797 - DNA, 459 bp, synthetic construct
  misc_feature 1..459: note = Description of Artificial Sequence: Synthetic coding sequence
  source 1..459: mol_type = other DNA
atgcagcccatcctgctgctgctggccttcctgctgctgccccgggccgaccagttagaacggaaagctaagcggacacgcgctgttcagccccttaggcttccctcaaataaagcccaggtgaaaccggggcagacatgttccgttgctggctggggacaaaccgcaccgttagggaagcattcccacaccttgcaggaggtcaaaatgactgttcaggaggatcggaaatgtgagtctgacctaaggcactattatgacagcacaattgagttatgcgtgggagatcccgaaattaagaaaacgtcttttaagggagatagtggcggccctctcgtctgtaataaagtagcacaaggcatcgtttcttacggccgcaataatgggatgccgccacgagcctgcacaaaagtgagcagctttgtacattggattaaaaagacgatgaagagatactag

SEQ ID NO: 189798 - DNA, 609 bp, synthetic construct
  misc_feature 1..609: note = Description of Artificial Sequence: Synthetic coding sequence
  source 1..609: mol_type = other DNA
atgcagcccatcctgctgctgctggccttcctgctgctgccccgggccgacgcaggcgagatcatcggtgggcacgaggccaagcctcacagccggccatatatggcgtacctgatgatttgggatcagaaaagcttgaagcgatgcggagggttcctcatcagggatgactttgtcctgactgctgctcactgttggggtcgtcttgaaaggaaagcgaagaggactagagctgtacagccactgagattgccaagtaacaaggcccaagtcaaacctggacagacgtgctcagtcgctggctggggacaaacagcccctctaggaaaacattcccacactctgcaagaggtgaaaatgaccgtccaggaggaccgtaagtgtgagtcagacttgagacactactatgactcaactatagagctttgtgtgggagatccggagataaaaaaaacctcctttaagggcgacagcggtggccctctcgtgtgtaataaggtagcccaaggaatagtgagctacggccgtaacaacgggatgcctccccgagcctgtaccaaggtttctagttttgtgcattggatcaagaagaccatgaagcggtactag

SEQ ID NO: 189799 - DNA, 846 bp, synthetic construct
  misc_feature 1..846: note = Description of Artificial Sequence: Synthetic coding sequence
  source 1..846: mol_type = other DNA
atgaagagcctgagcctgctgcacctgttccccctgccccgggccaaaagagagcaaggaggcaataattcttccagtaatcaagggtccctgcctgagaagatgcaaccaattcttcttcttttggcgttcctgctactccctagagctgatgctggcgaaattattggcggtcacgaggccaaaccgcattccagaccctacatggcctacctgatgatctgggaccaaaaatctctcaagcgatgcggcgggttcctgatccgggatgactttgtgctgaccgcagcccactgttggggctcctccataaatgtgaccctgggtgcacacaatatcaaggagcaggagcctactcaacagtttattcccgtgaaacggccaattccccaccccgcctataatcctaaaaatttctctaacgacattatgctgttgcagctcgagagaaaggcgaagagaaccagggccgtgcagccactccggctgcctagcaataaagctcaggtgaagcctggacaaacctgctcagtggccggatggggccagacggcacccttaggcaagcattctcacacacttcaagaagtgaaaatgacagtccaggaagatagaaagtgcgaatccgacctgagacactactatgattccacgatcgagttgtgcgtgggcgacccggagataaagaaaacttcattcaagggtgactcaggtggaccccttgtgtgtaacaaagtggctcagggaatcgtgtcctatggtcggaataacggcatgcctccgagagcttgtaccaaggtctccagcttcgtgcattggatcaaaaagaccatgaagcgctactag

SEQ ID NO: 189800 - DNA, 708 bp, synthetic construct
  misc_feature 1..708: note = Description of Artificial Sequence: Synthetic coding sequence
  source 1..708: mol_type = other DNA
atgcagaccttccccagcggcgagatcatcggcggccacgaggccaaacctcattcacgtccttatatggcctacctcatgatttgggatcagaaatccctgaagagatgcggaggattcctgatccgtgacgatttcgtcttgactgctgcccattgttggggttcctctatcaatgtaacactgggagcacataacattaaagagcaagagcccactcaacaattcatccctgtgaagaggcccattcctcatcccgcctacaaccccaagaacttctctaacgatatcatgctccttcagcttgagaggaaggctaagcgcacccgggctgttcagccgttgagactgccatccaataaggcccaggttaaacccggacagacttgcagtgtagccgggtggggtcagacagctcccctcggaaaacacagtcacactctacaggaagttaaaatgactgtccaggaagatcgtaaatgcgagtccgacctgcgccactattatgatagtacaattgaattatgcgtgggcgatcctgagatcaagaagacatccttcaaaggtgacagtggaggaccgctagtctgcaataaggtagcccaaggaattgtgagctacgggcgcaacaatgggatgccgccccgtgcatgtactaaagtcagttcttttgtgcattggattaagaaaacaatgaagagatattag

SEQ ID NO: 189801 - DNA, 483 bp, synthetic construct
  misc_feature 1..483: note = Description of Artificial Sequence: Synthetic coding sequence
  source 1..483: mol_type = other DNA
atgcagcccttcctgctgctgctggccttcctgctgacccccggcgccgggaccgaagagattatcggcggtcacgaggccaaaccacactcgcgcccatacatggctttcgttcagtttcttcaggaaaaatctcgcaaaaggtgtggcgggatcctggtgcgaaaggatttcgtcttgactgcagcgcactgtcaagggagttccatcaacgtaaccctcggcgcccacaacataaaagagcaggagcgcacacagcagtttattcctgtaaaaagaccaatccctcatccggcttacaatcccaagaacttttctaacgatattatgctgctgcagggtgacagcggcggacctctggtttgcaaagatgtggcccaggggattctgagctatgggaataaaaagggaacaccaccaggggtttacattaaggtgtctcacttcctgccatggataaaacgcacgatgaagcgcctttag

SEQ ID NO: 189802 - DNA, 768 bp, synthetic construct
  misc_feature 1..768: note = Description of Artificial Sequence: Synthetic coding sequence
  source 1..768: mol_type = other DNA
atgcagcccctgctgctgctgctggccttcctgctgcccaccggcgctgaagccggtgagataatcggagggcgagagtcccgcccccattcacggccttatatggcctacctgcagatccagagcccagccgggcagtccaggtgcgggggttttctcgtacgggaggatttcgtcctcaccgctgcccattgctgggggtcaaacattaatgttaccctgggcgctcataatattcagcgcagagagaacacacagcagcacattacggctcgacgggcaattcggcatccacagtataatcagaggactatccaaaatgacatcatgcttctgcaactctcaaggagggtgagacggaatcggaacgtcaatccagtcgccctgcctcgggctcaagaaggactcaggccagggaccctctgcaccgtcgccggctggggacgtgtgtcaatgcggcgggggacagatactctgagagaggtccagctgagagtccagagggatagacagtgccttagaatttttggaagttacgacccacggcggcagatttgcgtgggagacaggagggaacgcaaagcggcatttaaaggcgacagtggtggtccgctgctgtgtaataatgtcgcccatgggattgtgagctatggcaaatcctcaggggtaccccccgaggtatttaccagggtttcatcatttcttccttggatccgtaccacaatgcgatcttttaaactgctggatcagatggaaacccctctgtag

SEQ ID NO: 189803 - DNA, 348 bp, synthetic construct
  misc_feature 1..348: note = Description of Artificial Sequence: Synthetic coding sequence
  source 1..348: mol_type = other DNA
atgcagcccttcctgctgctgctggccttcctgctgacccccggcgccggcactgaggagattatcggtggccacgaggccaagccacatagcagaccatatatggccttcgttcagtttcttcaagaaaaatctcggaagcgctgcggggggatcttggttcgaaaagattttgtcttgacggccgctcactgtcagggccggggcgacagcggcggcccactggtttgtaaagatgtcgcccagggtatactgtcctacggcaacaaaaaggggaccccacctggggtgtatattaaggtgtcccacttccttccctggatcaaacggactatgaaaagactgtag

SEQ ID NO: 189804 - DNA, 774 bp, synthetic construct
  misc_feature 1..774: note = Description of Artificial Sequence: Synthetic coding sequence
  source 1..774: mol_type = other DNA
atggaggcctgcgtgagcagcctgctggtgctggccctgggcgccctttccgtcggctcctccttcgggacacagattatcggcgggagggaggtgatccctcacagcagaccttacatggctagtcttcagcgaaatggcagccacctgtgcggcggagttctcgtgcatcctaaatgggtgcttaccgccgcccactgtctggcccagcgtatggcacagctgaggctggtcctcggcctccatacgctggactctcctgggctcacttttcatatcaaggccgcaatccaacacccccgatacaaaccagtgccagcacttgagaacgatttggcactccttcagctggatgggaaggtgaagccatctcgaacaatccgccccctggccctgcctagtaaaagacaggtcgtggctgctggaacacggtgcagtatggcgggctggggtctgacgcaccagggcggccgcctgtcccgcgtcctccgggaattggacttgcaggtgttagataccagaatgtgcaataattcaagattctggaacggctcattgagtcctagcatggtttgcttggcggctgatagcaaagatcaggccccctgtaagggggatagcgggggtcccctggtgtgcggtaagggacgcgttctggccagagtgctctcgttttctagcagagtatgcactgatattttcaagccccctgtcgcaaccgctgttgccccatatgtaagctggattcgaaaggtgacagggcgaagcgcttag

SEQ ID NO: 189805 - DNA, 3108 bp, synthetic construct
  misc_feature 1..3108: note = Description of Artificial Sequence: Synthetic coding sequence
  source 1..3108: mol_type = other DNA
atggccgccgagaccctgaacttcggccccgagtggctgcgggccttgtctggagggggcagcgtggcttcaccgcctccaagccccgccatgcctaaatacaagctcgcggactatcgctacgggagagaggagatgctagccttgtacgtgaaggagaacaaggtgccagaggaactccaggacaaagaattcgcggcggtcctgcaggatgaacctctacaacctctagccctagaacccctgaccgaggaagaacaaaggaacttcagcctgtctgtaaacagcgtggccgtgttgcgcttaatgggaaaaggtgccggcccaccactcgcgggcacatcaaggggacgagggagcacgcggtctcggggacgcggcagaggagatagctgcttttatcagcgaagcatcgaagaaggggacggggcatttgggcgcagcccacgggagattcagcgcagtcaatcatgggacgacaggggtgaacgccggttcgaaaaaagcgcgcggcgcgacggcgcgcggtgcggatttgaggaggggggagctggtccaagaaaggaacacgctagatccgatagcgagaactggagaagcttgagagaagaacaagaggaggaagaagaaggctcatggaggttgggcgcaggcccacggcgagacggagatcgctggagaagtgcctctcctgacggcgggcccagatctgcaggctggagggaacatggggagcgccgacgaaaattcgagttcgatctgaggggggaccggggtggatgcggagaagaggaggggagagggggaggagggagttcccacctcaggcgatgtcgggccccagagggttttgaggaagacaaggacggtctcccagaatggtgcctcgacgatgaagacgaggagatgggcaccttcgacgctagcggagccttcctgccccttaaaaagggccctaaggagccaatccctgaggagcaggagctggacttccagggcctcgaagaggaagaagagcctagcgaaggcctcgaggaggaaggaccagaagcggggggcaaggaactcactccactacctccacaagaggaaaagagtagctctccttctccactgcccacactaggccccttgtgggggactaatggtgatggcgatgagactgcagaaaaagagccgcctgccgctgaggacgacatcagaggcattcagctgtcccccggcgtgggctcctccgctggtcctcctggagacctggaggatgacgaagggctcaagcacctccaacaggaagccgaaaaactggtagcctccctccaggattcaagcctcgaggaggagcaattcactgcagccatgcagacccagggtctaagacactccgccgctgctaccgccctcccactgtctcacggggcggcaaggaagtggttctacaaggacccgcaaggagagatccaaggcccctttaccacccaggagatggcagaatggtttcaggctggctatttcagtatgtccctgctcgttaaacgcggctgcgatgagggcttccagcccctgggagaagtcatcaaaatgtggggtcgggttccgtttgccccggggcccagcccacctcccctgcttggcaacatggatcaagaaagattaaaaaagcagcaggagctcgcggcagccgcgttgtatcagcagctccagcatcagcagtttttgcaacttgtttcctcccgtcagttaccacagtgcgctctgcgtgagaaagctgcgcttggtgatctcaccccgccccctccaccgcctccacagcagcagcagcagcagttgacggcctttcttcagcaactccaggccctgaaaccacctagaggtggcgaccagaatctgctgcctaccatgtcaaggagcttgagtgtgcctgactctggcagactgtgggatgtgcacacgagtgcttcttcccagagtggaggagaggcttccttgtgggacatccctatcaatagcagtactcagggaccaatacttgaacagcttcaacttcagcataagtttcaagagaggcgggaggtggaactgcgagcaaaacgcgaagaggaggaaagaaagcgccgtgaggagaaaaggagacagcaacagcaagaagagcagaagaggcggcaggaggaagaggagctgtttcgtaggaaacacgtgcggcaacaggaattgttgctcaagctcctccagcagcagcaggctgtgcccgtacctcccgcaccttcttcccccccccctctctgggctgggctcgccaagcagggactttcaatgaagaccttgctagagcttcagctggaaggagagaggcaactccataagcagccgcctccgagagagccagcaagggcccaagctcccaatcatagagtccagctaggaggattagggacagcccctctcaaccaatgggtaagcgaggcggggcccctctgggggggccctgacaagtctggcggggggagtagcggcctcggtctgtgggaggatacccctaaatcagggggctctttggtgcgaggattaggactgaaaaatagcagaagtagtccctctctgagcgatagctattcacacctgtccggccgccccatccgaaaaaaaactgaggaggaagagaagctgttgaagctgttacagggcatccccagaccacaggacggcttcacccagtggtgtgagcaaatgttacacaccttgtctgccacaggttcattggacgtccccatggccgtggctattttgaaagaggtagagtccccctatgacgtccacgactacatccgctcatgtctgggagatactctggaggccaaggagtttgcaaagcagtttctcgaaaggagagctaagcaaaaggctagccagcagaggcagcagcaacaagaggcctggctctcaagcgcttccctacagacagccttccaggccaaccacagtacaaaactaggacctggcgagggaagtaaagcgaagagacgagcactcatgttgcattctgatccaagcatcctgggctacagtctacacggaagctctggagaaatcgaaagcgttgacgattattag

SEQ ID NO: 189806 - DNA, 2265 bp, synthetic construct
  misc_feature 1..2265: note = Description of Artificial Sequence: Synthetic coding sequence
  source 1..2265: mol_type = other DNA
agcagcttccccagcccccggctgccccaggtgttccaccggctggacgatgaggacgaagaaatgggcactttcgatgcaagcggggccttcctacccctgaaaaaaggcccgaaagagcctatccctgaggagcaggaattggattttcaagggttggaagaagaggaagaaccctctgaagggctagaagaagaaggtcccgaggctgggggcaaggagcttacccccctgccaccacaggaggaaaaaagctccagtccctccccattaccaactttaggcccactttggggcaccaatggagatggagacgaaactgccgagaaggagcctccagccgcggaagatgatatccggggaatacaactgagtcctggagtggggagctccgccggcccacccggagacctagaagacgatgaaggcctgaaacaccttcagcaggaggccgaaaaattggtggcgagtctgcaggattctagtctggaggaggaacaattcaccgccgcaatgcagacacagggactgaggcattccgcggcagcaacggcattgcccctctcccacggagccgctaggaaatggttttataaggatcctcagggagagatacagggacctttcacaacccaagagatggcagagtggttccaggcgggctacttttctatgtctctgctggtcaagagagggtgcgacgagggatttcaaccacttggcgaagtgatcaagatgtggggcagagtacccttcgcacctggcccaagcccaccccctttgctcggtaacatggaccaggaacggctgaagaaacagcaggagctcgctgcagcagcactttatcagcagctacagcaccagcaatttctgcagctggtcagctctcgtcaacttccccagtgcgcgttgcgagagaaggccgccctgggcgacctgacccctcccccccccccccctccccagcagcagcagcagcaactgaccgccttcctgcagcagctccaggcactgaagccacctcggggaggcgaccaaaaccttctgcctaccatgtcacgatctttgagcgtacctgactccgggcggttatgggacgttcacacatcagcaagctctcagagcggaggagaagcctctctctgggacattcctatcaacagcagcacccagggacccattctggagcaattgcagctgcagcataagtttcaggagaggagggaggtcgagcttcgagccaaaagggaggaggaagagagaaaacgtcgtgaggaaaagcgaagacagcaacagcaggaagaacagaaacggaggcaggaagaggaggagttattcagacgcaaacacgtgcggcagcaggagttgctattgaagttactccagcagcagcaggccgtgcctgttccacccgccccttcgtctccaccgccgctatgggcgggcttggccaaacaggggctctctatgaagaccctgctggagttgcagctggaaggcgaaagacagctccacaaacagcctccaccacgggaaccagcgcgcgcccaagctcctaaccaccgggtgcaactgggtggcctgggaacagcacctttgaatcagtgggtcagcgaagccgggcccttatggggcggacctgataaaagcggcggcggaagcagcgggctgggtctgtgggaggataccccaaagtcgggcgggtccctggtccgcgggttgggcttgaagaactcaaggtcaagcccttccctttcggattcctactctcacttatcaggtagacccattagaaagaaaacagaagaagaagaaaagctacttaaactgctgcaggggatcccacgtccccaggatggctttactcagtggtgtgaacaaatgctccacacactgtctgccacgggcagtctcgatgtcccaatggctgttgccatcttaaaggaagtggagtccccttatgacgtccatgactacatcagatcgtgtttaggagacacactggaggccaaggaattcgcgaaacagttcctcgaaaggcgggccaaacagaaggcttcccagcagcgacagcagcagcaggaggcctggttgagcagtgcttcactccagactgcattccaggccaaccactctacaaagcttggccctggtgagggttccaaggccaagagaagggcactgatgctccacagcgacccatccatcctggggtactccctccacggttcttctggggagattgaaagtgtagacgactactag

SEQ ID NO: 189807 - DNA, 3900 bp, synthetic construct
  misc_feature 1..3900: note = Description of Artificial Sequence: Synthetic coding sequence
  source 1..3900: mol_type = other DNA
atggccgccgagacccagaccctgaacttcggccccgagtggctgagagcactctcatctggaggtagcattacatctcctcctttaagtcccgcgctcccaaaatacaagctggctgattaccgatatgggcgggaggaaatgctggctctcttcttaaaagataacaaaattcctagtgacttactggataaggagttcttacccatcctgcaggaggaaccgctacctccccttgcactggtgccattcaccgaggaagaacagaggaatttctcaatgagcgtgaatagtgccgccgttttacgtctgacaggacgcggcggcggaggcacagtggtgggggccccaaggggtcggagttcttcgagaggacgggggcggggccgcggcgaatgcgggttttatcagaggtctttcgatgaagttgaaggagtctttgggcgcggtgggggccgcgagatgcaccggagtcagtcatgggaggagcggggagaccggagattcgagaagcctgggcgcaaagacgtggggagacccaatttcgaggaaggaggccccacctccgtaggtcggaagcatgagttcatcagaagtgaatccgagaactggagaatttttcgcgaggagcagaatggtgaggacgaggatggtggatggaggctcgcaggttctcggagagatggagagagatggcgccctcacagccccgatggcccgagaagtgctggatggcgggaacatatggaaagaaggcgtaggttcgaatttgactttcgcgatcgggacgatgaacgcggttaccggcgcgtccgttcgggttctgggtctattgatgatgacagagattccctccctgaatggtgcctcgaggacgccgaagaggaaatggggacatttgatagctccggtgctttcctttccctgaaaaaggtgcagaaagaacctatccccgaggagcaggagatggacttcaggcccgtagacgaaggcgaagagtgctcagattccgaagggagccacaatgaggaggcgaaggagcctgacaaaactaacaagaaggagggagagaaaacggacagggtaggagtcgaggccagcgaagagaccccccaaacatcctcttcctctgcccgtccaggcactccgagcgaccaccagagccaggaggcatctcagtttgagcggaaggatgagccaaagacggaacagacagagaaggcagaagaggagacaagaatggagaatagcctgccagcaaaagtgccctcaaggggtgacgaaatggtggccgacgtacagcaaccattaagccagattccctctgataccgcctcccctttactgatcctgccccctcctgtcccaaatccttcccccacactgaggcccgtagaaacgcccgtggtaggcgcacccggtatgggatctgtaagcacagagcccgacgacgaggaagggctgaagcaccttgagcagcaggcagaaaaaatggtagcatacctacaggatagcgcactggatgatgagcgtctggcgtcaaagctgcaggagcacagggcaaagggcgtatccattccacttatgcatgaagccatgcagaaatggtactacaaggacccgcagggggagattcagggccctttcaacaatcaggagatggctgaatggttccaggctggctattttaccatgagcttgctggtgaagcgcgcttgcgacgagtcatttcagcccctaggggatatcatgaaaatgtgggggagagttccttttagccccggtccagcaccccctccacacatgggcgagttggatcaggagcgcctgaccagacagcaggaactcacagcactgtaccagatgcagcatttacagtaccagcagttcctcatccagcagcagtatgcccaggttcttgcacagcagcaaaaagctgccctgagctcacagcagcagcagcagcttgccctcttgctacagcagttccagaccctgaagatgaggatctcagaccagaatataattccttcagtgaccagaagtgtctcagtccctgacactggcagcatctgggaactgcagccaacggccagccagcccaccgtgtgggaaggcggaagtgtatgggatcttcccctggatacaacaaccccgggcccagccctcgaacagctccaacagctggaaaaggccaaggcagcaaagctagagcaggagcggagggaagccgaaatgcgtgccaagcgagaggaggaggaacgaaagcgacaagaagaactgcgacgacagcaggaagagatcctgagaaggcagcaggaggaagaacggaaaaggagggaagaagaagagcttgcaaggcgcaaacaagaggaggctctgagaagacagcgtgaacaggagatcgccctccggagacagcgggaagaagaggagagacagcagcaagaggaggcgttgaggcgactcgaagagaggagacgtgaggaggaagagagacggaaacaggaggagcttctgcgaaaacaggaagaggaggccgccaaatgggcacgggaagaagaggaggcccagaggcggttagaagagaacagactccggatggaagaggaagcagctagactgagacacgaggaagaggaacgcaagaggaaggagctagaagttcagcgtcagaaggagttgatgaggcagcggcagcagcaacaggaagctcttagacgcctccagcagcagcagcagcaacagcagttagcccagatgaagctgccctcctcatccacctggggccagcaaagcaatactacagcctgccagagccaagccactctctctctggccgaaattcagaaactcgaggaagaacgggagcggcagttgagagaggaacaacgacggcagcagcgggaattgatgaaggccctccagcagcaacaacagcagcaacagcagaaactcagcggctgggggaatgtctcaaagcctagcggtactaccaagtctttactggagatccagcaggaagaggctcgccaaatgcagaagcagcagcagcaacaacagcagcatcagcagcccaatcgagcccggaataacacccattctaatctgcatacatcaatcggcaatagcgtgtggggttcaattaacaccgggccccctaatcagtgggccagcgacttggtttcttctatttggtccaacgccgatacaaaaaacagcaatatggggttctgggatgatgccgttaaggaggtgggtccccggaattcgactaacaagaataaaaataatgctagcctcagcaagagcgtgggtgttagtaaccgccagaataaaaaggtggaggaagaagaaaagttactgaaactattccagggtgtgaacaaggcccaggatggctttacacaatggtgcgagcaaatgttgcacgcccttaataccgcaaataatctggatgtccccactttcgttagttttcttaaggaggtagagtccccgtacgaagtacatgactatatccgcgcatacctgggagacacatctgaggccaaagaatttgccaagcagttcctggagaggagggccaaacagaaagctaaccagcagagacagcagcaacagctgccccagcagcaacagcaacagcctccacagcagccccctcaacagccacagcagcaagatagtgtgtggggaatgaaccactcaaccctgcattctgtgttccagaccaatcagtccaacaatcaacagagtaactttgaagccgtgcagtccggtaagaaaaaaaaaaaacagaaaatggtgcgcgctgatcccagtttactcggctttagtgtcaatgcgtctagcgaacgactgaacatgggcgagatcgaaacactggatgattattag

SEQ ID NO: 189808 - DNA, 3966 bp, synthetic construct
  misc_feature 1..3966: note = Description of Artificial Sequence: Synthetic coding sequence
  source 1..3966: mol_type = other DNA
atggccgccgagacccagaccctgaacttcggccccgagtggctgcgagctctcagttccggcgggtcaatcacgagccctcccctgtccccagcactccctaagtataagcttgctgattaccgatacggccgagaggaaatgctcgcccttttcctgaaagataataagatcccctcagaccttctggacaaggaatttctcccaatacttcaagaggaaccactgcccccattagctctggtgccgttcacggaagaggagcagcggaacttcagcatgagtgttaactcagcggcagttctcagattaacgggccggggaggcggggggaccgtggtgggggctccacgcggtagaagcagcagccggggaaggggaagagggagaggcgaatgtgggttctaccagcggagctttgacgaggttgaaggggtcttcggcagaggtggcggacgggagatgcacaggtcacaaagctgggaagagcggggcgacagacgcttcgaaaaacctggccggaaggacgtgggcaagaagaatggctattactgcatgtactctccagtcttactgctgggtcagcccttatgccagggtcgacccaattttgaggaaggcgggcctacctccgtgggacggaagcatgagtttatccgcagtgaaagcgaaaattggcgtatttttcgggaggagcagaatggggaagatgaggatgggggatggaggctggccggctcaaggcgggatggagagcggtggagacctcattctcccgacggtccgcgtagcgccggatggcgtgagcatatggaaaggcgtcgccggttcgagttcgacttccgcgacagggatgatgagcggggctatagacgtgttagatccggttccggctctatcgatgacgacagggactcactgccagagtggtgccttgaggacgcagaagaagagatgggcacatttgactcctcaggagcttttctctctttgaagaaagtgcagaaagagcctatccccgaggagcaggaaatggattttcgtccagttgacgagggtgaggaatgctccgactcagagggctctcataacgaggaggctaaagaaccagacaagacaaacaagaaagagggggaaaagactgaccgagtgggggtggaagcttctgaagaaacgccgcagacttcgtcctcctcagcccgacctggaacccccagcgatcatcaatctcaggaggcatcacagtttgagcggaaagatgagcccaagacggagcaaaccgagaaggccgaggaggagacgcgcatggaaaattctctccccgcaaaagtgccgtcaagaggcgatgagatggtggccgatgttcaacagccactgagtcagataccttccgacacagctagtcctctcctcattctccctccacctgtgcccaacccatcccccacccttaggccagtcgagacacccgttgtgggggccccagggatgggttcagtgagcaccgaacccgatgacgaggaagggctgaagcatctggaacaacaggcggagaagatggtcgcttatttacaggacagtgccctggacgacgaaagactggcttcaaagctccaggaacacagggcgaagggggtgtcaatccctcttatgcacgaggccatgcagaaatggtactacaaagacccacaaggcgagatccaaggcccgtttaacaatcaagagatggcggaatggttccaggccggatactttactatgagtctactagttaaaagagcctgtgatgagtcttttcagccactgggcgatattatgaagatgtgggggagggtgccatttagcccaggtcctgccccgcctccgcacatgggtgaactggatcaagagaggttgaccaggcagcaagaactcaccgccctgtatcaaatgcagcatctgcagtatcaacagttcctcatacagcagcagtacgcccaggtccttgcgcagcaacagaaagctgccttgagctcacagcaacaacagcagttagcattgttactccagcaatttcagaccctaaagatgcgtatatctgaccagaatatcattccttcggtcacgcggtctgtctcagtgccagataccggtagtatttgggagctccagccaactgcatctcaaccgacagtatgggaggggggatctgtgtgggatcttcctttggacactaccacgcctgggcctgctctcgaacagttgcagcaactcgagaaagctaaagccgcaaagctcgagcaggagcgcagggaagcagaaatgagggcaaagagggaagaagaagagagaaaacggcaagaagagctgagacgccagcaggaagagatccttagaaggcagcaggaagaggagcgaaagagacgcgaggaggaggagctggcacggcggaagcaggaagaggcgcttcgccgccagagagagcaggaaattgccctccggaggcagcgagaggaggaggaacggcaacagcaggaggaggctttgcgcagacttgaggagagacgccgcgaggaggaagagcggaggaagcaggaggaactcttgaggaagcaagaggaggaggccgccaagtgggctcgcgaagaggaagaggcacaaaggcgtctcgaagagaaccgtctgaggatggaggaggaagctgcccggctgcggcacgaagaggaggagaggaaaagaaaggagctggaggtgcaaagacagaaagaacttatgcgccaaagacagcagcagcaggaggcactgaggcgtctgcagcagcagcagcaacagcagcaactggctcaaatgaagcttccctcatcaagtacttggggccagcaatctaataccaccgcctgtcagagtcaggccacgctcagcctggctgagatccaaaaactggaggaggaaagagagaggcagcttagagaagagcaacgacggcagcagcgggagttgatgaaggcgctgcagcaacagcagcagcagcaacagcagaaattgtcaggatggggcaatgtgagtaagccaagcgggactaccaagagtcttctcgaaattcaacaggaagaagctcgtcagatgcaaaagcagcaacagcaacagcagcaacatcagcagcccaacagggcaagaaataatacccactcaaatttgcatacgtcaataggcaatagcgtttggggatcaattaacaccgggcctcccaaccaatgggctagtgatctcgtgagtagtatttggagcaatgccgataccaaaaactccaatatgggtttttgggacgatgcggtgaaggaggtgggccctaggaatagtacgaataagaataagaataatgcgtccctttctaaatctgtaggagtgtccaaccgacaaaacaagaaggtggaagaggaggaaaagttacttaagctgttccagggcgtaaacaaggcacaggatggcttcacgcagtggtgcgagcagatgctgcacgccctgaataccgccaacaaccttgatgtgccaacgtttgtgtccttcctcaaggaggtcgagtccccatacgaagtacacgactacatcagagcctacctaggtgatactagcgaggccaaagagtttgctaagcagttcttagagcggcgggcaaagcagaaagccaatcaacagaggcagcagcagcagctgccccaacagcagcaacagcagcctccacagcagccaccccagcagccacagcagcaggacagtgtctgggggatgaatcatagtaccctccactctgtgtttcagaccaaccagtctaacaaccagcagagtaacttcgaggcagtccaatctggtaaaaaaaagaagaagcagaaaatggtgagggccgacccttcgctccttggtttcagtgttaacgcatcctcggagagactaaacatgggggagatagagactctggatgactattag

SEQ ID NO: 189809 - DNA, 3966 bp, synthetic construct
  misc_feature 1..3966: note = Description of Artificial Sequence: Synthetic coding sequence
  source 1..3966: mol_type = other DNA
atggccgccgagacccagaccctgaacttcggccccgagtggctgcgagcccttagctccgggggttctattacgtctcctcccctcagtcctgccctgcctaaatacaaacttgcagactatcgctacgggcgagaggagatgttagcgctattcctgaaagacaacaaaattccgagcgatttattagacaaggaattccttcccatactgcaagaggagccactgcctccgctcgccttggtcccgtttaccgaagaagaacagcggaatttcagtatgtcagttaattccgccgcagttctccgacttaccggaagaggcggaggcggaaccgtcgtgggggcacctcgggggcggagctcctcaaggggccgcggtcgaggacggggggaatgcggattctaccagcgctccttcgacgaggtcgagggagtcttcgggaggggcgggggacgagaaatgcaccgttcccagagctgggaggagcgtggtgatcgccggtttgaaaagccgggcagaaaagatgtcggcaagaagaatggctattattgtatgtactcccccgtgcttctgctgggccagcctttgtgccagggtaggccaaattttgaggagggtggcccaaccagtgtgggccggaagcacgaatttattcgttccgaatccgagaactggcgcatctttcgggaggaacagaatggagaagatgaggacggaggatggagactggccggatcgcgcagggatggtgagcgatggaggccccactcaccggacgggccaagatccgcaggttggagagaacacatggagaggagacgcaggttcgagttcgactttcgcgatagagacgacgagcggggataccgaagagtaagatctgggagcggtagcattgacgacgaccgtgactccctgcccgaatggtgcctggaggatgccgaagaagagatggggactttcgactcatctggagcttttttatctctgaaaaaagtccaaaaggaacctatccctgaagaacaggagatggacttccgaccagtggatgaaggcgaagaatgttcagactctgaagggtcccataacgaggaagccaaggaaccagataagacaaacaagaaagaaggcgaaaaaacagacagagtcggtgtggaggcgtcggaagaaacaccacagacctcttcatcttcagctagaccaggtacaccttcagatcaccagagtcaagaagcatcacagtttgagcgaaaggacgaaccaaagacggaacaaaccgagaaagcagaagaggagacgaggatggagaactccttgccagctaaggtgccatccaggggcgatgagatggttgcagatgtgcaacagccgctgtcccagatcccaagcgataccgcatcgcccctcctgatacttccccctcccgtgccgaacccatctcccacgctccggccagtagaaacaccagtggtgggcgcccccggaatgggatcggtcagcacggagcctgatgacgaggaggggctgaagcacctggaacagcaggccgaaaagatggtagcttacctgcaggattctgccctcgatgacgagcggctggcttcaaagcttcaagaacaccgagctaagggggtatcaatccccctcatgcatgaggccatgcagaagtggtattacaaggacccacaaggcgagattcaaggacccttcaacaatcaagaaatggccgagtggtttcaggcgggttactttactatgagtttgcttgtcaagcgtgcatgcgatgaatcatttcagcccctgggggatataatgaaaatgtggggaagggtgccattctcacccggcccagctcctccgccacacatgggagagcttgatcaagagcggttgaccaggcagcaggaactgactgcgctgtaccagatgcagcacctgcaataccagcagttcctgatccagcagcagtatgcccaagtgctggcacagcagcagaaggccgccctgagcagccaacagcaacagcaactagccctgctgttgcagcagttccagacactcaaaatgcgaatatctgatcagaatattatccccagtgtgactagaagcgtctctgtgccggacacaggatcaatatgggagctgcagcccaccgcctctcagcccaccgtttgggagggaggctccgtttgggacctccccttagacacgaccacccccgggcctgcattggaacagctacagcaactggagaaagctaaagctgccaaattggaacaggaacgcagagaggctgagatgcgcgcaaagcgggaagaggaagagaggaaaaggcaggaagagctgcggaggcagcaggaggagatcttgcgtagacagcaggaggaagagaggaagcgaagagaggaggaggagctggcccgcaggaagcaggaggaagcactaaggcgccaacgtgagcaggagatagcactgaggagacagcgggaggaggaagagaggcagcagcaagaagaagcacttcggaggcttgaggagagacgccgcgaagaggaggaacggagaaaacaagaggagctgcttcggaagcaggaggaagaggcagcaaagtgggcccgcgaagaggaggaagcgcagcgtcggctcgaggagaacaggcttaggatggaggaagaagcggcccggctccggcatgaagaggaagagcggaaacggaaggagctggaggtgcagcgtcagaaagagctcatgagacagcgccaacagcagcaggaagctctccgtcgacttcagcagcagcagcagcaacagcagcttgcccagatgaaactgcctagctcatctacctggggacaacaaagcaacacaacagcatgccagtcgcaggctacgctgtcgctcgctgaaattcagaagctggaggaggaacgagaaagacagctgagggaggaacagagaaggcaacagcgcgaacttatgaaagcattgcagcagcagcagcaacaacagcaacaaaagttatctgggtggggcaatgtttccaaacctagtggcaccactaagtcactgctggagatccagcaggaagaggcccgacagatgcagaaacagcagcagcagcagcagcagcaccagcagccgaaccgcgctagaaataacacccatagtaatctgcacacatccattgggaactccgtctggggcagcatcaacacaggcccacctaatcagtgggcatccgatttggtgagcagtatctggtccaatgcggatactaaaaattcgaacatgggtttttgggatgacgccgtgaaagaggtcggccctaggaactcaacgaataagaacaagaacaatgcaagtctgagcaagtctgttggcgttagcaataggcaaaataagaaagtagaggaagaggaaaagctgcttaaactgttccagggcgtcaataaggcacaggacggatttacacagtggtgcgaacagatgctccacgccctcaacaccgcaaataacctcgacgttcctactttcgtgtccttcctcaaggaagtggagtcgccctatgaagttcacgactatattagagcttacctgggggacacttcagaagccaaagagttcgccaagcaatttttggagagacgagccaagcagaaggccaaccagcagaggcagcaacagcaactaccacagcagcagcagcaacagcctccacagcagccccctcagcaaccacagcagcaggatagcgtctggggaatgaaccatagtacattgcactctgttttccaaaccaaccagtctaacaaccagcaaagtaacttcgaggccgttcaaagcgggaaaaaaaagaagaagcagaagatggtcagggcagatccatccttgctaggattctccgttaacgcaagttcagagcgtctgaacatgggagaaatcgaaactctcgacgactattag

SEQ ID NO: 189810 - DNA, 3900 bp, synthetic construct
  misc_feature 1..3900: note = Description of Artificial Sequence: Synthetic coding sequence
  source 1..3900: mol_type = other DNA
atggccgccgagacccagaccctgaacttcggccccgagtggctgcgcgccctctcatcaggaggctccatcacatcacccccgctttcacctgcactgcccaaatataagctggctgactatcgatatgggagggaggagatgctagcactgttcctcaaagacaataagataccctcagacttgctcgataaagaattcctgccaatattacaagaggaaccacttcctccactcgctctcgttccatttactgaagaggagcagaggaatttcagcatgagcgtgaacagtgctgcagttctgagactgaccgggagaggcgggggtggaactgtggtgggggctccacgtggcagaagttcatctagggggaggggaaggggccgaggcgaatgtggcttttaccagcggtctttcgacgaagtggagggagtttttggacggggcggtggccgagagatgcacaggtctcagagttgggaagagaggggagaccgccgcttcgaaaaaccagggaggaaagacgtcggccggcctaattttgaagaaggcggccctacttctgtggggaggaaacacgagttcatcagatccgaatctgaaaactggaggattttccgcgaggaacaaaatggggaggatgaggacggcggctggagactcgccgggagtaggcgggacggggaacggtggcgccctcattctcccgatggccctcgcagtgcggggtggcgggagcacatggaaagacgccgccggttcgagttcgacttccgtgatcgcgacgacgagcgcggctatagaagggtcaggtcaggctcaggttctatcgacgacgatagggactcattaccagagtggtgtctggaggacgccgaggaagagatgggcacctttgatagtagcggcgcattcctaagcttaaaaaaggtgcagaaggagcccatacccgaagaacaagaaatggactttcgcccagttgacgaaggggaagaatgtagcgacagcgaaggatcccataatgaggaggcaaaagagcccgataaaactaacaaaaaagaaggagagaagaccgatagggtaggggttgaggcctcagaagagacaccccagacatcctcaagctccgccagacctgggaccccgagcgatcaccagtcccaggaggcctctcagtttgagcggaaggacgaacccaagacagaacagactgagaaggccgaagaggaaactagaatggagaactcgctacctgcaaaggtgcctagccggggcgacgagatggttgccgacgtgcagcaacccctctctcagataccgagcgataccgcgtctccccttttaatcctgccccctcccgtcccaaaccccagcccaaccctcagacccgtggaaacaccagtggtgggcgcacctggaatgggatctgtatcaaccgaacctgacgatgaggagggattaaagcatcttgagcagcaggctgagaagatggttgcttatcttcaggactccgctctcgacgacgagagactcgcttcaaagctacaagaacaccgggctaagggtgtaagtataccccttatgcatgaggccatgcaaaagtggtactataaagatcctcagggggagattcaaggacctttcaataaccaggaaatggcagaatggtttcaggcaggctacttcactatgtcactgctcgtaaaacgagcttgcgatgagagctttcagcccctgggcgatatcatgaagatgtggggcagggtgccattttcacctggcccggcacctccaccacacatgggggaactggatcaggagcggcttacccgccaacaggagctgactgccctgtatcagatgcagcatttgcagtatcaacagttcctgatccagcagcagtatgcccaagtgcttgcccagcaacaaaaagccgcactctcttcccagcagcagcagcaattagcgctcctgctccagcagtttcaaactctgaaaatgcgcatttccgaccagaacatcattccatccgtcacgcggtcggtcagtgtgccagacacaggatccatttgggagctgcagccgacggcctcgcagccaacagtgtgggaaggtggatccgtgtgggaccttccactagacaccaccacgcccggtccagctttggagcagctccagcaattggaaaaagctaaggctgcgaaactggagcaggaacgaagagaggccgaaatgagagccaagcgggaagaggaggagcggaaaaggcaggaagagcttcgacgtcagcaagaagagatacttcggaggcagcaggaggaagaacgcaagcgcagagaggaagaggagcttgctcggcggaagcaagaggaggcgttaaggagacaaagagagcaggagattgcattgcgacgtcagcgagaggaagaagaaaggcagcagcaggaggaagcactccgacgcctggaagaacgtcggagagaagaggaggagaggcgcaaacaagaggagctcctgcggaaacaggaggaggaagcagccaagtgggctcgggaggaagaagaggcccagcggcgcctggaagaaaatcggttgcgtatggaggaggaggccgcccgcctcaggcacgaagaagaggaacgcaaacggaaggagctagaagtccagcgacagaaggagctgatgcggcaacggcaacagcagcaagaagctcttcgtaggctgcagcagcagcagcagcaacagcagctcgcacagatgaagctcccatcctctagcacatggggccagcagagtaacaccactgcctgtcagagccaggctacactctccctcgccgaaattcagaaacttgaggaagagcgtgagagacagctgagggaagagcagagacgtcaacagcgagagctaatgaaggcactccagcaacagcaacagcaacaacaacagaagctatctggctgggggaacgtgtcaaagcctagtggaaccaccaaatcccttctggagatccagcaggaggaggcaaggcagatgcaaaaacagcaacagcagcagcagcaacaccaacaacccaatagagctcgaaataacacccattctaacctccatactagtatcggcaactccgtttggggatcaattaataccggtcctcctaatcaatgggcctctgatctggtgtccagcatttggagcaacgcagacaccaaaaattcaaacatgggattttgggacgatgcagttaaggaggtggggcctagaaactcaacaaacaagaataaaaataatgcttccctttctaagtccgtgggtgtgagcaatcgccagaataaaaaagttgaagaggaagagaagctgctcaagctgttccaaggcgttaataaagcacaggatgggttcactcagtggtgtgagcagatgctgcatgcattgaataccgcgaataatctcgatgtgccgacgttcgtgtctttccttaaagaggtcgaatccccatatgaggttcacgactatattagagcatatctgggagatacctcggaggctaaggaatttgctaaacagttcttggagcgccgcgccaagcagaaagccaatcagcagaggcagcagcagcagctcccccagcagcaacagcaacaaccgcctcagcagcctccacaacagcctcaacaacaggactctgtctggggcatgaatcattccacacttcactccgtttttcagacaaaccagtcgaataatcaacaaagtaacttcgaggctgtccagtccggcaagaaaaaaaagaaacaaaagatggtcagagcggacccatccctgttgggtttctccgtgaatgccagttccgaaaggctgaacatgggagagattgaaacattagacgattattag

SEQ ID NO: 189811 - DNA, 2163 bp, synthetic construct
  misc_feature 1..2163: note = Description of Artificial Sequence: Synthetic coding sequence
  source 1..2163: mol_type = other DNA
atggccgccgagacccagaccctgaacttcggccccgagtggctgagggctctgtcaagcggggggtctattacttcacctccactgagtccagcactgcccaagtataaattagcagattatcgttacggacgcgaagaaatgttagccttgttcctgaaagacaataaaatcccatccgaccttctcgacaaggaatttttacctatattacaggaggagccactgcccccacttgcgctggtgccatttaccgaggaagagcaacgcaatttttcaatgagcgttaactctgcagccgtgttgagactgactggccgaggagggggcggaacagtcgttggagctcccagaggtcgctcctcaagccgaggccgaggcaggcccaatttcgaagaaggagggcccacctccgtgggtcgtaagcatgagttcataagatcagaaagcgaaaattggagaattttcagagaagagcaaaatggcgaggacgaagatggtggatggaggctggcggggtccaggagggatggcgaacggtggcggcctcattccccaggctggcgggagcatatggagcgtcggaggagattcgaattcgacttcagggacagggatgatgagagaggctataggcgggtacggagcggcagcgggtcaatcgatgacgatcgggattccctgcctgagtggtgtctcgaggatgccgaggaagagatgggcacgtttgacagtagtggcgcgttcctcagtctgaaaaaagttcagaaagagcctattcccgaagaacaagaaatggatttccgcccagtagatgagggggaagagtgttctgattctgagggctcccacaatgaggaggctaaagaaccagacaagacaaacaaaaaagagggggagaagaccgatcgggtgggcgtggaagcgtctgaggaaaccccacaaacttcttcctctagcgcacgacctggtacacccagtgatcatcagtcacaagaagcgagccagtttgaaaggaaggatgaacccaaaactgaacagactgaaaaagctgaggaggagactaggatggagaactcattgccagctaaagtgccttctaggggcgacgagatggtggcagacgtgcagcagcccctcagccagattccctcagacacggcatcgccgctgctgatcctgccaccgccagtgccaaatccctcccccactctgaggcccgtggagactcctgtcgtcggagcgcctgggatgggatccgtttccacggagcccgacgatgaggaaggtcttaagcaccttgagcagcaagcggaaaagatggtggcctacttgcaggactctgcccttgatgacgaacgcctagcctcgaaactgcaagagcaccgcgcaaagggagtctcgattcctctaatgcacgaggctatgcaaaagtggtactacaaggacccccaaggcgagatacaaggcccctttaacaaccaggagatggccgagtggttccaggccgggtactttacaatgtccctgctggttaaacgggcttgtgatgagtccttccaacctctgggtgatattatgaaaatgtggggcagagtgcccttttctccaggacccgccccaccacctcacatgggggagctggatcaggagagactgactcgccagcaggagctgacagctctctatcaaatgcaacacctccagtaccagcagttcctgattcaacaacagtatgcccaagtgcttgcccaacaacaaaaggccgcattgtctagccagcagcagcagcagttagccctgctgcttcagcagttccagaccctgaagatgagaataagtgatcagaatataattccatctgtgacaaggtctgtgtccgtgccagacaccgggtcgatttgggagttacagccaacggccagccaaccaaccgtttgggaggggggaagcgtgtgggatttaccactggataccaccacacccggaccagccctggaacagctccagcagttggagaaggccaaagcagccaaactcgaacaggagcgtagggaggccgagatgagagctaagcgcgaagaagaagagcgcaagcggcaggaggagctcaggagacaacaggaagaaatcctgcgcagacagcaggaagaggaaagatag

SEQ ID NO: 189812 - DNA, 282 bp, synthetic construct
  misc_feature 1..282: note = Description of Artificial Sequence: Synthetic coding sequence
  source 1..282: mol_type = other DNA
atggccgccgagacccagaccctgaacttcggccccgagtggctgcgcgccctgtcctccggcggctcgataacctccccgcccctgagccctgctttgccaaagtataagctagctgattacagatatggccgggaggaaatgctcgccctcttcctgaaagacaataagatacctagcgatctgttagataaggaattcctgcctattcttcaggaagaacctctcccaccactggccctggtgcccttcacagaggaagagcagaggaatttttcatag

SEQ ID NO: 189813 - DNA, 303 bp, synthetic construct
  misc_feature 1..303: note = Description of Artificial Sequence: Synthetic coding sequence
  source 1..303: mol_type = other DNA
atggccgccgagacccagaccctgaacttcggccccgagtggctgcgagccttaagctccggtggctcaattacatccccacccttatcccccgccctgcctaagtataagctagctgactatcgttatggccgggaggagatgctagccctgttcctgaaggacaataaaatccccagtgatctgctggataaggagtttctcccaatcctgcaggaggaaccgcttccacccctggctcttgttccatttactgaggaagaacagcggaacttctctatgtcagttaacagcgccgcatag

SEQ ID NO: 189814 - DNA, 42 bp, synthetic construct; identical to SEQ ID NO: 83620
  misc_feature 1..42: note = Description of Artificial Sequence: Synthetic coding sequence
  source 1..42: mol_type = other DNA

SEQ ID NO: 189815 - DNA, 348 bp, synthetic construct
  misc_feature 1..348: note = Description of Artificial Sequence: Synthetic coding sequence
  source 1..348: mol_type = other DNA
atggccgccgagacccagaccctgaacttcggccccgagtggctgagagctctctcctccggtggatcaatcacaagcccaccgctgtctcctgcgctgcccaagtacaagctggctgattaccggtatggaagagaggagatgctcgccctgtttcttaaggataacaagatcccaagcgaccttctcgataaagaatttttgcccatcctacaggaggaaccgttaccgccgcttgctttagtaccttttacagaagaggaacagagaaactttagtatgagcgtgaattccgcagcagtccttaggctgactggccggggtggagggggaaccgtggtcgggtag

SEQ ID NO: 189816 - DNA, 321 bp, synthetic construct
  misc_feature 1..321: note = Description of Artificial Sequence: Synthetic coding sequence
  source 1..321: mol_type = other DNA
atggccgccgagacccagaccctgaacttcggccccgagtggctgcgagctttgtccagcggaggatccattacctcccccccgctctcccctgctttgcctaagtataaattggcggattatcggtacggacgggaggaaatgctggcgctcttcttgaaggataataaaatccctagcgatctgttggacaaggagttcctgcctatcttgcaagaagagcctttaccacccctggccctggtgcccttcaccgaagaagagcagcggaattttagtatgtcggtgaattccgccgccgtactcagactaaccggctag

SEQ ID NO: 189817 - DNA, 342 bp, synthetic construct
  misc_feature 1..342: note = Description of Artificial Sequence: Synthetic coding sequence
  source 1..342: mol_type = other DNA
atggccgccgagacccagaccctgaacttcggccccgagtggctgagagccctgtcatccggggggtccataacaagcccccctctgtctcccgccttacctaagtataagttggcagattacaggtacggacgggaggaaatgttggccctgtttttaaaagacaataaaattccgagtgacttgttggataaggaattcttgcctatcctacaggaagaaccacttccgccattggccctggtgccttttactgaggaggagcagcggaatttcagtatgtctgttaatagcgctgccgtgttgcgcctgaccggtcgcggcggcggcgggaccgtttag

SEQ ID NO: 189818 - DNA, 2619 bp, synthetic construct
  misc_feature 1..2619: note = Description of Artificial Sequence: Synthetic coding sequence
  source 1..2619: mol_type = other DNA
atgaccaagctgcccgacgaccccggccggcccaacttcgaggagggcggacccactagtgtggggagaaagcatgagttcatccgatccgaaagtgaaaattggcgtatttttcgagaagaacaaaatggagaggatgaggacggaggttggaggcttgcaggcagtcgcagagacggcgagcggtggcgtccccactccccagatggcccacgctcggctggttggagggagcacatggagcgtaggcgccgcttcgagtttgactttagagatcgggacgacgagagaggataccgacgagtgagatcagggagcggatccatcgatgatgatagggacagccttcctgaatggtgcctggaggatgcggaggaagagatggggacctttgatagttctggggctttcctgagcctaaaaaaagtacaaaaagaacctatacccgaggagcaggagatggacttcaggccagtggatgagggggaggaatgttccgactccgaagggagccataatgaagaggctaaggaacctgacaaaaccaataaaaaggagggcgagaaaaccgatcgagtgggggtcgaggcttcagaagagactccacaaacaagctccagctctgcaaggcccggaacacctagtgaccaccagagtcaggaagcctcccaattcgagcgcaaggatgaaccgaaaaccgaacagacagagaaagccgaggaagagacacgtatggaaaactctctgccagccaaggtgccttcgcgcggggatgaaatggtcgctgatgtacaacaacctctttctcagatccccagtgatacagcatcacctctgctgattctgccgccacctgtcccaaatcccagtcctacgttgcgcccagtagagaccccagtggtcggtgctcccgggatgggctcagtgagcacagagccagacgatgaggaaggcctcaaacatctggaacagcaggcagaaaaaatggtcgcctatctgcaggattccgctctggacgacgagcgcctggcctctaagttacaggagcacagagccaagggggtttcgatcccactgatgcacgaggcgatgcagaaatggtactataaagacccccaaggtgagatccaaggaccctttaacaatcaggaaatggcagagtggtttcaggcaggttatttcaccatgtcgctgctggttaagagagcttgtgacgaatcattccaacccctaggcgatatcatgaaaatgtggggtagggtgcctttctcacctggccccgccccacctccgcacatgggggaacttgatcaggagaggctgacacgacagcaggagctgactgcactctatcagatgcagcacttgcagtaccagcaattcctcattcagcagcaatatgctcaggtgctcgctcagcagcagaaagcagcattgagctctcagcagcagcagcagctagccctcttgctgcagcaattccagactttaaaaatgcgcatcagcgatcagaatatcattcccagcgtgacacggagcgtatccgtgcccgacacgggcagcatatgggaactccagcctaccgctagccagcccactgtttgggaggggggctcagtgtgggacctgccacttgataccactacgccaggtccggctctggaacagctccaacaattggagaaagccaaggcagctaagcttgagcaggagaggcgtgaggccgagatgagagccaagagagaggaggaagaacgcaaacgacaagaggagctgcgccgtcagcaggaggagattctccggaggcagcaggaagaggaacggaaaagaagagaggaggaggaactcgcaaggcgcaaacaggaagaagcgctgaggcggcaaagggagcaagagatcgcattacgcaggcaacgcgaagaggaggagaggcagcagcaagaggaggctttgaggcggctggaggagcgacgtcgggaggaggaagaacgacgcaaacaggaggagctgctaagaaagcaggaagaagaagccgctaaatgggctagggaggaggaggaggcccagaggcggcttgaggagaacaggctgcggatggaagaagaagccgccaggctcagacatgaggaggaggagagaaagcgcaaggaactggaagtccagagacagaaagagctgatgcggcagcgccagcagcagcaggaagcgctgcgcagattacagcaacagcagcaacaacagcaactggcccagatgaaacttccaagctccagcacatggggccaacagtctaatacaacagcatgtcagtcgcaggccaccctgagtctggcagagattcaaaagcttgaagaagagcgcgaaagacagctgagagaagaggaatcctcggccagtttctgcttttatgccaccgctaaggcccccgctgagggagtggacgagagttcttcagcagctgctgcaacagccaccgctgagaccttgcgtctcggggaatgccagcagacctttcgctaccacgaaatatcctcaggggatcctgctgggcgggggcaggctaatgcaaaggctgctgcagcagctgccgcaacacctgccactaagcaatcttcttag

SEQ ID NO: 189819 - DNA, 2364 bp, synthetic construct
  misc_feature 1..2364: note = Description of Artificial Sequence: Synthetic coding sequence
  source 1..2364: mol_type = other DNA
atggccgccgagacccagaccctgaacttcggccccgagtggctgcgcgccctctcttcaggcggcagtatcaccagccctccgctgagtcccgctctgccaaagtacaagctcgctgattatcggtacggccgggaggaaatgctggcgctattcctgaaagataataagatacctagcgatctgctggacaaggagttcctgccaatactccaggaagagcccctaccgccgctggccctggtcccattcaccgaagaagagcaaagaaacttcagcatgtctgttaattccgccgccgtgctaagactcactggaagaggcggagggggcaccgtggtaggcgcccccaggggccggagctcgtctcggggtaggggccgggggagaggagagtgcggcttttatcagcggagctttgacgaagtggaaggggtttttggcagaggtggtggccgggagatgcatcgctctcagagctgggaggagaggggagaccgccgtttcgaaaaaccaggccgcaaggacgtgggaaggccgaacttcgaagagggagggcccaccagtgtgggcagaaagcatgaattcattagatcggaatccgagaactggcggatcttccgtgaagaacaaaatggggaagatgaagacggcggttggcgtctggccggttcacgcagagacggagagcggtggcggccccactcacccgacgggcccagatctgccggttggagagagcacatggagcggaggcgaagatttgaatttgacttcagagatcgagatgacgaacggggctacaggagggtgcgttctggtagtggatctattgatgatgatcgggactctttgcccgaatggtgcttggaggacgccgaagaagaaatgggcacttttgattctagcggagcgttcctgtccctcaagaaagtccagaaggaacccatcccagaagagcaggagatggactttcggcctgtggatgaaggagaagagtgtagcgattctgaggggtcgcataatgaggaggcaaaggaacctgataaaactaataaaaaagagggcgagaagaccgatagggtgggcgtggaagccagcgaggaaaccccccagaccagctcttcatccgcgagacctggcacacccagcgatcatcagtctcaagaagcaagccagttcgaacgcaaggacgaaccaaagaccgaacagaccgaaaaggctgaggaggaaactcggatggagaactccctcccagcaaaagtccctagtcgcggagatgagatggtcgctgacgtgcagcagcctctcagccaaataccttccgataccgcatccccactactcattcttccccccccggtgcccaatccaagtcctactctccggcccgtagagacacctgtggtcggcgctcccggaatgggttccgtttctacggagcccgacgacgaggagggccttaagcatttggaacagcaggccgagaagatggtcgcttacttgcaagattcagcactggatgatgagcggctagcttcaaaattacaggagcaccgcgcaaaaggagttagcattcccctcatgcacgaggcaatgcagaagtggtactacaaggatccacagggtgaaatacagggacctttcaacaaccaagagatggcagagtggtttcaggccggctacttcaccatgagccttctggtgaagcgggcatgtgacgagtcttttcagccactaggcgacatcatgaaaatgtggggccgggtacccttctccccaggacccgctccgccaccacatatgggagagcttgaccaagagaggctaacgcggcaacaggaacttacagcactgtatcagatgcagcacctacaatatcaacagttcttgattcagcagcagtacgcccaagtgctggctcagcaacagaaggccgctctgtcaagccagcagcagcagcagttggcattgctccttcagcagttccagacactgaagatgcgcatctctgaccaaaatattattccatccgtcacacgctccgtgtctgttcccgataccgggtcaatctgggagcttcagcccaccgcaagccaaccaactgtctgggaaggaggttcggtgtgggatctccctttagacaccacaactccaggcccagccctggagcagctgcagcaattagaaaaagctaaggcagcgaagctagagcaggagagaagggaagccgagatgcgggcaaagcgggaggaagaagagagaaagaggcaggaggagctgagacgccagcaggaggagattctgagacgccaacaagaggaggagagaaaacgaagagaagtggggaaaagggattcatag

SEQ ID NO: 189820 - DNA, 3882 bp, synthetic construct
  misc_feature 1..3882: note = Description of Artificial Sequence: Synthetic coding sequence
  source 1..3882: mol_type = other DNA
atggccgccgagacccagaccctgaacttcggccccgagtggctgcgtgcattgtcctctggtggatctataacctcgcccccgctcagccctgccctccctaagtataagttggctgattatcgctacggtcgggaagagatgctggctctgttcctaaaagataataagattccttctgatctcttagataaggaattcctcccaatcctacaagaagaacctctgccgcctctcgcgctggtcccctttaccgaagaagagcagcgcaactttagcatgtctgtcaactctgccgccgtcctgcgactgactggccggggagggggcggaaccgtagtcggggctcctagaggacgaagttcttcccgcggtcggggccgaggacggggagaatgcggtttctaccagaggtcctttgatgaagttgagggagtgttcggacggggagggggtcgggaaatgcacagatcgcagagctgggaggagagaggggacagacgctttgaaaaacctggtaggaaagatgtcgggaggccaaactttgaggaaggcggcccaacgtcagttggaagaaaacacgagttcattaggtccgaatccgaaaattggcgtatcttccgagaggaacaaaacggagaagacgaggacgggggatggagactggcaggatcaaggcgggatggcgagcgttggagaccccactctcccgggtggcgcgagcacatggagcggaggagaagattcgagttcgactttcgtgaccgggatgatgagcgcggttacagaagggttcgctccggatctggcagcattgatgacgaccgggatagcctcccagaatggtgcctcgaggacgccgaagaggaaatgggtacgtttgactcatcgggcgcctttctttccctcaagaaggtccagaaagagcccattcccgaagaacaggagatggatttcagacccgtagacgagggagaagaatgtagtgactccgaaggttcccacaatgaggaggcgaaggagcccgataagactaataagaaggagggagagaagaccgacagggtgggggtggaagccagtgaagagacgccccagacttcctcctctagcgctcggccagggacgccttctgatcaccagtcccaagaagctagccagtttgagagaaaagacgaaccaaaaacagaacagacagagaaggctgaagaagagactcgcatggagaatagccttccagccaaggttccttctagaggagatgagatggtggccgatgtccagcagccgctttctcagattcccagcgataccgcatctccactgctgattctgccaccgccagtccctaaccccagcccaaccctgagaccagttgagactcccgttgtaggggcacctggcatgggctctgtttcaaccgagcccgacgacgaggagggcctgaaacacttggaacaacaggctgagaaaatggtggcatatctgcaagatagtgccttagacgatgagcgcctggcctcaaagttgcaggaacacagagccaagggggttagcattcccctgatgcatgaagccatgcaaaaatggtactataaggacccccaaggagagattcagggcccattcaacaaccaggagatggctgagtggttccaggcagggtattttacaatgtcactcctggtcaagagggcctgcgatgagtcctttcagcctctgggagatattatgaagatgtggggccgtgttccattctccccaggccccgcaccccctcctcacatgggcgagctggatcaagagagacttacccggcagcaggagctgacggccctttaccagatgcagcacctccagtaccagcagttccttattcagcaacagtacgctcaggtgctggcgcagcaacagaaagcagccttgtccagccagcaacaacagcagctggctttgttgctgcagcagtttcagacactgaagatgcggatatcagaccagaacattatcccgtcagtgacccggagcgtctccgtgcccgacacggggtctatctgggaacttcagcctactgcctcccagccaacggtgtgggaagggggttccgtgtgggaccttcccctcgataccacgactccaggacccgccctggagcaactgcagcagctggaaaaagccaaggccgccaagcttgagcaggaaaggagggaagcagagatgcgcgctaaaagggaggaggaggaacggaagcgccaagaggagttaagaaggcagcaggaagagattctgagaagacagcaggaggaagaaaggaaacggcgcgaagaggaggagttagctcgtagaaagcaggaagaagcattgaggcggcagcgcgagcaggagattgctctgaggcgacaacgcgaggaggaggaaaggcagcagcaggaagaggcactgcgacgactagaggagcggagacgcgaggaagaggagcggagaaagcaggaggagctcttgagaaagcaagaagaggaggccgcaaagtgggcgcgagaagaagaggaagctcagagaagacttgaagaaaatcgccttagaatggaagaagaggcagcacggctgcggcacgaagaggaggagcgtaaacgcaaagaattggaagtccagaggcagaaggagctcatgcgacagcggcagcagcagcaggaggcgctacgaaggctccagcagcagcagcaacagcagcagctggcccagatgaaactgccctcctcatccacttggggccagcagtccaatactacagcgtgtcagagccaggctaccctgagtctggcggaaatacagaagctcgaggaggaacgtgagcgccaactgcgagaggaacagaggcgccagcagagagagctaatgaaagccttgcagcaacagcaacagcagcagcagcagaaactcagtggctggggcaacgtgtcaaaaccatctggtactacaaagtccctgctggagatacagcaggaagaagcccgtcagatgcagaagcaacagcagcagcagcagcaacaccagcagccaaatcgcgcccgcaacaatactcacagcaatttacacacatccatagggaactctgtttgggggagtatcaacaccgggccccctaatcagtgggcctctgatctggtgtcaagcatttggtcgaatgccgacaccaagaactccaacatgggattctgggacgatgcagttaaagaggtgggccccagaaactccaccaataagaacaaaaataatgcctccttgtccaagtcggtcggcgtgtccaatcgtcagaataagaaagtggaggaagaggagaagctgcttaaacttttccagggcgtgaacaaggcgcaggatggattcacacagtggtgtgagcagatgttgcacgcccttaatactgcaaacaatctggacgtgcctacttttgttagctttctcaaggaggttgaatctccatatgaggtgcacgactacataagggcatatctgggggatacttcagaggctaaagaatttgccaagcagtttttggagaggagggctaagcagaaggccaatcagcagcggcagcagcagcagcttccacagcagcaacagcagcagcccccgcagcagcctcctcaacagcctcagcaacaggattcagtttgggggatgaatcacagtactctgcattccgtgttccaaacaaatcaatccaacaaccagcagtccaacttcgaagcagtgcagtcgggaaagaaaaagaaaaaacagaaaatggtgagggcagatcccagccttttagggttctcagtgaatgcctccagcgaacgccttaatatgggggaaatcgagacgctggacgactattag

SEQ ID NO: 189821 - DNA, 3963 bp, synthetic construct
  misc_feature 1..3963: note = Description of Artificial Sequence: Synthetic coding sequence
  source 1..3963: mol_type = other DNA
atggccgccgagacccagaccctgaacttcggccccgagtggctgagggccttgtcttcaggaggttcaatcacctctcctccactcagccccgctttacctaaatacaagctcgccgattacaggtatggaagggaggaaatgctcgctctgtttttgaaggacaataagatacctagtgatctgcttgacaaggagttcctccctatcctccaggaagaacctcttcccccattggctcttgtgcccttcacagaagaggaacagcggaacttctctatgagcgttaatagtgcagctgtgttgagactgacgggccgcgggggtggcggcacggtggtgggcgccccgcgagggaggagttcctcacgagggcgggggagaggacgcggtgagtgcggtttttatcaaaggagttttgacgaagtggagggcgtgtttggacgcgggggagggagggaaatgcatcggagtcaaagctgggaagagcgaggggaccggagatttgagaagccaggccggaaagacgtagggaagaagaatggatactactgcatgtattctccagttctgctgctggggcaacctctgtgtcagggcaggccaaacttcgaggaaggggggcccaccagtgtgggccgcaagcacgaatttatacggagtgagtcagagaactggcgcatctttcgcgaggaacaaaacggagaggacgaagacgggggatggcgtttggctgggtctcggcgcgatggtgaacgctggcgacctcatagtcccgatgggccaagaagcgcaggttggcgggaacatatggaacgccgccggaggtttgagttcgatttccgggatagagatgatgaacggggctaccggagggtgcgctctggttctggctccatcgatgacgatcgggattctctgcccgaatggtgccttgaggacgcagaagaggaaatggggacatttgactcttccggagccttcctttccctcaagaaagtacaaaaagaacccattcctgaggaacaagagatggactttcgacctgtagatgagggggaggagtgcagcgacagcgaaggctcacacaatgaagaagccaaggaacctgacaaaacaaacaagaaggaaggcgaaaaaacggatagagtgggagtggcttcagaagagacaccacagaccagttcttcctctgcccggcccggaaccccatctgaccaccagtcacaagaagcttcccagttcgagcgcaaagacgagccaaaaaccgagcaaaccgagaaggccgaggaggagacccgaatggaaaactctctgccagccaaagtcccttcccggggcgacgagatggtcgctgatgtgcagcaaccgcttagtcagatcccaagcgacaccgctagcccgctcttgattttgcctccacctgtgcccaacccttcccctacactgcgccccgtggagacaccggtggtgggcgcgcccggcatgggttctgtctcaaccgagcccgacgacgaggagggcctgaagcacttagaacagcaggccgaaaagatggttgcctatctgcaggatagcgccctggacgatgaacgcctggcatccaaattgcaagagcacagggctaagggtgtatcaattcctcttatgcacgaagctatgcagaagtggtactacaaagaccctcaaggcgaaatccagggtcccttcaacaaccaggaaatggctgaatggttccaggcggggtactttaccatgtcactcctggtgaagcgagcctgtgatgaaagttttcagccactgggagacatcatgaagatgtggggcagagtgccttttagccccggacctgcccccccacctcacatgggcgagctcgaccaggagagactgacccgccagcaggaattaacagccttgtaccagatgcagcacctgcagtaccagcagtttctgatccagcagcagtacgcccaggttttggcccaacaacaaaaggccgcgctgagttcccagcagcagcagcagttggcactgttgctccaacagtttcaaacactgaagatgcggatttctgaccagaatatcataccttccgtgactcggagcgtttcagtgcctgacacaggctcaatttgggagcttcaaccaacggcctcgcagcctactgtctgggagggcggatctgtgtgggatctgccccttgatactacgacacccggtcccgctttggagcagctgcagcagctcgaaaaggctaaggcagctaagctagaacaggagagacgggaggccgaaatgcgggccaagcgggaggaggaggaaagaaagcgtcaggaggagctccggcggcaacaagaggaaatactccggaggcagcaggaggaagaaagaaagaggagagaagaagaggagctggctaggaggaagcaggaggaggccctccgccggcagagggaacaggaaattgcactgagacgtcaacgcgaagaggaggagcgacaacagcaagaagaggccctacggcggctggaagagcgccgccgagaggaagaggaaaggcgtaaacaggaagagctcctgagaaaacaggaagaggaggccgccaagtgggcaagggaggaggaagaggctcagaggcgacttgaagaaaacagattgcgcatggaagaggaagcggcccggttgagacacgaggaggaagaacgtaagcgcaaagaactggaggttcagcggcaaaaggagttaatgagacagcggcagcagcagcaggaggcccttagaaggttgcaacagcaacagcaacaacaacagctggcgcagatgaaactgccaagcagctccacgtggggacagcagtcaaacaccaccgcctgccagtctcaagcgaccttgtccctggccgaaattcagaagttagaagaggagagagagagacagctgcgtgaggagcagaggcgccaacagagggaactgatgaaggcactccagcagcagcagcagcagcagcagcagaagctgtccggctggggcaacgtgtctaaaccctcgggcactacaaaaagcctcctggagatccaacaggaggaagcgaggcagatgcaaaaacagcaacagcagcaacagcagcaccagcagccaaacagggctagaaataatactcacagcaatctgcacacaagtatcggtaactctgtatggggctcaattaatacgggccccccaaaccagtgggccagtgaccttgtatcttctatttggtccaatgctgataccaagaactcaaacatggggttctgggacgatgctgtgaaggaggtaggacctagaaattccaccaataagaacaagaataatgccagcctgtccaaaagcgtcggcgttagtaatcgacagaataaaaaggttgaggaggaggagaaactgctcaaactgtttcagggagtgaataaagcgcaggacggattcacccagtggtgtgagcaaatgcttcatgcgcttaatacagccaataatctcgacgtacctacttttgtatctttcctcaaggaagtggagtcaccatatgaggttcacgattacatacgggcctaccttggagatacaagcgaggctaaggagtttgctaagcaattcctggagaggcgagctaaacaaaaagccaaccaacagaggcaacagcaacaactgccacagcagcagcaacaacagcctccccagcaacccccccagcagccccaacaacaggattcagtttgggggatgaatcacagcactctgcattctgtgtttcaaacgaatcagtcgaacaaccaacagtcaaatttcgaggcagtgcaatctggtaagaaaaaaaagaaacagaagatggtccgggctgaccctagcctgctgggtttctcagttaatgcctcctccgaacggctaaacatgggggagatcgaaaccctggatgactactag

SEQ ID NO: 189822 - DNA, 2085 bp, synthetic construct
  misc_feature 1..2085: note = Description of Artificial Sequence: Synthetic coding sequence
  source 1..2085: mol_type = other DNA
atgagcggcggcgaggtggtgtgcagcggctggctgcggaagagcccccccgagaagaagctgaaaagatatgcgtggaagcggcgatggttcgtgttgaggtccgggcgattgacaggcgatcctgatgtactcgagtactataagaacgatcatgccaaaaagccaattaggattatcgacttgaacctgtgtcaacaggtggacgcgggcctgacctttaataaaaaggagtttgaaaacagctacatctttgacattaacactatcgatagaatcttctacttggtcgccgactctgaagaggagatgaataagtgggtgcgatgcatttgcgatatttgcgggttcaatccgaccgaggaagaccctgtcaaaccacccggaagttctctgcaggccccggccgacctccctctggctattaatacggcaccaccctctactcaggcagattcgagcagtgcgactctgcctcccccctaccagctgatcaatgttccaccacatttggagaccctgggaattcaggaggacccccaggattacctgctcttaatcaactgccaaagtaagaaacctgagcctacccgcacgcacgccgatagtgccaaatccaccagcagcgagacagactgtaatgacaatgtgcctagtcataaaaaccctgcctcaagccaaagcaagcatggcatgaatggtttctttcagcagcaaatgatctacgacagtccgcctagccgcgcgccatccgctagtgtggatagctctctgtacaatctgcctaggagttattcgcacgacgtactgccgaaggtatctccatccagtactgaggctgacggcgagctctacgtgttcaatacaccctcaggtacgagcagcgtggagacacagatgagacatgtgtccatttcttatgacataccccctaccccaggtaatacataccagatcccgcgcacgttccctgaagggactctgggacagacatccaaacttgatactataccggacatcccgccgccacgcccgccaaagccgcaccccgcacacgaccggtcgcccgtggagacctgctcgatccctcggacagcttccgacactgactctagctactgtattccaacggcaggcatgtctccatcaaggagtaacacaattagcaccgtggaccttaacaaactgaggaaggacgccagtagtcaggattgctacgacatccctcgggcttttcctagtgacaggtcctctagcctcgaagggtttcataaccactttaaggtgaaaaatgtactgaccgtggggtcagtgagcagtgaagagctcgacgaaaattatgtaccaatgaaccccaactcccctccacgacagcattccagttcctttaccgaacccattcaggaggctaactatgttcccatgactccgggcaccttcgatttttctagtttcggcatgcaagtgcctccccccgctcatatggggttcaggagcagtcccaaaactcctcctcggcgaccagtgcctgtcgctgattgtgagcctccccctgtcgatcggaatttaaaaccagacaggaaagttaagccagcaccgctagaaataaagcctctccctgagtgggaggaactgcaagcccctgtgagatccccgatcacccgctcatttgcgagagatagcagcaggtttccaatgagcccgcgcccagactcggtgcactccacgaccagcagtagtgacagccacgacagcgaggaaaactacgtcccaatgaatccaaacctgtcgtcagaggatccaaatctgttcggatctaattccttggatggcggaagcagtcccatgataaagccaaaaggggacaaacaagtggagtacctcgaccttgatctggattctggcaagagtactcctccccgcaagcagaagagcagcggatcagggtccagcgttgccgacgagcgcgtggactacgtcgttgtggaccaacagaaaacgctcgctcttaaatccacacgggaagcctggaccgatggtcgccagtctactgaaagcgagacgcctgctaaatcagtcaaatag

SEQ ID NO: 189823 - DNA, 2175 bp, synthetic construct
  misc_feature 1..2175: note = Description of Artificial Sequence: Synthetic coding sequence
  source 1..2175: mol_type = other DNA
atgagcggcggcgaggtggtgtgcagcggctggctgcggaagagccctcctgagaaaaaactgaaacgatacgcctggaagagacggtggtttgtgttgcgatccggcagattgaccggcgatcctgacgtgctggagtactataaaaacgaccatgcaaagaagcctatacgaataatcgacctgaacctctgtcaacaggtcgacgcgggactgactttcaataagaaggagtttgaaaatagttacatcttcgacattaacacaatcgaccggatcttttatctcgtggccgacagtgaggaggagatgaacaagtgggttaggtgtatctgcgatatatgcgggtttaaccccacagaggaagaccccgtgaagccgccggggagtagcctgcaggcccccgccgacctgcctctcgcaattaatacggcgccgccgagtacacaggctgactcctcatccgctactctccccccgccgtatcaactgatcaacgtgcctcctcatctggaaactctgggaattcaggaggacccacaggattatctgctcttgatcaattgtcagtccaaaaaaccagagccaacacggacgcacgctgattcagccaaaagcacaagttccgaaacggactgcaacgacaacgtccccagtcataagaacccagcctcctctcagtctaaacatggaatgaacggatttttccagcagcaaatgatctacgatagcccaccaagcagggccccctcggcctctgtcgatagttctttgtacaacctcccacgctcctactcacatgacgtgttaccgaaagtttctccctccagcacagaggctgatggcgagctgtacgtgttcaacaccccctcaggtacaagctcggtggagacgcagatgcgccatgtgagtatctcttacgatatcccccctaccccgggtaatacttaccaaattccccgcacgttccccgaaggtacactgggtcagacgtcaaagctagacacaatccctgacattcctcctcctaggcctcccaagccacaccctgcacacgaccggtctcctgtagagacatgtagcatcccaaggacagctagcgacaccgacagcagctactgtattcccaccgccggaatgtcgcctagtagatcaaacactatttccacagtcgacctcaataagcttcgaaaagacgctagtagccaggactgctatgatatcccacgagctttccccagtgaccgcagctcgtcactggagggcttccataaccacttcaaagttaaaaatgtgcttacagtaggaagtgtgtctagtgaggaactggatgaaaactacgttcctatgaacccaaacagtcctccccggcaacactcgtcatctttcacggagcccatccaggaggcaaactatgtccctatgactcccgggacattcgacttcagctcattcggcatgcaagtgcctccccctgcccacatgggcttcaggagcagtccaaagactcctcctaggcgccctgtgcccgtggcggactgcgaaccccctcccgtggaccgaaacctgaagcctgacaggaaaggccagtcccccaaaattctgcggttgaagcctcacgggctcgagaggactgactctcagaccataggagatttcgctaccaggagaaaagttaagcccgccccactggagattaagcccttgcctgaatgggaggagctgcaggctcctgtaaggtcaccaattacacgcagcttcgcacgagactcctcaagatttcccatgtcccctagaccagatagtgtgcacagcactacttcaagtagcgactctcacgattcggaagaaaattacgtgcctatgaatcctaatctctcttcggaagaccccaacctgttcggaagtaattctcttgatgggggaagcagccctatgatcaaacctaagggcgacaagcaggttgagtatctcgatctggatcttgactccgggaagtccactccgcctcgtaagcagaaatcaagcggatccggatcctccgtggccgacgagcgtgtggattatgtggtggtagatcagcaaaagacactggcactaaagagtactcgcgaagcatggacggacgggaggcagtccacagaatccgagacccccgccaaatccgtgaagtag

SEQ ID NO: 189824 - DNA, 1776 bp, synthetic construct
  misc_feature 1..1776: note = Description of Artificial Sequence: Synthetic coding sequence
  source 1..1776: mol_type = other DNA
atgaacaagtgggtgcggtgcatctgcgacatctgcggcttcaaccctaccgaagaagatcccgtgaagccgcccggcagcagcctccaggcgccagccgacctgcccctggctataaatactgcaccccccagtactcaggccgactcctcgagcgccacactccctcctccctatcagctcatcaatgtacctccacacttggaaacgcttgggatccaggaagatcctcaggactacctgctgcttatcaactgtcaatccaagaaacctgagcctacgcgcacccacgcagacagtgcaaaatctacatccagcgagactgattgcaacgacaatgtgccaagccataagaaccctgcaagtagtcaaagcaagcacggtatgaacggattcttccaacagcagatgatatatgactcaccaccaagccgtgccccgtctgccagcgtcgactctagcttatacaatctgcctcgaagttacagccatgacgtgctccctaaggtgtcacctagctccaccgaagctgacggagaactctacgtcttcaacactccgtccggtacatcttctgtggaaacccagatgcggcacgtcagcatatcctacgatatcccgcccaccccgggcaatacctaccaaatccctcggacattccccgagggaactttggggcagaccagcaagcttgataccatcccagacattccccctcctagacctccaaagccacatcctgcccatgatcgatctcctgtcgaaacgtgcagtatccccaggactgcatcggacacagactcgtcatactgtatacccactgctgggatgagccctagtaggagcaacacaatcagcactgtggatctgaacaaactgcggaaagacgcttcttctcaggattgttatgatattccccgggcattcccttccgacaggtcctcttccctcgaagggttccataaccactttaaggtgaagaatgttcttacagtcggatccgtgagctctgaggagctggacgagaactacgtgcctatgaaccccaatagccctccacgccagcattcatcaagcttcactgaaccaatacaggaggctaattatgtccctatgactcctgggacctttgacttcagtagcttcgggatgcaggtaccaccgcctgcccacatgggtttcagaagtagccctaaaacgccacccagaaggcctgtgcctgtggccgattgcgagcctccaccggttgaccgaaatctgaagcctgatagaaaagtgaaacccgcccccctcgaaattaaaccacttccggagtgggaggaactccaggcccccgtgcgaagtccaatcacacggtctttcgcccgtgattccagcaggttcccaatgtctccacgacccgatagtgtacattcgaccaccagttccagtgacagtcacgattctgaagagaattatgttcctatgaaccccaatttgagctccgaggatccaaacctgttcggcagcaacagcttggatggggggtccagccctatgatcaaaccgaagggcgataagcaagtggagtatctggacctagacctggacagcggtaagtccactcccccacggaaacagaagtcgtcagggtctggatcatccgtcgccgacgagcgtgtagattacgtagttgtggatcagcagaagaccttggcgttaaaatctaccagggaagcatggaccgacggccgtcaatcaacggagagtgaaacaccggcgaaaagtgtcaagtag

SEQ ID NO: 189825 - DNA, 1917 bp, synthetic construct
  misc_feature 1..1917: note = Description of Artificial Sequence: Synthetic coding sequence
  source 1..1917: mol_type = other DNA
atgagcggcgaccccgacgtgctggagtactacaagaacgaccacagcaaaaaacctctgcgcatcattaacttgaacttctgtgagcaggtagacgctggtctcacctttaacaaaaaggagctccaggactcatttgtttttgacatcaaaaccagcgaacggacgttttatcttgtggctgagaccgaggaggacatgaacaagtgggtgcagagcatctgccagatatgtggcttcaaccaagcagaagagagcactgactctctgcggaatgtaagctcagccggtcacggaccacggtctagccccgctgaactgagctcatcctctcagcacctgctccgagaacgcaaaagcagtgcgccaagccactcaagccagcctacattgtttacctttgagcccccggtgtctaatcatatgcagccaaccctgtcgacttcagcgcctcaggagtatctgtatctgcatcagtgtatttctcgccgtgctgaaaacgctcgctccgccagcttttcgcagggcacgcgagcatcctttctgatgaggagtgacaccgctgtgcagaaactggcacagggcaacggacactgcgtgaacggtatctcaggtcaggtccacgggttctacagcctccctaagccgagcaggcataacaccgaattcagggactccacctatgacctgccccgcagcctggccagccacggtcatacaaaagggagcctcacaggaagcgaaactgacaatgaggatgtctatactttcaagactccatcaaacactctttgtcgagagttcggggacctgttagtggacaatatggacgtacctgccactccgctatctgcctatcagattcctaggacttttaccctggataagaaccacaatgccatgacagttgcaacccccggagactcagctatcgcaccccctcctaggcccccaaagccttcacaggccgagactcctcgatgggggagcccacagcagaggccccccataagcgagaactcacgctcggtggcagccactattccccgcaggaatacacttccggccatggataacagcagattgcatcgagcctcctcctgcgagacgtatgaatatccacagaggggaggagagagcgcaggtagatctgcggaatcgatgtcagacggagtaggcagcttcctacctggaaaaatgattgtgggccgctccgacagcactaatagcgaggataattatgtgcccatgaaccctggaagttccacgttactggcgatggaacgggcaggggacaacagccagtccgtgtacattcctatgagtcccggcgcacatcattttgactcacttggatacccctcaactactcttccagttcacaggggccctagtaggggttcggagatccagccaccacccgtaaatagaaatctaaaacctgatagaaaggctaaacctacccctctggatctaagaaacaatacagtgattgacgagttaccgtttaagtcgccaattacaaagtcatggagccgtgctaatcacacttttaactcttcctccagccaatattgcaggccgatctccacacagtctatcacatccacagactctggcgacagtgaggagaactacgtccctatgcagaatcctgtatcggccagtcccgtccctagcggtaccaactcacctgcccctaagaaatccaccggctcggtggactaccttgcactcgacttccagccctcaagcccttcgccccatagaaaaccatctacctcctctgtgaccagcgatgagaaggtggattacgtccaggttgacaaggagaaaacacaagcactgcagaacactatgcaagagtggaccgacgtacggcagtcctcagaaccgagcaaaggggccaagctgtag

SEQ ID NO: 189826 - DNA, 2031 bp, synthetic construct
  misc_feature 1..2031: note = Description of Artificial Sequence: Synthetic coding sequence
  source 1..2031: mol_type = other DNA
atgagcggcggcggcgacgtggtgtgcaccggctggctgcggaagagtccccctgagaaaaaattgagacgctatgcctggaaaaaaagatggtttattctgcgaagtgggcgcatgtcaggcgaccccgacgtgctcgagtattacaaaaatgaccattcaaagaaacccttacggatcatcaatctgaatttttgtgagcaagtggacgctggcctgacgttcaacaagaaggagctgcaggattctttcgtgtttgatatcaagacatccgagcggacattttacttggtggccgagactgaagaagatatgaataagtgggtgcagagcatctgtcaaatctgtgggttcaatcaggctgaagaatccaccgacagcctgcgaaacgtgagcagcgctggacacggaccgcggtcttctcccgccgaactgagttcatcgtcacaacacctgttgcgcgagcgtaaatccagtgccccttcccacagtagccaaccgactttattcacctttgagcctccggtgtctaaccacatgcagcccacactttcaactagtgccccacaggagtatttatatctccaccaatgcatttcccggcgcgcggagaacgctagatcagctagcttttctcagggtacacgggcttcatttctgatgagaagtgatactgccgtgcaaaagctggcccaaggtaatggccattgcgtaaacgggatcagcggccaagtccacgggttttattcactgcccaagcccagccgccataacactgaatttagagatagcacctacgacttgccgaggagtttggcgtcacacgggcacactaaaggctcactgacaggctcagagacggacaacgaggatgtgtacacctttaagactccaagcaataccttgtgtagagagttcggcgaccttctcgtggacaatatggacgtgcccgcaactcccctgagcgcctatcagattccaaggacgttcactctcgacaaaaatcataatgctatgaccgtggcgactcctggggacagcgccatagcccccccacctaggcccccaaaacccagtcaggctgagacgcctcgctggggcagccctcagcagaggcctccgatcagcgagaattctagatctgtagcagccacgatccccaggcggaacaccttacccgccatggacaatagccgactgcaccgcgcctcctcttgtgaaacttacgagtacccgcagaggggaggcgagagcgccggcaggtccgccgagagcatgtcagacggcgttggtagcttccttcccggaaagatgatcgttgggagatctgattcaacaaacagtgaggacaattatgtgccgatgaaccctgggagctcaactttgttagcgatggagcgcgccggtgataactctcagagcgtgtacatccccatgagtcccggggctcatcacttcgacagcttagggtatcccagcaccaccctgccagtccaccgggggccctcacggggctctgaaatccagccccctccagtgaacaggaatcttaagcccgaccgcaaagctaagccaacaccactggatttgaggaataacactgtgatcgatgagctgccatttaagagccctattacgaaaagttggtctagggcgaatcacacttttaactctagctcctcgcaatactgccgcccgatttcaactcagtccattacttctactgactccggcgacagcgaggagaactacgtgccaatgcagaatcctgtcagcgccagcccggttccttcgggcactaacagcccagcccctaagaagtccaccggctccgtcgattacctggctttggattttcagccatccagtccttctccacacaggaaaccgtccacaagctcggtcaccagcgatgaaaaagtggattatgtccaggtggacaaggagaagacccaggcgctgcagaataccatgcaagagtggaccgatgttcgccagtcatcagagccgagcaagggagccaaattgtag

SEQ ID NO: 189827 - DNA, 396 bp, synthetic construct
  misc_feature 1..396: note = Description of Artificial Sequence: Synthetic coding sequence
  source 1..396: mol_type = other DNA
atgagcggcgaccccgacgtgctggagtactacaagaacgaccactcaaagaagcccttgagaattatcaacctcaatttctgtgagcaggtggatgctggcctgacctttaataagaaggagcttcaggattcattcgtctttgacatcaagacatccgagaggacattctacctggtcgcagagaccgaggaagacatgaacaagtgggttcaatctatctgccagatatgtggatttaatcaggccgaagaatccacagacagcctaagaaatgttagcagtgctggtcatggaccgcgatcgtcccctgccgagctctcttccagctcccagcacctactcagagagagaaagtcctccgctcccagccattccagtcagccgaccctgtag

SEQ ID NO: 189828 - DNA, 309 bp, synthetic construct
  misc_feature 1..309: note = Description of Artificial Sequence: Synthetic coding sequence
  source 1..309: mol_type = other DNA
atgagcggcgaccccgacgtgctggagtactacaagaacgaccactcaaaaaaacccctgcgtattatcaatctgaacttctgcgagcaagtggacgctggcttgactttcaataagaaagagctgcaggatagcttcgtctttgacatcaagacatctgagaggacattctacctagtagccgaaacagaggaagacatgaataagtgggttcagagtatctgtcagatttgcggctttaaccaagcagaggaatccaccgatagccttcgcaacgtgtcctcagcaggacatggcccgagatcatag

SEQ ID NO: 189829 - DNA, 993 bp, synthetic construct
  misc_feature 1..993: note = Description of Artificial Sequence: Synthetic coding sequence
  source 1..993: mol_type = other DNA
atggaggccgtggccaagttcgacttcaccgccagcggcgaggacgagctctcatttcatactggtgacgtgctgaagattctgtcaaaccaagaggaatggtttaaggctgaactcggatcacaggagggctacgttccaaagaatttcattgacattcagtttccaaagtggtttcatgaagggctgagcaggcaccaagcggaaaacctgctaatgggaaaggaagtaggatttttcattatccgggcttcccagtcctccccgggagatttctcaatcagtgtgcgccatgaggacgacgtccagcatttcaaagtgatgcgagacaacaaaggcaattattttctctggaccgaaaaatttcccagcttgaacaaactagtggattactatagaacgaattctatatcccgccagaagcagattttcctccgagaccgaactcgggaggatcaaggacatcgcggtaattctctcgataggaggtctcagggtggacctcatctgtccggcgctgtgggcgaagagatccgacccagtatgaacagaaaactgagcgatcatccccccacattgccgctgcaacagcatcagcaccaaccccagccccctcagtatgccccagcgccacagcaacttcagcagcccccccagcagcggtatttacagcaccatcatttccaccaggaaagaaggggcggtagcctggatatcaatgatggccattgcgggactggcctgggctctgaaatgaacgcggccctcatgcacagacggcatacggaccccgttcagcttcaggcggctggccgagtgagatgggccagggctttgtacgattttgaggcgttagaagatgacgaattagggtttcactcaggcgaggtagtagaggtcctcgactccagcaatcctagctggtggacaggtcggctgcacaataagctaggactcttccccgctaactatgtggctccaatgactaggtag

SEQ ID NO: 189830 - DNA, 654 bp, synthetic construct
  misc_feature 1..654: note = Description of Artificial Sequence: Synthetic coding sequence
  source 1..654: mol_type = other DNA
atggtgagccggcggcccctgagcacccccggccgggagctgacccacggacagggtggctggctgctgcaccatcccggccagccagaactaccgcgcgggctgctgcatctgtgccaaggacatcgtggtaacagtctcgacagacgctcccagggcggtccacacttgagtggcgctgttggcgaggagatccgaccgtctatgaaccggaagctgagcgaccatcccccaacgttgccacttcagcagcatcagcaccagccccagcccccacagtatgcacctgctccacagcagcttcagcagccaccacagcagcgatatctacaacatcaccattttcaccaagaaaggcgaggcggtagtctggacatcaacgatggccattgtgggaccgggctcgggagcgaaatgaacgctgctctgatgcatcgtcggcacactgaccccgtccaactgcaagccgccggcagagtgcggtgggcacgggcattatacgactttgaggccctggaggatgatgagctgggcttccattccggagaggtcgtggaagtcttggatagcagcaaccccagctggtggacaggtaggttgcataacaagcttggattatttcctgccaactatgtggcccctatgacccggtag

SEQ ID NO: 189831 - DNA, 993 bp, synthetic construct
  misc_feature 1..993: note = Description of Artificial Sequence: Synthetic coding sequence
  source 1..993: mol_type = other DNA
atggaggccgtggccaagttcgacttcaccgccagcggcgaggacgagctgtcctttcataccggcgatgtactgaagatcctctcgaaccaggaggaatggttcaaggcagagctgggttctcaggagggctacgttcctaaaaacttcattgacattcagttccccaagtggttccacgagggattgagtcggcaccaggctgaaaaccttctgatgggcaaggaggtcggcttttttatcatccgcgcctctcagtcaagcccaggtgacttcagtatatccgttagacatgaggatgacgtccaacacttcaaagtgatgagagacaataaagggaattacttcctgtggaccgagaagttcccttctttgaataaacttgtcgactactaccggactaactcaatctcccggcaaaaacagattttcctgagggatcgcacccgggaggatcagggccacagagggaactccttggatcgcaggtcacagggcggtccccacctctctggagccgttggcgaggagattcggccaagcatgaaccgtaaactgtcagatcaccccccaaccctgcccctgcaacagcaccagcaccaaccccaacccccccagtatgcccccgccccccagcaactccagcagcccccacagcagcggtacctgcagcatcaccacttccaccaggagagacgcggcgggagcctggacataaacgatggtcattgcggcaccggcctcgggtcagaaatgaacgctgccctaatgcatcggcgtcataccgaccccgtccagttgcaagcagcaggccgggtaaggtgggctcgggctttatacgatttcgaggcgctcgaggatgatgagctgggattccactctggcgaagtggtcgaggtacttgactcttccaacccctcctggtggacaggccgattacacaacaaactcggtctgttcccagcaaactacgtggctcccatgactcggtag

SEQ ID NO: 189832 - DNA, 294 bp, synthetic construct
  misc_feature 1..294: note = Description of Artificial Sequence: Synthetic coding sequence
  source 1..294: mol_type = other DNA
atggaggccgtggccaagttcgacttcaccgccagcggcgaggacgagctcagtttccacacgggggatgttcttaagatattgtccaatcaagaggagtggttcaaggcggagttgggaagccaggaaggatacgtgccaaaaaacttcatcgatatccaattcccaaaatggtttcacgaaggtctgtccaggcatcaagctgagaatcttttaatgggcaaggaagtgggattctttattatcagggcttctcagagttcaccaggcgatttcagtatttcagtccgctag

SEQ ID NO: 189833 - DNA, 795 bp, synthetic construct
  misc_feature 1..795: note = Description of Artificial Sequence: Synthetic coding sequence
  source 1..795: mol_type = other DNA
atgctggagttcgtgagcctgctggcccggaaggacagcaacaacagtgtttccaagccaaggcacaaacttaaccccttttcgtcaaagcgacatgaggatgatgtgcagcactttaaagtcatgagagacaacaaaggtaattacttcttatggaccgaaaaatttccctctctgaacaagctagtggattactaccgaaccaactctatttcacgtcagaaacagatatttctgagagaccgtactcgtgaggaccagggccacaggggcaatagtctcgaccggcgcagccaaggagggccacacctcagcggcgccgtcggcgaggagatccgacccagtatgaacaggaagctgtcagaccatccgcccactttacctctgcagcaacatcagcaccagcctcagcccccccaatatgcccctgcccctcagcagttgcagcagccaccccagcagcgctacctgcagcaccaccactttcaccaagagcgaagaggtggatctctggacattaatgatggccattgtgggactggccttgggtcagaaatgaacgccgcactcatgcatcgccgtcacacagatcccgtgcagcttcaggccgctggtagggtccgatgggctcgcgcactgtatgattttgaggccctcgaggacgatgaattgggcttccactctggggaggtcgtcgaggtcctggattcaagtaaccctagctggtggaccggccgtctacacaacaagctggggctcttcccagccaactacgtagctccaatgaccagatag

SEQ ID NO: 189834 - DNA, 837 bp, synthetic construct
  misc_feature 1..837: note = Description of Artificial Sequence: Synthetic coding sequence
  source 1..837: mol_type = other DNA
atggaggccgtggccaagttcgacttcaccgccagcggcgaggacgaactatcattccataccggagacgttctgaagatcctaagcaaccaggaagaatggttcaaagcagaacttggtagtcaagagggttacgtaccaaaaaatttcattgacatccagtttccaaaacatgaggatgatgtccagcacttcaaagtgatgagagataacaaaggcaactatttcctgtggacggagaaattcccaagcttgaacaagctagttgattactaccggaccaattcaatttctcggcagaaacagatctttctgcgggacaggactcgcgaagaccagggccatagggggaattcactggatcgccgaagccagggtggacctcacctgtctggcgctgtcggagaagagatacgtccttccatgaatcggaagcttagcgaccaccccccgactctccctctgcaacaacaccagcatcagccccagcctccgcaatacgcccctgccccacaacagctgcagcaaccgccgcaacagcgctacctgcagcatcaccacttccaccaggaacggcgcggagggtctctggatatcaatgacggccattgtggcactgggctcgggtcggagatgaacgcagcactgatgcacagacgccacacagatccggtacagctccaggccgctggacgggttcggtgggcgcgagcgctgtacgacttcgaagcactggaagaggtcctcgattccagtaatccctcgtggtggacgggccggctgcacaataagttaggcctgtttccggctaactatgtggccccaatgacacgatag

SEQ ID NO: 189835 - DNA, 915 bp, synthetic construct
  misc_feature 1..915: note = Description of Artificial Sequence: Synthetic coding sequence
  source 1..915: mol_type = other DNA
atgctggagttcgtgagcctgctggcccggaaggacagcaacaactcagtgtcgaaaccaaggcataagttgaacccattctcttccaaacgatggtttcacgagggactgtccagacaccaggcagagaatctcttgatgggaaaggaagttggattttttattatacgtgcatcccagtcctcaccgggtgactttagcattagcgtcagacacgaggacgacgtgcagcatttcaaggtcatgcgggacaacaaaggcaattactttctctggactgagaagttcccgtctttgaacaagctcgtggattattatcgtaccaattcaatcagtagacagaagcagatcttcctgcgtgaccgaacccgcgaggaccaaggacacagaggtaactcactcgaccggcggtcccaagggggtcctcatctcagcggcgccgtcggggaggaaattagaccctccatgaatcggaaactcagcgatcatccccccactctacccctgcaacagcatcagcatcagccccagccccctcagtacgcccctgctccgcaacaactgcaacaacctccccaacagcggtatttacagcatcatcacttccatcaagaacggaggggtggtagcctggacatcaacgatggccattgcggtaccgggttgggctcagagatgaacgccgccttgatgcaccgaagacacactgaccctgtgcagctccaagccgccggtagggtccgctgggccagagcactgtatgatttcgaggcgctagaagacgatgagctgggattccatagtggcgaggtcgtggaggtcctcgacagcagcaatccctcttggtggacaggaagactgcataacaaactaggactctttcctgctaactacgtggctcccatgactcgatag

SEQ ID NO: 189836 - DNA, 777 bp, synthetic construct
  misc_feature 1..777: note = Description of Artificial Sequence: Synthetic coding sequence
  source 1..777: mol_type = other DNA
atgggcaaggaggtgggcttcttcatcatccgggccagccagagctccccaggcgatttcagcatatctgttcgccatgaggacgacgtccagcatttcaaagttatgagagataataaagggaattactttttgtggactgagaaatttccgagcctgaacaagctggtggattactatcggactaattccatttctagacaaaaacagatttttctgcgggacagaacacgcgaggaccaaggtcatagaggtaacagcttggatcggaggtcacagggcggaccacatttgagtggtgctgtaggcgaagaaattcgacccagcatgaatagaaagctgtccgaccacccccctactttacccttacaacagcatcagcatcaaccacaaccacctcaatacgcacccgctcctcagcagctgcaacagccacctcagcaacgataccttcagcaccatcacttccatcaagagcgcagaggtggcagtcttgatataaacgacggtcattgtggcaccgggctgggcagcgagatgaacgctgcccttatgcaccgcagacacaccgaccccgtgcagttgcaggccgctggtcgcgtgaggtgggcaagggccctctatgactttgaggcactcgaggatgacgagctcggcttccacagcggagaggtggtggaagttctggacagctccaatccctcctggtggaccggtcgcctgcacaataagctgggtctgttccccgccaattatgttgctcctatgacacggtag

SEQ ID NO: 189837 - DNA, 507 bp, synthetic construct
  misc_feature 1..507: note = Description of Artificial Sequence: Synthetic coding sequence
  source 1..507: mol_type = other DNA
atgttctggaagctgagcctgagcctgttcctggtggccgtgctggttaaggtcgcagaagcgagaaagaataggcccgctggagccatcccgtccccttataaagacggctcttcaaacaattccgaaagatggcagcaccagatcaaagaggtcctggcctccagccaggaggccttggtcgtcacagagcgtaagtacctgaagtccgattggtgtaagacccagcctttgcggcagacggttagcgaagagggttgcagatccagaaccattctcaatagattttgctatgggcagtgtaattccttttacatcccccgtcatgttaagaaggaggaggaatcatttcagagctgcgccttttgtaagccccagcgggttaccagtgttctggtcgaattggagtgtccagggttggatccccccttccggcttaaaaaaatccaaaaagttaaacagtgccggtgtatgtcggttaacctgagtgattcagataagcagtag

SEQ ID NO: 189838 - DNA, 1443 bp, synthetic construct
  misc_feature 1..1443: note = Description of Artificial Sequence: Synthetic coding sequence
  source 1..1443: mol_type = other DNA
atggccggcacccggtgggtgctgggcgccctgctgcggggctgcggatgcaactgttcatcttgtcgccgcaccggcgcagcttgcctccctttttactccgcagccggatctattccctctggtgtgtccggacggagaagactcttgttgcttctgggggctgcagcagcagcggccagtcagacaagagggctgcagacagggcctgtgccacccggccggctcgctggtccccctgccgtggctacaagtgcggccgccgctgcagccgctagctactctgccctgcgcgcctccctcctcccccagtctcttgccgcggccgctgccgtccccacccgatcctattcgcaggaatctaaaaccacttacctggaagatctcccacctccacctgagtacgaactggctccatctaaactggaggaagaagtggatgatgtgtttctcatacgcgctcaaggtctcccatggagttgcacgatggaagatgttctgaacttcttcagcgactgccgcattcggaatggagaaaatgggatacatttcttactaaatcgtgatgggaaaaggaggggcgacgctttgattgaaatggaatccgagcaggatgtccagaaggctttggagaagcacagaatgtatatgggacagaggtacgtagaggtgtacgagatcaacaatgaagacgttgacgccctcatgaaaagcctgcaggtcaagtcaagccctgtagtcaacgatggcgtggtgaggctgcgagggctgccctatagttgcaacgaaaaggacatcgtagattttttcgcagggttgaatatcgtggacatcaccttcgtcatggattatagggggcgccggaagacaggggaagcctatgtccagtttgaggagccggagatggctaaccaggcgctcctgaagcatcgtgaagagattggcaaccgctacattgaaattttcccgtctcggagaaatgaagttaggactcatgtcggctcttacaagggaaagaagattgcctcctttcctaccgcgaaatacatcaccgaacctgagatggtcttcgaagagcacgaagttaatgaggacatccagccaatgaccgctttcgaatctgagaaggaaatcgagctccccaaagaggttcccgaaaagctaccagaagccgccgatttcggcaccacaagtagcttacactttgtgcacatgaggggcttgcctttccaggccaacgcacaagatattatcaactttttcgccccactcaagcccgtacgcattacgatggaatactcttccagtggaaaggctactggagaggccgatgtgcatttcgagacccatgaggacgccgtggctgctatgctgaaagatcggtcccacgtgcatcacaggtatattgagttgttcctcaattcctgtcccaagggtaaatag

SEQ ID NO: 189839 - DNA, 957 bp, synthetic construct
  misc_feature 1..957: note = Description of Artificial Sequence: Synthetic coding sequence
  source 1..957: mol_type = other DNA
atggaggacgtgctgaacttcttcagcgactgccggatccggaacggcgagaatggtatacactttctactgaacagggatggcaagaggaggggcgatgcactcattgagatggaatccgaacaggacgtccagaaagccctggaaaagcatcgcatgtatatgggccaacgctatgttgaggtttatgagattaataacgaggacgttgacgcccttatgaagagcctccaggtgaaatcatcccccgtggttaacgatggagtggtgagactgcgcgggctcccttactcttgtaatgaaaaagacattgtcgactttttcgctggacttaatatcgtggacatcacatttgttatggattaccggggcagaagaaagacgggcgaagcctacgtccaatttgaagagcctgagatggccaaccaggctctcctgaagcatcgagaggaaattggaaatcggtatattgagatcttcccatcccggcgcaacgaagttagaacgcacgtgggatcatataagggtaagaaaatcgccagcttccctacggccaagtacataactgagccagagatggtttttgaggagcatgaagtgaatgaagatatacagcctatgactgctttcgagtcggaaaaagagatcgagctgccaaaggaagtgccagaaaagttacccgaagcggctgacttcgggaccacctctagtttacatttcgtgcacatgagggggcttccatttcaagctaacgcccaagatatcattaactttttcgctccacttaaaccagtgcggatcaccatggagtacagcagcagtggcaaggcaaccggagaggctgacgttcactttgagacacacgaagacgccgttgctgccatgctgaaggaccggagtcatgtgcatcaccggtacatagagctgttcctgaactcctgtccgaaaggaaagtag

SEQ ID NO: 189840 - DNA, 1362 bp, synthetic construct
  misc_feature 1..1362: note = Description of Artificial Sequence: Synthetic coding sequence
  source 1..1362: mol_type = other DNA
gccgccgccgtgcccacccggagctacagccaggtgcggggccggagggaaggacccggtgcaaggtccctgcccggaagggtgcacgcccctcctcgaccctctgttcctccttgcgccccacgcggccatgcccggggatcagcaaccctggctgcccatccaccaccatccacactgtgctcatactgggccctggagcagggtaaactgagccaagcttcagggctgcttcttgtcctgttctcacccagagtgtccggcaggctgggatcagagagtaagaccacgtatctcgaggacttgccaccgcctcctgagtacgagcttgctcctagcaagctggaggaggaagtagacgacgtgtttctgattagggcccagggcctcccatggtcctgcacaatggaggacgtcctaaacttcttcagtgattgccgtatccgcaacggcgagaacggcatccattttctgctgaaccgggacggaaagagaaggggagacgccctgattgagatggaatccgaacaggacgtgcagaaagcactcgagaagcaccgtatgtatatgggacagagatatgtggaggtctacgaaattaacaacgaggacgttgacgcattaatgaaatctctgcaggtgaagtcaagcccagtggtgaacgatggggtagtaagacttcggggactgccatactcttgtaacgagaaagatatcgtcgatttctttgcggggctgaatatcgtcgacatcacatttgtgatggactataggggaaggcggaaaacaggtgaagcttacgtgcaattcgaagagcccgaaatggccaaccaagctcttcttaaacatagggaagaaatcggaaatagatatatcgaaatcttcccttcgcgccggaacgaggtccgtacacacgtgggatcatataagggcaaaaagatcgccagctttcccacagccaagtatattaccgaaccagaaatggtgttcgaagagcacgaagtcaatgaggatatacaaccaatgaccgcatttgaatctgaaaaagaaatcgagctacccaaggaggtccctgaaaagctcccagaggcggccgatttcggcaccacctcctcactgcacttcgtacatatgagggggctgccttttcaggccaacgctcaggacatcatcaatttttttgctccgttgaagccagtgcgcattacaatggagtactctagctctgggaaagctacaggggaggctgacgtgcattttgagacccacgaggacgccgtcgccgccatgctaaaagatcggtcccatgtccatcacaggtacatcgaactcttcttgaatagttgtcccaaaggaaaatag

SEQ ID NO: 189841 - DNA, 957 bp, synthetic construct
  misc_feature 1..957: note = Description of Artificial Sequence: Synthetic coding sequence
  source 1..957: mol_type = other DNA
atggaggacgtgctgaacttcttcagcgactgccggatccggaacggggaaaacggcatacatttcttgttgaaccgggacggaaaacgacggggagacgcgctcatcgagatggaaagtgaacaagatgttcagaaggccctggagaaacacagaatgtatatgggtcaaaggtatgttgaagtttatgagatcaacaacgaagatgttgatgcgctcatgaagtctctgcaggtgaaatcttctcccgttgttaatgacggcgtcgtgaggctacgaggattgccctattcgtgtaacgagaaggatattgtggactttttcgcaggactcaacattgttgacataactttcgtgatggattataggggccgaaggaaaaccggcgaggcatacgtccagtttgaggagccggagatggccaaccaggcactgctaaaacatagggaggagatcggtaatcgctacatcgagatctttccatcacgccggaacgaggtgaggacccatgtcggttcctataaggggaagaaaattgcatccttcccaacagcgaagtacataacagagcccgaaatggttttcgaggaacatgaagtgaatgaggacatccagcccatgactgcattcgagagcgagaaggaaatagagttgccgaaagaagtgccggagaagctgcccgaggccgcagacttcggaactacaagttccctccactttgtgcatatgcggggccttccctttcaggccaacgcacaggatatcatcaacttttttgctcctttgaagccagtgcgaattaccatggaatactcctcatctggcaaggcaacgggggaagcagacgttcattttgagacgcacgaggacgccgtggccgctatgctcaaagacaggtctcacgtgcaccatagatatattgagctgttcctaaattcctgccccaaggggaagtag

SEQ ID NO: 189842 - DNA, 1254 bp, synthetic construct
  misc_feature 1..1254: note = Description of Artificial Sequence: Synthetic coding sequence
  source 1..1254: mol_type = other DNA
tgacccccccccagcaccctgtgcagctactgggccctggagcagggtaaactgagtcaggccagtgggctcctgctggtgctcttctctcctagagtcagtggccgacttggaagtgtgtccgttgccggtgtgaatgtcgaagccctgtttcccgcctggcccatggaaagcaagactacctacttagaagacctgcccccgccccccgagtacgaactggcaccttctaaactcgaggaggaggtcgacgatgtcttcctcattagagcccagggtctgccctggtcctgtactatggaggacgttcttaattttttttccgactgccggatccggaatggcgagaatgggatccactttttgctgaaccgggatggcaaaaggagaggcgacgccctcatcgagatggaatctgagcaagacgtccaaaaggcattggaaaagcaccgtatgtacatgggacagcgatacgttgaggtatacgagattaacaacgaggatgtggacgctctgatgaaatcactccaagtaaaaagttctccagtcgtgaatgatggcgtcgtccgcctaaggggtctaccctatagctgtaatgaaaaagatatagtggattttttcgctgggctgaacattgtcgatatcacctttgtcatggactaccggggaaggcggaaaaccggcgaggcatacgtacagttcgaagagcctgagatggccaatcaggcattgctcaaacaccgtgaggagattggcaatcgatacatcgaaatcttcccctctcgccgcaatgaagtccggacccatgttgggagttacaagggcaagaaaatcgctagctttccaaccgccaagtacattaccgagcccgaaatggtctttgaagaacatgaagttaatgaagacattcaacctatgacagcgtttgagtcggaaaaagaaatagaactgcccaaggaagtgccagagaagctgccagaagctgcagatttcggcaccacctccagtctccatttcgttcacatgcgcggcctcccttttcaagccaatgcccaggatatcatcaatttttttgcccccctgaaaccggtgcgaattaccatggaatattcctcgagtggtaaagcaacaggcgaggccgatgttcactttgaaacacacgaagacgccgtggctgcaatgctgaaggatcggtcccatgtgcaccatcggtatattgagctctttctaaatagttgccctaaaggcaagtag

SEQ ID NO: 189843 - DNA, 1239 bp, synthetic construct
  misc_feature 1..1239: note = Description of Artificial Sequence: Synthetic coding sequence
  source 1..1239: mol_type = other DNA
atggccggcacccggtgggtgctgggcgccctgctgcggggctgcgggtgcaattgttctagttgccggcgcacaggtgcagcctgcttgccgttctatagcgcggccggcagtattccagccgcggcagttcctaccagaagctactctcaggagagcaagaccacatacctggaggatctgcctccccctcctgaatatgagcttgctcctagtaagttagaggaggaggtagacgatgtgttcctgattagggctcagggcctgccctggagctgcacaatggaagacgtcttgaatttttttagtgactgccgaatcaggaatggagaaaacggtattcacttcttacttaatcgggacggcaagaggcgcggggatgcccttattgaaatggaatccgaacaggatgtccagaaagcgcttgagaaacatcgcatgtatatgggacagagatatgtcgaggtgtacgagatcaacaatgaggatgtggacgcacttatgaaaagcctgcaggttaaatcatcccctgtagtgaacgatggtgtggtgcgcttgagaggcttgccatattcctgtaacgaaaaggacatcgtggatttcttcgcaggcctgaacatagtcgatatcactttcgtgatggactacagagggaggcgcaaaacgggagaagcctacgtacaattcgaggagcctgagatggccaatcaggctttgctaaaacacagagaagaaatcgggaatcggtatatcgaaatattcccatctcgccggaatgaagtgcgcacacatgttggcagctataaaggaaagaagattgcctcctttcccacggccaaatatatcaccgaacctgaaatggtgttcgaggagcacgaggtgaatgaggatatacagccaatgaccgcttttgaaagcgaaaaggaaatcgaacttccaaaagaagtccccgaaaaactgcctgaagcagcggattttgggacaactagttccttacactttgtgcatatgagaggactaccttttcaggcgaacgctcaagatatcatcaacttttttgctccactcaagccagttcgaattacaatggagtatagctcctcaggaaaggcaacaggggaggcggacgtgcatttcgagacacatgaagatgccgttgccgccatgcttaaggacaggtcacatgtccaccaccgctacatcgagctgtttctaaatagttgtcccaagggaaagtag

SEQ ID NO: 189844 - DNA, 1089 bp, synthetic construct
  misc_feature 1..1089: note = Description of Artificial Sequence: Synthetic coding sequence
  source 1..1089: mol_type = other DNA
atggagagcaagaccacctacctggaggacctgccccccccccccgaatacgaactcgcaccaagtaagctagaggaagaggtggatgacgtttttctgatcagagcccagggccttccttggagctgcaccatggaggatgtgcttaattttttctctgactgcagaattcgcaacggggaaaacggtattcatttcttgctgaacagagacgggaagaggaggggggacgctttgatcgaaatggaaagcgaacaggacgttcagaaggctcttgagaagcaccggatgtacatgggacagaggtatgtggaagtgtacgagatcaacaacgaagatgtcgatgctcttatgaaatcactccaggtaaagagcagccccgttgtcaatgatggtgtcgtccgcctccgcggattgccgtactcatgtaatgaaaaagacattgtagacttctttgcaggcctcaatatcgttgacattaccttcgtgatggactaccggggacggcgtaagacaggggaagcctatgtccaattcgaggaacccgagatggccaatcaggcgcttctgaaacaccgggaagaaatcggaaatagatatatcgagatctttccttccagaagaaatgaagttcgcacacacgtgggcagctataagggtaagaagatagcatcattcccaaccgccaagtatattaccgagcccgaaatggtatttgaggaacacgaggtgaatgaggacattcagcccatgacagctttcgaatctgagaaggaaatcgagttaccgaaagaagtgcctgaaaagctgcctgaagccgctgatttcggaaccactagctctttacatttcgtacacatgagaggtctgccttttcaggctaatgcccaagacataattaacttctttgctccacttaaacccgtccggattacaatggaatactcatcttccggaaaggcaacaggagaggccgacgtgcactttgaaacccacgaggatgctgtggccgctatgctgaaggatcgatctcacgtccaccatcgctacatcgagctgtttttgaatagttgtcccaaggggaagtag

SEQ ID NO: 189845 - DNA, 1401 bp, synthetic construct
  misc_feature 1..1401: note = Description of Artificial Sequence: Synthetic coding sequence
  source 1..1401: mol_type = other DNA
atgctgcggagcaccagcaccgtgaccctgctgagcggcggcgccgcgcgtactccaggggcacctagccggcgcgctaacgtgtgcagactgcgcctgaccgtacctcctgagtcaccagtccctgagcaatgtgaaaaaaaaattgaaaggaaggagcagctcctggatctttccaatggggagcccaccagaaaactcccccagggagtggtttatggggtggtgaggagaagtgatcagaaccagcaaaaagaaatggtggtatacggctggtcaacctcccagctgaaggaagagatgaattatatcaaagacgtgcgggctaccctagaaaaggtgcggaaaagaatgtacggggattacgacgaaatgcgacagaagatcaggcaattgacccaagaactgagcgtgtctcatgcccagcaggaatacttggagaatcacattcagacacagagctccgcactggacaggtttaatgcgatgaactctgctctagcttctgacagcatcggcttgcaaaagacactggtggatgtgacactcgaaaacagcaacatcaaagaccaaatccgtaacttgcagcaaacctacgaggcctccatggataagctgagagagaagcagaggcaactcgaagtggctcaggtggagaaccaactgcttaaaatgaaggtagagtcttcccaggaagctaatgccgaagtgatgcgcgagatgacaaaaaagctctactcccagtacgaagagaaactgcaggaggagcagcgaaagcattccgctgagaaggaggcgttattggaagagaccaactcttttctgaaagccattgaggaagctaataaaaagatgcaggcggctgagatcagtctcgaggaaaaggaccagcgtatcggagaactggaccggctaatcgagagaatggagaaggagcgtcaccagctccagctccagttgctcgaacacgagactgagatgtctggcgagctcactgactcagataaggagcgctaccaacaattagaggaagcctccgcctctctgcgcgaacgcattagacatctggacgatatggtgcattgccaacagaagaaagtcaagcaaatggtggaagagatcgaatcacttaagaaaaaactgcagcagaaacagctgcttatcctccagctcttagagaaaatctcatttcttgagggggagaacaatgaacttcagtcgaggctagactatttgactgagactcaggccaagaccgaagtggagactcgcgagattggggtaggttgcgacttgctacctagccaaacagggcgtacccgagagattgtcatgccatcccgtaattacactccatatacccgggtcctggagctgacgatgaaaaaaaccctcacctag

SEQ ID NO: 189846 - DNA, 1194 bp, synthetic construct
  misc_feature 1..1194: note = Description of Artificial Sequence: Synthetic coding sequence
  source 1..1194: mol_type = other DNA
atgctgcggagcaccagcaccgtgaccctgctgagcggcggcgccgcccgtactccgggcgccccgagtcgccgcgccaatgtttgccggctgcgcttgacagtcccaccagaatcccctgtaccggaacaatgcgaaaagaaaatcgagcggaaagagcagttactggacttgagcaacggagaacccacacggaagctccctcaaggggtggtctatggggtggtgcgcagatccgaccagaatcagcaaaaggagatggtggtttacggctggtccacttcacagttgaaggaggaaatgaactacatcaaggataaaactctggtggatgttacactggagaattctaacatcaaagatcagatcaggaatctacagcaaacctatgaggcaagtatggacaaactgagagagaaacagcggcagttagaggttgcccaagtcgagaatcagctgttgaagatgaaggtggagtcttctcaggaagccaatgccgaagttatgagagagatgaccaagaagctgtactcacagtacgaagagaaactgcaggaggaacaacgcaagcactcggcagagaaagaggcgttgctggaagagacgaatagcttcctcaaagccattgaggaagctaacaagaaaatgcaggcagccgaaatcagcctcgaggaaaaggaccaacggatcggagagctggaccgcctcatcgagcgtatggaaaaagaacgtcaccagctgcagctgcagctgttggagcatgagacagaaatgagcggcgagctgactgattccgacaaggagcggtaccagcagctcgaagaggcttcggcttccctgcgcgaacgcatccgtcacctggacgatatggtccactgtcaacaaaaaaaggtcaagcaaatggtggaagaaatagagagcctcaaaaaaaagctgcagcaaaagcagctgctgattctccaattactggagaagattagctttttagaaggtgaaaataacgaactccaatcaagactagattacctgactgagactcaggccaagactgaagtggagactcgcgagatcggggttggatgtgatctgctgccttctcagaccggccgcaccagagagatcgtcatgcctagccggaactataccccttacacccgcgtgttggaactcacaatgaagaaaactctgacgtag

SEQ ID NO: 189847 - DNA, 1248 bp, synthetic construct
  misc_feature 1..1248: note = Description of Artificial Sequence: Synthetic coding sequence
  source 1..1248: mol_type = other DNA
atgctgcggagcaccagcaccgtgaccctgctgagcggcggcgccgcgagaacgcccggagcaccctcgcgtcgcgctaacgtgtgtcgcctacgcctgactgtgccccccgaatctcccgtcccagaacagtgcgaaaagaaaatcgaacgcaaagaacagcttttggatctttccaatggcgagccgacacggaaactgccccagggcgttgtttacggagtggtccgacggtctgatcaaaatcaacagaaagagatggtggtctacggatggagcacttcccagctgaaagaggagatgaactatatcaaagacgtgagccatgcccagcaagagtatctggaaaatcatatacagacgcagagttcagccttggatcgcttcaacgcaatgaactctgccctcgccagcgatagtatcggcctgcaaaagacgctcgttgatgtgactcttgaaaacagcaacatcaaggatcagattagaaatttacagcagacttacgaggcaagcatggacaaattacgcgaaaagcagagacaattagaggtcgctcaggttgaaaaccagcttctcaagatgaaggtcgaaagctctcaggaagcaaacgcagaggtcatgcgcgagatgactaaaaagctgtatagtcagtatgaagagaagctgcaggaggaacaacggaaacattcagctgagaaggaggccctgctagaagagacaaactcctttctcaaggctatagaagaggcgaacaagaagatgcaggctgcagagatttcgctcgaagagaaggaccagagaatcggagagctggatcgcctcatcgaaaggatggagaaagaacgccaccagctgcaattacagcttctggaacacgagacggaaatgtccggtgaactcaccgactccgacaaagaaagataccagcagttagaagaggcttctgcaagtctccgggagaggatccggcatctggacgatatggtgcactgccagcagaaaaaggtcaagcagatggttgaagagaataatgaactccagtcccgactggactatttgaccgaaacccaggcaaagacagaggtggagactcgtgagattggagtgggctgtgacctgttgccgcggcaaagtcgcaaattcgaaaaggtgctgaacgagtttgtgcagctcttgcccctcccacatcatttgctatgggcttttggtaacgtctgctggagacggcacttcgggcttttgcagtag

SEQ ID NO: 189848 - DNA, 1317 bp, synthetic construct
  misc_feature 1..1317: note = Description of Artificial Sequence: Synthetic coding sequence
  source 1..1317: mol_type = other DNA
atgctgcggagcaccagcaccgtgaccctgctgagcggcggcgccgctaggacacctggagccccctctagacgcgccaacgtgtgccgactcaggctcacggttcctccggaaagtcctgtccctgagcagtgtgaaaagaagatcgaaagaaaggaacagctgttggacttatctaacggtgaacccactcgcaagcttcctcagggcgtggtctatggagtcgtgaggagatccgaccagaatcaacagaaggagatggtcgtgtatgggtggtccacttctcagctgaaggaggaaatgaattatataaaggatgtccgcgcgactctggagaaggtgagaaagaggatgtatggggactatgacgaaatgcggcaaaaaatcaggcagctcacccaggagctcagcgtctcccatgctcagcaagaatacctggagaaccacatccagacccaaagttctgccctggatagattcaacgcgatgaacagcgcgctcgcgtctgactccattgggttgcaaaagactctggtagacgtaacccttgaaaactctaatattaaggaccagatccgcaacctgcaacagacatacgaggcgtccatggacaaactccgcgagaagcagagacagcttgaggtagcacaagtggaaaatcagctgttaaagatgaaggtcgagtctagccaagaggccaatgctgaggtaatgagagagatgaccaaaaagctttacagccaatacgaggaaaagctacaggaggaacagcggaaacacagcgcggaaaaagaagcccttctggaagaaactaacagctttctgaaggccattgaagaggctaacaaaaagatgcaggccgccgagattagtctggaagaaaaagatcagagaattggcgagctggatcgcctgatcgagcggatggaaaaggagagacaccaactgcagcttcaactgttggaacacgaaacagagatgtctggtgaactcaccgatagtgacaaggagagataccaacagctggaggaagcaagtgcttctctgcgggaacggatacgtcatcttgacgacatggtgcactgccagcagaaaaaggtgaagcaaatggtcgaagagaataacgagctacagtctcggctcgactacctcactgagactcaggccaagacagaggtagagacacgggagatcggggtgggctgtgacctgctgccaagccagactggcagaacgagggagatagtgatgcctagcaggaactacacaccctatacccgcgtgttggagctgaccatgaaaaagacattgacttag

SEQ ID NO: 189849 - DNA, 1338 bp, synthetic construct
  misc_feature 1..1338: note = Description of Artificial Sequence: Synthetic coding sequence
  source 1..1338: mol_type = other DNA
atgctgcggagcaccagcaccgtgaccctgctgagcggcggcgccgcacggacccctggtgcgccgtcccgtagagccaatgtttgccgcctgcggctgacggtgccacctgaatctcccgttcctgagcagtgcgagaagaaaattgaaagaaaggagcagctgcttgatcttagtaacggggaaccaactagaaagctgccacagggcgtggtttatggagttgtgcgtagatcagaccagaaccaacagaaagaaatggtggtatacggatggagcacctctcagcttaaagaagaaatgaactacataaaggacgtacgtgcaaccctggaaaaggtacgtaagcggatgtacggcgactatgatgaaatgaggcagaaaattcgacaacttactcaggagctgtcggtgagccatgcccagcaggagtatctggagaatcatatacaaacccaatcctcggcgttagatcggtttaacgctatgaattccgccttggcttctgatagtatcgggctgcagaagacactggtggacgttactctcgaaaattcaaatattaaagatcagatccggaaccttcagcagacctacgaggcaagcatggataaactgcgcgaaaaacaacggcaattagaagtcgctcaggtggaaaaccagctgctaaagatgaaggtagaaagctcacaggaagcaaatgctgaggttatgcgggaaatgaccaagaagctgtactcacaatacgaggagaagttgcaggaggagcagcggaagcactccgcagagaaagaggcattactggaggagaccaactccttccttaaagccattgaggaggctaacaagaagatgcaggccgccgagatttccctggaggaaaaggaccaacgcatcggtgaactggaccggctcattgaaaggatggaaaaggagagacaccaactgcagctgcaactgctagagcatgagactgagatgagtggagagctgacagattccgataaagagcgctaccagcaactggaagaggcatcagcatccttacgtgagcggattcggcacctagatgatatggtgcactgccagcagaagaaggtcaagcaaatggtggaagaaattgaatcactcaaaaaaaagttgcagcagaagcagctgcttatcctgcagctgctggaaaagataagtttcctcgaaggtgagaataacgagctccagtctcggctggactaccttacagagacacaggcaaaaactgaagtggagacacgtgagatcggggtgggctgtgacctgctcccccgacgttgtaaacagtcctctcagcggaaaaactag

SEQ ID NO: 189850 - DNA, 1653 bp, synthetic construct
  misc_feature 1..1653: note = Description of Artificial Sequence: Synthetic coding sequence
  source 1..1653: mol_type = other DNA
atgctgcggagcaccagcaccgtgaccctgctgagcggcggcgccgcccggacaccaggagcaccaagccggcgcgccaatgtctgccggctgaggctgacagtcccacccgagagtcctgtgccagaacaatgtgaaaaaaaaatcgagcggaaggagcaattgttagatctatctaatggcgagccaacacgaaagctaccacagggcgtggtctatggcgtagtgcgacggtcggaccagaatcaacagaaggagatggtcgtttacgggtggagtacaagccagctgaaggaggagatgaattacatcaaggacgtcagggcgaccctagaaaaagttcgaaaaagaatgtacggcgattatgacgagatgagacagaaaataagacagctcacccaggagttaagtgtcagccatgcacagcaggagtacttagagaatcacatccaaacacaaagctcagcactggatcgatttaacgcaatgaactcggccctcgcctcagattcaattgggctccagaagacactggtggatgtaaccctcgaaaactccaacattaaggatcagataaggaatctccagcagacgtatgaagcatcgatggacaaactgcgcgaaaagcagcgccaactcgaggtggcacaagtggaaaatcagctcctgaaaatgaaagtggagagctcccaagaagctaatgcagaggtgatgcgcgaaatgaccaagaagttgtactcccagtacgaggagaagcttcaggaagagcagcgcaagcatagtgccgagaaggaggcccttcttgaggagactaattcattcctgaaagccattgaagaagccaacaagaagatgcaggccgctgagatatccttggaggagaaagaccaaaggattggagaattagaccgcctgatagagagaatggagaaagaaagacaccagctccagctgcagttgttagagcacgagactgaaatgtctggtgagctcacagacagtgacaaggaacgttatcaacagttggaggaggcgtcggccagtctgcgggaaaggattcgacacctggacgatatggttcattgccaacagaaaaaggtgaagcagatggtcgaagagattgaatccctgaagaagaagctccagcagaaacagctgctgattctgcagctcctggagaaaatttcgtttctggagggcgagaataatgaactgcagtctcgcctcgattacttgacggaaacgcaggcgaaaacggaggtggaaacccgggagattggcgtggggtgcgacctgttgcctagactcccattccgccagaacgattcgtcctcccattgtcaaaagtctgggtcccccatctcgtctgaagaacgccggagaagggacaaacagcatctggatgatatcactgccgctaggctcttgcctctgcaccatatgccaacccagttgctgtccattgaggagagtctcgcgctccagaagcagcagaaacagaattacgaggaaatgcaggcaaaacttgctgcacaaaaattggccgagcggctgaatattaagatgcgtagttacaaccctgagggggaatcatcaggtagatatagagaggtgagggacgaagatgacgattggagctccgatgagttttag

SEQ ID NO: 189851 - DNA, 1308 bp, synthetic construct
  misc_feature 1..1308: note = Description of Artificial Sequence: Synthetic coding sequence
  source 1..1308: mol_type = other DNA
atgctgcggagcaccagcaccgtgaccctgctgagcggcggcgccgcccgcacgccaggcgctcctagtcggagggcaaacgtatgtcgactgcgactgacggtgcctccagagtcacctgttcctgagcaatgtgagaaaaagatcgaaaggaaggaacagttgctggacctgagcaacggcgagcccaccaggaaactgccgcagggtgtggtttatggcgtggtcaggcggtccgaccaaaaccagcagaaggaaatggtggtgtacggctggagcacaagtcaactgaaggaggaaatgaactatattaaagacgtaagtcatgcacagcaggagtacctagaaaaccacatacaaacacagtcttctgcgctcgatcgctttaatgccatgaattcagcgctcgccagtgactctattggtttacaaaaaacactggtggacgtgacattagaaaactctaacattaaggatcaaattaggaatctccagcaaacctatgaagccagtatggacaaacttcgcgagaagcagcgccagctagaggtcgcgcaggtcgaaaatcagcttcttaaaatgaaggtggaaagctcccaagaagcaaatgcggaggtgatgagagaaatgacaaagaagctgtatagtcaatatgaggaaaaacttcaagaagaacaacgtaaacatagcgcagaaaaagaagcccttctcgaggagactaatagttttctgaaggccatcgaagaagcaaataaaaagatgcaagctgcagaaatctcactcgaggaaaaggaccagagaatcggagaactagacaggcttattgaacgaatggagaaagagagacaccagctgcagctccagctgctcgagcatgagaccgaaatgtcaggcgagcttactgattcagacaaagagcgctaccagcaattggaagaagcctctgcttcactgcgcgaacggatccgtcacctggatgacatggtgcattgccagcagaaaaaggtcaagcagatggtcgaagagatagaaagcctgaagaagaaactccaacaaaaacaactgttgattctgcagcttctcgaaaaaatctcattcctggagggcgagaataacgagctgcagtctcggttagactatctgaccgaaacgcaggctaaaactgaggtggagactcgcgaaatcggggttggatgcgaccttcttccgagtcagactggtcgaaccagggagattgtcatgccttctagaaattacaccccatacacccgagtgctggagctcaccatgaagaagactctgacctag

SEQ ID NO: 189852 - DNA, 1401 bp, synthetic construct
  misc_feature 1..1401: note = Description of Artificial Sequence: Synthetic coding sequence
  source 1..1401: mol_type = other DNA
atgctgcggagcaccagcaccgtgaccctgctgagcggcggcgccgcgaggactcccggagcgccttctcgcagggccaacgtatgtaggctcagacttacagtgcccccagagagtcctgtgcctgagcagtgtgagaagaagatcgagaggaaggaacagctgctggacctcagcaacggcgagccgacgcggaagctgcctcagggcgtggtctatggtgttgttcgtcgaagtgatcagaaccagcagaaggaaatggttgtttacggatggtctactagccagttaaaagaagagatgaactacatcaaagacgtgcgtgccactctggaaaaagtccggaagcgcatgtacggagattatgatgagatgagacaaaaaattcggcaactgacacaggagctttctgtgtcccatgcgcaacaggagtaccttgagaaccacattcagacacagagttccgccttggataggtttaatgctatgaattccgctttagccagtgattctatcggactccaaaaaacactggtggatgtcaccctggagaatagtaatatcaaagaccaaatccgtaatctccagcagacctatgaggcgtcaatggataagctgcgggagaaacagcgacagttagaagtggcgcaagtcgagaatcaactgcttaagatgaaggttgaatcttcacaggaagccaacgcagaggtgatgcgagaaatgacgaagaaactatactcacagtacgaggagaagctccaagaggagcagcgcaaacactctgcagagaaggaggctctgctggaagagacaaactcatttttgaaggctattgaagaagccaataaaaaaatgcaagccgccgagatctctctagaggagaaggaccaacggatcggagaacttgacaggctcatagagagaatggagaaagaacgccaccagctgcagctccagctcctggagcatgaaacagaaatgtccggagaactgacagattctgacaaggagcgctatcagcaactcgaggaagcaagcgcatcactccgagagcgcatccggcaccttgacgatatggtgcactgtcaacagaaaaaagtgaaacagatggtggaagaaatcgaatctctgaagaagaagcttcaacagaagcagcttctcattcttcagctgctcgagaagatttcttttctggaaggtgaaaataatgagttgcagtccaggctggactatttgaccgaaacacaagctaagaccgaagttgagacacgcgaaattggggtcggctgcgacctgctgccctcccagacggggcgcactagagaaatcgtcatgccaagcagaaactataccccttataccagagttctggagttaacaatgaagaaaacattaacttag

SEQ ID NO: 189853 - DNA, 1317 bp, synthetic construct
  misc_feature 1..1317: note = Description of Artificial Sequence: Synthetic coding sequence
  source 1..1317: mol_type = other DNA
atgctgcggagcaccagcaccgtgaccctgctgagcggcggcgccgccagaaccccgggggcccctagccggagagcaaacgtgtgccggctccgactgacggtgccgccagaatcgcccgtcccagaacagtgtgagaaaaaaatcgagcgaaaagagcaactgctggatttaagcaacggagagccaacccgtaagttgccgcagggtgtagtctacggggtggtgcggaggtccgaccagaaccaacagaaagaaatggtcgtgtatgggtggtcaacatcccagttgaaggaagaaatgaattacatcaaggatgtaagagccacactggagaaggtccggaaaagaatgtacggcgactacgatgagatgaggcagaaaataagacagctgactcaggagttatcggtttctcacgcccagcaagaatacttggagaatcatatccagacacagagtagtgccctagacaggtttaacgctatgaatagcgcgctggccagcgatagcatcggcctccagaaaactcttgtggatgtaacactagagaatagcaatatcaaggaccagatcagaaacctgcagcagacctacgaagcaagcatggacaaactgcgggagaaacagcgacagctcgaggtggcgcaagtcgagaaccagctgctcaagatgaaggtggaatccagccaggaggccaatgcagaagttatgagagagatgacaaagaagctttactcgcaatacgaagagaagctgcaggaagaacagagaaagcattccgccgaaaaagaagctctgctcgaggaaacaaatagcttcctgaaagcaatcgaagaagccaataagaagatgcaggccgctgagatttctctcgaggagaaagaccagaggataggggaattggatcgactcattgagcggatggagaaggagcgccatcagctccaactccagctcttagaacacgaaaccgagatgtcaggcgagttgacagacagcgacaaagaacggtatcagcagctcgaagaagcctcagcttccctccgggaaagaattcgccatctggacgacatggtccactgtcagcagaagaaggtcaagcagatggtcgaggaaaataacgaattacaaagcaggctcgattacttgaccgagactcaggccaaaaccgaagttgagacgcgagaaattggggtcggctgcgacttgcttccctcccagaccggccgcacccgtgagatcgtcatgcccagccgaaactataccccgtacacccgggtactcgagctgaccatgaagaagacattgacatag

SEQ ID NO: 189854 - DNA, 1401 bp, synthetic construct
  misc_feature 1..1401: note = Description of Artificial Sequence: Synthetic coding sequence
  source 1..1401: mol_type = other DNA
atgctgcggagcaccagcaccgtgaccctgctgagcggcggcgccgctaggactcccggcgctccatcgcggagggctaatgtgtgccggctgagactcaccgtgcctccagagagcccggtaccggagcaatgcgaaaagaaaatcgagaggaaggagcagttgctcgatttgtccaatggcgaacctacccggaagctccctcagggcgttgtatacggagtggtgcgaagatccgaccagaaccagcagaaagagatggtggtgtatgggtggagcacttcacaactgaaagaagagatgaactatattaaagatgttcgcgccactctcgagaaagtcaggaagagaatgtacggtgattacgacgaaatgcgccagaaaattcgccagcttacacaggagctatctgtaagtcatgctcaacaggagtatctcgaaaatcacattcaaacccagtcctccgccctcgatcgatttaacgccatgaattctgcactggcgtcagattctattggcttgcagaagacgttagttgacgtgaccctggagaattccaacattaaggaccaaattagaaacctgcagcagacatatgaggccagtatggacaaattgcgcgagaagcagaggcagctcgaggtggcccaggtggagaaccagttgttgaaaatgaaggttgagagcagtcaagaggcgaacgcagaagtcatgcgcgagatgaccaagaagttatatagccagtacgaggaaaaattgcaggaggagcagaggaaacacagcgcagagaaggaggcgctgctcgaggaaactaattcatttttaaaagctattgaggaggcaaacaagaaaatgcaggccgcagagatcagcttggaagagaaggaccagcggatcggtgagctcgatagactgatagaaaggatggagaaagagaggcaccaactacagctccagctactcgaacacgagacggaaatgtccggagaactgacggatagcgacaaagaacgctaccagcagctcgaggaagcctcagcatcattgagagagcggataagacacctagatgacatggtacactgtcagcaaaagaaggttaagcagatggtcgaggagattgagtccttgaaaaagaagctccagcagaagcagctgctgattcttcagctactggaaaaaattagcttcctggaaggagagaataatgagcttcagtcacggctagattacttaaccgaaacccaagctaagaccgaggtggaaacacgggagattggcgtgggatgcgatctgctgccgagccagactggccgtacccgggagattgtaatgcccagcaggaactatacgccttacacccgggttctagagctcactatgaaaaaaaccctaacgtag

SEQ ID NO: 189855 - DNA, 2328 bp, synthetic construct
  misc_feature 1..2328: note = Description of Artificial Sequence: Synthetic coding sequence
  source 1..2328: mol_type = other DNA
atggagaagttcggcatgaacttcggcggcggccccagcaagaaggacctgcttgagacaatagaaacccagaaaaagcagttattacaatatcaggctaggttgaaggacgttgtgagggcctacaaaagcctactgaaagagaaagaggcactggaagccagtattaaagtgctgtccgtgagccacgaagctgatgtgggactcgctggagtgcagctcccggggctgacattccctgactcggtggacgaccggtgcagtacgcactctgaggactcgactgggactgcaacaagcttagacaccgctgcatcattgacaagcacaaagggcgagttcggcgtggaagatgataggcccgcacgcgggcccccgccgcctaaatctgaggaagcctcatggtctgaaagtggtgtgtcaagtagcagcggcgacggaccttttgccggaggcgaggtggataagcggctgcatcagcttaagacacagctggccacactgacgtcctcccttgcgacggtgacgcaggagaaatctcggatggaggcctcatacctcgccgacaaaaagaagatgaaacaggacctcgaggatgcctcgaacaaggccgaagaagagagggcacggcttgagggtgagctcaaaggcctgcaagagcagatcgctgaaactaaggcccgcctaattactcagcaacatgatcgtgcccaggagcagtcagatcacgccctgatgttgcgcgagttgcagaaacttttacaggaagaaagaacccagagacaagaccttgagctaagactggaggagactcgtgaagcattggcgggtcgcgcatacgcagccgagcagatggagggctttgagctgcagaccaaacagctgaccagggaagtggaggaactgaagagcgaacttcaggccatccgagatgaaaagaaccagccggatccccggctccaagagctacaggaggaagctgccaggctcaaaagtcatttccaggcccaactgcaacaagaaatgcggaagactgccttggccgaggatcaactccggcaacagtcccaagtcgaggaacagagggtcgccgcattagagaatcaaatctcagaagtcagcgaattgctagggacctacgaaaaagcaaaacaaaaggaccaactggccatacagaagctcaaagaaagaatcctgcagttagaccttgagaacaaaactctggcgctggctgcgagctcgcggtcccccctggactctcacggagaggagagcagtctggatgtcaacgtcctgaaggacaagatggagaagctgaagaggctgctgcaggtggctgcacgaaaatctcaggtgaccctggatgtggagaaactgtgtgacttagaaataatgccctcttccgaggccgctgatggggagaaagctaccgccctctactatcagcaggaactaaagcagcttaaagaagaattcgaaaggtataagatgcgcgcgcaggtagtcttgaagtcgaagaacaccaaagacggcaatctaggaaaggaactggaggctgctcaggaacaactggctgagcttaaggagaaatatatctccctccgtctgagctgcgaggagctggagcatcagcatcaacaggaggcagatgactggaaacaggagcttgcgagactccagcagttgcacagacaggagctcgagcggtgtcagctggattttcgggaccgcaccttaaagctggaagaagagctccataagcagcgggacagggctttggctgttctaacagaaaaagacctggagctggagcagttgcggagcgtggctctcgcgagtggcctgcctggccggaggagtccggtcggtgggggaggacctggcgaccctgctgatactagtagtagtgattccctcactcaggccctgcagctggccgctgctaacgaacccacattctttctgtacgcggaacagttggcacgaaaggaagttgaaattacgagcctgagaaagcagaagcaccgcctggaagtggaagtgcaccagctacaggatcgcctactcgaagaaggggagcgccaccgagaagaagtcgctgcactgcaaagccacatcgaaaagaatattcgggatcagagtagagagggggccaatctggagtatctcaaaaacattatttaccggtttctgacactcccagactccctcggtcgccagcagaccttgaccgccattttaaccatactgcatttctctcctgaagagaagcaggtgatcatgcggctgccaacctccgcttcttggtggcctagtgggaagcgctag

SEQ ID NO: 189856 - DNA, 5055 bp, synthetic construct
  misc_feature 1..5055: note = Description of Artificial Sequence: Synthetic coding sequence
  source 1..5055: mol_type = other DNA
atggaggacctggtgcaggacggcgtggccagccccgccacccccggcactggaaagtctaagctggagacattgccaaaagaggatctcatcaagtttgcaaaaaaacagatgatgttgatccagaaggccaaaagccgctgtactgagctggaaaaagagattgaagagttacggtcaaaaccggttacggaaggtacgggcgatattatcaaggccctgacggagaggttggacgcactcctcctggaaaaggccgaaactgaacagcagtgtctgagcctgaaaaaagagaacatcaagatgaagcaggaagtggaggactctgttacaaagatgggtgatgctcataaggagctagaacagtcccatataaactacgtaaaggagatcgaaaatcttaaaaacgaactgatggccgtcaggtctaagtactctgaagacaaagcaaacctccagaagcagctagaggaggctatgaacactcagttggagctttccgaacagttaaaatttcagaacaactccgaagacaatgtcaagaagctgcaggaagagatagaaaaaattcggcccgggttcgaagagcagatcctgtacctccagaagcagctcgacgctactacagacgaaaaaaaggagaccgtgacccagttgcaaaatatcatcgaagcaaactcacaacattaccagaagaacattaattcccttcaggaggagcttctgcagctcaaggccatacatcaggaggaagtcaaggaactgatgtgtcaaattgaggcgtctgccaaagaacacgaggctgaaatcaacaaactgaacgagctcaaggagaatctggtaaaacaatgcgaggcaagtgaaaagaatatacagaaaaaatatgagtgtgagctcgagaacctccggaaagcgacgagcaatgcaaaccaggacaaccaaatttgttctatcttactccaggagaacacttttgtggagcaggtcgtgaatgaaaaggttaagcatctcgaggacactctcaaggagttggagtctcaacattccatcctcaaagacgaggtgacatatatgaataacctaaagctgaaactggagatggacgcccagcatatcaaagatgaattttttcacgagcgcgaagaccttgagttcaagatcaatgagttgctcttggctaaggaagagcagggctgcgtgatagagaagctaaagtctgagctcgctggacttaacaagcagttctgttatacagtggagcagcataatcgtgaggtgcagagcctgaaagagcagcatcagaaggaaattagtgagctcaatgagacgttcctgagtgactctgagaaggaaaagcttacactcatgttcgaaattcaagggctgaaggaacagtgtgagaacctgcagcaggagaagcaagaagccatactgaattacgaatcgctgagggagatcatggagattctgcagacagaactaggagagagcgcgggaaaaatttcacaggaatttgagagcatgaagcaacagcaggcctcggatgttcatgagctgcagcagaagttgcggaccgctttcaccgagaaggatgcgctactggagacagtgaaccgcttacaaggcgaaaatgaaaagctgttgagccaacaggaactggtccccgagctagagaatactatcaaaaacctgcaggagaaaaacggggtttatttattgtctctgagtcagcgagacaccatgcttaaggagctcgaaggaaaaatcaattcactaactgaagagaaagatgactttatcaacaagcttaagaattcccacgaagagatggacaactttcacaagaagtgcgagagggaagagcggctgattctagagttgggcaaaaaagtggagcagacaatccaatataactcagaactggaacagaaagtcaacgaattgactggtggactcgaagagacgctcaaagaaaaggaccagaacgaccaaaaactcgagaagctgatggttcaaatgaaggtcctgtccgaggacaaagaggtgctaagtgctgaagtgaaaagcctttatgaagagaataacaagctgagcagtgaaaaaaaacagttgagtcgcgacctagaagtctttctgtcacagaaggaagatgtcattctaaaagaacacatcacgcagcttgagaagaagctgcagttgatggtggaggagcaggacaacttgaataaactcttggaaaatgagcaagttcagaaattgtttgtgaaaacacagctgtacggcttcctgaaggagatgggctccgaagtgtccgaggattccgaagagaaggacgtcgtcaacgtgcttcaagctgtcggagaatcactggccaagatcaatgaagagaaatgcaacctagctttccaaagggacgagaaagtgttagagctcgaaaaggaaatcaaatgtcttcaggaggaatctgtcgtccagtgtgaagagttaaagtccttgttgcgcgattacgaacaggagaaggtcctactgcgcaaggagttagaggaaatccaatccgaaaaagaagctttgcaaagcgatttactcgagatgaagaacgccaatgagaagacacgcctggagaatcaaaacctgctgatacaggtggaggaggttagtcagacatgcagcaagagtgagatccataacgagaaagagaagtgtttcatcaaggaacatgagaatctgaaacctctgctggagcagaaggagctgcgagaccggcgtgcagagctaattctgcttaaagactcactggcgaaaagtccctctgtcaagaacgacccactatcatcagttaaggaactcgaagaaaagatcgaaaatctggaaaaagaatgtaaagagaaagaagagaagataaataagatcaagctggtggccgtgaaggcaaaaaaggagcttgattcctcccgcaaggagactcagacagttaaagaggagcttgagagtctgcgtagcgagaaggaccagcttagcgctagtatgagggatcttatacaaggggccgagagttacaaaaaccttctgcttgaatacgagaaacaaagcgaacagctggacgttgagaaagagcgcgccaacaactttgaacacagaattgaagatttgaccagacagttgaggaacagtaccctccaatgtgagacaatcaactccgacaatgaggacttactggcaagaattgaaacgctacagtcgaacgctaaactcctcgaggtgcagattctagaagttcagagagccaaagccatggtggataaggagctcgaagctgagaagctccagaaggagcagaaaattaaggaacatgccacaactgtgaacgagctggaggaactgcaggtccagttacagaagcagaaaaaacagcttcagaagactatgcaggaactggagcttgtgaagaaagacgctcaacagactacactaatgaacatggagatagccgactatgaacggcttatgaaggagctgaatcagaagctgaccaataaaaacaataaaattgaagacctggaacaagaaataaaaattcaaaagcagaagcaagagactctccaagaggaaataacctctttgcaatcttcagttcaacagtacgaagaaaagaatacaaagatcaagcagcttctagtcaagactaagaaagagctcgctgatagcaagcaggccgaaacagatcacctgatcctgcaggctagtctaaagggggaactcgaagcctcacaacagcaggtggaggtatataaaatccaactggccgagatcactagtgagaagcacaagatacatgaacatctgaagacatctgccgaacagcaccaacgaacattgagcgcctaccaacagcgcgtcaccgcccttcaagaggagtgtcgggccgcaaaagctgagcaggccaccgttacctcagagtttgaaagttacaaagtgcgggtgcataacgtcttgaagcagcagaaaaacaaatccatgagtcaggcagaaacagaaggcgccaagcaggagcgcgagcacctggagatgctgatcgatcagctgaagatcaaactgcaggactcccagaataacttgcagataaatgtgagcgagttgcagacactccagtctgagcacgacaccctccttgagcgccacaataagatgcttcaggagacagtatcgaaagaagcagaactgagggaaaagttgtgctctattcagtccgaaaacatgatgatgaaatcagaacacacacaaaccgtaagccagctgacctcgcaaaacgaagtcctgcgcaactcttttcgggatcaggtacgccacctgcaggaggagcatcgcaaaaccgtcgaaactctccagcaacagctaagcaagatggaggctcagcttttccaactgaaaaacgagcccacaacccggtcccctgtttctagccagcagtccttaaaaaatctccgggagcgcaggaacactgacctgcccctcctggatatgcacacagttacacgcgaggagggggaaggaatggagacaaccgacactgagagcgtatcctctgcctccacttatactcagtccctggaacagcttctgaactcgcctgagacgaaactcgaaccgcccctctggcatgctgaattcacaaaagaggaactggtacagaagttatcaagtactacgaagagtgcagaccacctcaacgggctgctccgggaaactgaggcgactaacgccatcctgatggagcagattaaattactaaaatcggagattaggaggctcgaacggaaccaggaacgggaaaagtctgcagccaatctggagtacttgaagaacgtcctgctgcagttcattttccttaaacccggatcagaaagagagcggctcttaccagtgatcaataccatgctacagctgagccctgaggagaaaggtaagctggccgcggtcgcccagggcgaggaagaaaatgcaagcagatcctccggctgggccagctatctacattcttggtccgggcttcgatag

SEQ ID NO: 189857 - DNA, 2052 bp, synthetic construct
  misc_feature 1..2052: note = Description of Artificial Sequence: Synthetic coding sequence
  source 1..2052: mol_type = other DNA
atgtgccagatcgaggccagcgccaaggagcacgaggccgagatcaacaagctgaatgagctcaaggagaatcttgtgaagcaatgcgaggcatcggagaaaaatatccagaagaaatatgaatgcgagctcgagaatctgcgaaaagcgacctctaacgccaaccaggataaccaaatctgtagcatcctcttacaggagaacacctttgtggaacaggtggtgaatgaaaaagtgaaacatcttgaagacaccttgaaagaactagagtctcaacattccattctgaaagacgaggtgacatacatgaacaatttgaagctgaaacttgagatggatgcacagcacattaaagacgaattcttccacgagcgtgaggacctggaatttaagattaacgaactgctcctggccaaggaggaacagggctgtgtcatcgagaaactgaagtctgaactcgcaggtttgaacaaacagttctgctacaccgtcgagcagcacaatcgcgaggttcagagtctgaaggagcagcatcagaaggagatttcggagctgaatgagacattcttaagtgattctgagaaggaaaaactcactctgatgtttgaaattcaggggctgaaagagcaatgtgaaaaccttcagcaggagaaacaggaagcgatcctcaactacgaaagcctgcgggaaatcatggagatccttcagaccgaactcggagagagtgccggcaaaatcagccaagagtttgagtctatgaaacagcagcaggcatccgacgtacatgaactgcagcagaagctgcgaaccgcattcactgaaaaggatgcgctcctcgaaactgtcaaccgactgcagggggagaacgagaaactgttgtcgcaacaagagttagttcctgagcttgaaaacacaattaagaatttacaggagaagaacggcgtctatctgctgtcacttagccaaagggataccatgcttaaagagctggaaggaaagatcaatagcctgacagaggaaaaggacgactttatcaataaattgaagaactcccacgaggaaatggacaattttcacaaaaagtgcgagcgggaagagcgattgattcttgaactcggcaagaaagtggagcagaccattcagtataacagtgaactggaacaaaaagttaacgagctaaccggaggcttagaagaaacactgaaagagaaggatcagaacgaccagaagcttgaaaaactgatggtacaaatgaaggtgttgtctgaggataaggaggtcctgtccgccgaagtcaaatccctgtacgaggaaaccattaattctgtgcaaaaaaagcagttgagcagggatctcgaggtatttctctctcagaaggaggacgtaattctcaaggagcacattacccagctcgaaaagaagctgcagctaatggtggaggagcaggataatttgaataagctgctcgaaaacgaacaggtgcaaaaattgttcgtcaagacacagctgtatgggtttcttaaggagatggggtccgaggtgagtgaggactctgaggaaaaagatgtagtgaacgtgctgcaggcagtgggagaatccctcgccaaaatcaacgaggaaaaatgtaaccttgcatttcagcgtgacgagaaggttttggaattggagaaagaaataaaatgtcttcaagaagagagcgtggtgcagtgtgaagagctgaaaagcctgcttagagactatgagcaggaaaaggtcctgctgcggaaagaactggaggagattcaatccgagaaggaggccctccagtcggatctgctcgaaatgaaaaatgccaatgagaagactagacttgaaaaccaaaaccttctcatacaggtggaagaagtatcccagacatgttccaaaagcgaaattcacaacgagaaggaaaaatgcttcatcaaggagcacgaaaatctgaagccgctccttgagcagaaggagctgcgcgaccgcagggctgagttgatcttactaaaggactctcttgcgaagagcccatcgaaaaaatag

SEQ ID NO: 189858 - DNA, 1347 bp, synthetic construct
  misc_feature 1..1347: note = Description of Artificial Sequence: Synthetic coding sequence
  source 1..1347: mol_type = other DNA
atggaggacctggtgcaggacggcgtggccagccccgccacccccggcacaggtaagtctaagctagagaccctcccgaaggaggatctcatcaagttcgccaagaaacagatgatgctgatccagaaggccaagtcccggtgtaccgagctggagaaggagatagaggaactccggagcaagcctgttactgagggtaccggcgacattattaaagcgctcaccgagcggctggacgcacttctgctcgagaaagctgaaaccgaacagcagtgtctatccctgaaaaaagaaaatatcaaaatgaaacaggaggtggaggactccgtcacaaaaatgggggacgcccataaagaattggagcagtctcatatcaactatgtgaaggagatagagaatctgaaaaatgagctgatggccgtgcgctccaagtactcagaagacaaggcaaacctgcagaagcagttggaggaggccatgaatactcaactggagctgagcgagcaattgaaattccagaataactccgaggataatgtgaaaaagcttcaggaggagatagagaagatacgccccggatttgaagagcagattttgtatcttcagaaacagctggacgccacaaccgatgaaaagaaggaaaccgtcacacagctacagaacatcatcgaagccaactcccagcactatcaaaaaaatataaattctttacaggaggaacttctacagctgaaggctatacatcaagaagaggtaaaggagcttatgtgtcagattgaggcctcagccaaggagcacgaggcagaaattaacaagctgaacgagctgaaagagaacctagttaaacagtgcgaggcctccgagaagaatatccagaaaaaatatgagtgtgaactggagaacctgcgtaaggcaacaagcaatgctaaccaggataatcaaatctgctctattctgttgcaggagaatacgtttgtggagcaagtcgtcaacgaaaaggtcaagcacctggaagacactcttaaggaactagaaagccagcactccatattaaaggacgaagtgacctatatgaacaatctgaagctcaaactagaaatggacgcacagcatattaaggacgaatttttccacgagcgcgaggacctcgaattcaagataaatgagctgctgctcgccaaagaagagcaggggtgtgtaattgaaaagctgaagtcggagctggccggactgaacaaacagttctgttacaccgttgagcagcacaatcgagaagtgcagagtctcaaagaacagcaccagaaagaaattagtgaactcaatgagaccttcctttctgatagctag

SEQ ID NO: 189859 - DNA, 1878 bp, synthetic construct
  misc_feature 1..1878: note = Description of Artificial Sequence: Synthetic coding sequence
  source 1..1878: mol_type = other DNA
atggcccaggccctgagcgaggaggagttccagcggatgcaggcccaacttctcgaattgaggaccaataactaccagttgtctgatgaactgcggaaaaacggggtcgaactgacttccctgagacagaaagtggcatatctcgacaaagagttctcaaaagcccaaaaggccctttcaaaaagcaaaaaggcccaagaagtggaggttttgttaagcgaaaatgaaatgttgcaggccaagctccactctcaggaggaggacttccgtttacagaattctacactgatggccgagttttccaaggaaaggtacggaaaagaagcgggaaaattctcagccgtgtccgaagggcaaggcgaccctccaggtggtcctgcgcctaccgtgctggccccaatgcctctcgctgaagtcgagctaaaatgggagatggagaaggaggagaaaagattactttgggagcaattgcagggcctcgaatcctcaaaacaagcggagacctcccgcctccaggaggagctggcgaaactctcagaaaaacttaaaaagaagcaggaaagcttttgtcggctgcagaccgaaaaggagaccctgtttaacgactcaagaaataagatagaggaacttcagcagagaaaggaggctgatcacaaggcacagcttgcccggactcaaaagttgcaacaggaactcgaggctgcaaatcagtctttggccgaactgcgcgatcaacgacaaggcgaacgactagaacatgccgccgcacttagagcacttcaggaccaagtctccatccaaagcgccgacgcccaagaacaagtggaaggactactggcagagaataatgcactgcgcacttctttggccgctctcgagcagattcagaccgcaaaaacacaggagctgaacatgctgcgcgagcaaacaacaggcttagcagctgaactgcagcaacagcaagcagagtatgaagacctgatgggacaaaaggatgacctaaatagtcagttacaggagagcttgcgagcaaactctaggctgttggagcagctccaggagattggccaggaaaaggagcagcttacacaggaactccaggaggcaagaaagagcgcagagaaacggaaagcaatgttagacgagctggccatggagacacttcaggaaaagtcccaacataaagaagaactcggggctgtacggctacgccacgaaaaggaagtcctcggggtccgcgcaagatatgagcgggaactgcgtgaactgcacgaagataagaaacgacaggaggaagagctgaggggccagattcgcgaagaaaaggcaaggacacgggagttggagactctccagcagacagtggaagagctacaggcccaagttcattctatggacggcgccaaggggtggtttgagaggaggttgaaggaagccgagggcaaggaggaggaactgcaggacgttcgcgaccagttagagcaggcacaggaggagcgggattgtcacttaaagacaatctcaagtttgaagcaggaggtcaaggacacagtggacggacagaggatacttgagaagaaggggtccgcagctttaaaggacctgaaacgccagcttcatctcgaacggaagagggctgacaagctgcaggaacggctgcaggatattcttaccaactccaagtctagatctgggctggaagaactcgtgctctccgaaatgaatagcccctcccgcactcagaccggggatagctctagcattagcagcttcagttacagggaaatccttagggagaaagagtcgtcagctgttcctgctagggtcagaggcaaagaagaaccaaccgcccccgctagcctgaatccgaagatttag

SEQ ID NO: 189860 - DNA, 2433 bp, synthetic construct
  misc_feature 1..2433: note = Description of Artificial Sequence: Synthetic coding sequence
  source 1..2433: mol_type = other DNA
atggcccaggccctgagcgaggaggagttccagcggatgcaggcccagctcctcgaactgcgcaccaacaactaccaactgtccgacgagttgcgcaagaatggggtggaactaacatccctcagacagaaagtcgcttacctggataaagagtttagcaaagcccaaaaggccttaagtaaatcaaaaaaagcacaggaagtggaagtcctgctgtcggagaatgagatgctccaggcaaaattgcatagccaggaggaggattttcgacttcagaactctacgttgatggcagagttctctaagctctgtagtcagatggagcagcttgaacaagaaaaccagcagctcaaggaaggagcagctggtgccggtgtcgcccaggccggcccactagtggacggggaactgctgcgactccaggctgaaaacacagccctgcagaagaatgtcgcggcgttacaggaaagatatggtaaggaggcgggaaagttctcagcagtatcagaagggcagggggacccaccgggtggtcccgccccaacagtgctggcgcccatgccactcgcagaagtcgagctgaagtgggaaatggaaaaagaagagaagcggctgctgtgggaacaactacagggactcgagtcctccaagcaggcagaaacatcaagactccaggaagaattggccaaactgtccgaaaagctcaagaagaaacaggagtctttttgtcgcctgcaaaccgagaaagagaccctgtttaatgatagccgaaacaagatagaggaactgcagcagaggaaggaggcagaccacaaggcccagctcgcccggacccagaagttgcaacaggagctcgaggccgccaaccagagtctagctgaactccgagatcagcggcagggggaaagactggagcacgcagctgcactgagggccttacaagatcaaatccagacagctaaaacccaagagctgaacatgctgagggagcaaaccacaggactagccgccgagctacagcagcagcaggcagaatacgaggatctgatggggcagaaagatgatctgaacagccagttgcaagagtctcttagggctaatagcaggcttctggaacagcttcaagagattggacaggagaaggaacagctgacacaagagctgcaagaagccagaaagagcgctgagaaacgtaaggctatgttggacgagttggctatggaaaccctccaggagaaaagccagcacaaggaagaacttggcgcggtgagactaagacatgaaaaggaagttcttggagtgcgtgccaggtacgagcgagagctgagggaacttcacgaagacaaaaagagacaagaagaagagctgagaggacagattcgggaagagaaagcgagaacacgagagctggagaccctgcagcagaccgtggaggagctacaggcccaggtccacagtatggacggagcaaaaggatggtttgagaggcggctgaaggaggccgaagagagcctacagcagcagcaacaggaacaggaagaagcactgaagcagtgtagagaacagcacgcagccgagctgaaagggaaggaggaggagttgcaggacgtgcgggaccagttggaacaggctcaggaggaacgggactgccacttgaagactatctcgagtctcaagcaggaggtgaaggacacagtcgatgggcagcggattctggagaagaagggcagtgccgcccttaaagacctgaaacggcagctgcacctcgaacgaaagagggccgataagttacaagagcggttgcaagacatcttaaccaacagtaagagtcgctctggactggaggaattggtcctgtctgaaatgaacagcccaagtaggacgcaaacaggtgatagttcctccatatcatcctttagttatcgggagattcttcgggaaaaggaatcttctgccgtgcctgcccgcagtctgtctagctcccctcaggcccaaccacctcggcctgcagaactatctgacgaagaggtagccgaactgtttcagaggttggctgagactcaacaggaaaagtggatgctggaagagaaagtgaagcatcttgaggtctcttctgcatcaatggccgaagacctgtgtcggaagagcgctatcatcgagacctatgtcatggactctcgcattgacgtgtcagtggccgccggacatacagaccggtcgggcttgggtagtgtcctgcgggacctggtaaagcctggcgatgaaaacctcagagagatgaacaagaagcttcaaaacatgctggaagaacaactaactaagaacatgcatctgcataaggacatggaggtcttatcccaagagatcgtgcgactgtcaaaagagtgcgtgggcccaccagaccctgatctggaaccaggcgagacatcttag

SEQ ID NO: 189861 - DNA, 2526 bp, synthetic construct
  misc_feature 1..2526: note = Description of Artificial Sequence: Synthetic coding sequence
  source 1..2526: mol_type = other DNA
atggcccaggccctgagcgaggaggagttccagcggatgcaggcccagctgctggagctaaggacaaataattaccagttgtctgatgaattacgtaaaaatggggtagagttgacatccctccggcagaaggtggcatatctggataaagaattttccaaggcccaaaaggccctatcaaaaagtaagaaggcccaggaagttgaggttctgctttccgaaaacgaaatgctccaggccaagctgcactcccaagaggaggacttccggttgcagaattctactctgatggccgagttcagtaagttgtgctcccagatggagcagctggaacaggagaatcagcagttaaaggagggggctgccggtgccggagtagcacaggccggacctctggtcgacggcgagctcctgcgcctgcaggccgaaaacactgctttacagaaaaatgttgctgccctacaggagagatacggaaaagaagcagggaaattctcggcagtgagcgaggggcagggcgatcccccaggcggtcctgcacccacagtactcgctcccatgcctcttgccgaggttgagttaaagtgggagatggagaaggaggaaaagaggttactgtgggagcagctgcagggactagagtcatcgaagcaagctgagacttcgaggcttcaagaggagctggccaagcttagcgagaaactaaagaagaaacaggagtcattctgccggttgcaaactgaaaaagagacgctattcaatgattcccggaacaagatagaagagctacagcaacggaaggaagcagaccacaaagctcagctggctaggactcagaagctacaacaggagttggaggcagccaatcagtctctcgccgagctgcgggatcaaaggcagggcgaacggctggagcacgcggccgctttaagggcattgcaggatcaagtttccatccagagtgcggacgcccaggagcaggttgaggggctcctcgcagaaaacaacgcgcttcgcacaagcctcgcagctctggaacagatccagacagcaaagacccaggagctgaacatgcttagggagcagaccaccggtttagcagctgaactgcagcaacagcaggctgaatatgaggacctgatgggacaaaaagacgatctgaacagtcaattacaggagagtttgcgggctaatagtcgcctgctggagcagctgcaggagatcgggcaggaaaaagagcagctgactcaggagttgcaagaagcacgcaaaagcgctgaaaagcgcaaggcgatgctggatgaacttgccatggagaccttacaggaaaaatcccagcataaggaagagttaggggcggtgaggcttcgccacgagaaagaggtgctgggagtgcgtgcccgatacgaacgcgaacttcgagagctccatgaagacaaaaagcggcaggaggaggagctcagaggtcaaattcgagaagaaaaagcaagaacacgagagctggaaaccctgcagcaaaccgtcgaagaattgcaagctcaggtgcatagcatggacggcgccaaaggctggttcgaaagacgtttgaaagaggccgaggaaagcttgcagcaacagcaacaggagcaggaggaggccttgaaacagtgccgggagcaacacgccgccgagctcaagggaaaagaagaggagctacaagatgtgcgggaccaactggaacaggcccaggaggaacgggactgtcatttaaaaaccatctcttcactcaagcaggaggttaaggacacagttgacggtcaaaggattctggaaaagaaggggtcagccgccctgaaggacctaaaacgccagctgcaccttgaaagaaaacgtgcagacaaattacaggagagactacaggacatattgactaactcaaaaagcagatctgggctggaggaactggttctgtctgagatgaatagcccctctcgcacacagacaggtgattcttcgtcaatctcgtccttcagttatcgggagattcttcgagaaaaggagtcaagcgctgtgcctgcccgcagcctaagctcatccccacaagctcagccgcccagacctgccgagctgagcgacgaagaggtggccgaactgtttcagcgtctggctgagacccagcaagaaaaatggatgctcgaagagaaggtaaaacacctcgaggtaagctctgcatccatggccgaggatttgtgccggaagagcgccataatagagacctacgtcatggactctcgtattgacgtgtctgtggctgctggacacacagaccgctctggcttgggatcggtgctcagagacctcgtgaaacctggcgacgagaacctcagagaaatgaacaagaaactgcaaaatatgttagaggagcaattaaccaaaaacatgcatctccataaggatatggaggtcctcagtcaggagattgtgcggctcagcaaggagtgcgtgggtccaccagatcccgatttggagcctggcgaaaccagctag

SEQ ID NO: 189862 - DNA, 2391 bp, synthetic construct
  misc_feature 1..2391: note = Description of Artificial Sequence: Synthetic coding sequence
  source 1..2391: mol_type = other DNA
atggcccaggccctgagcgaggaggagttccagcggatgcaggcccagctcttggagctgcgcacaaacaattaccagctttctgatgagctgagaaagaatggagtggagctgacctcactacggcagaaagttgcctacctcgataaggagtttagcaaggcccagaagctttgttcccagatggagcaactggagcaagagaaccagcagctcaaagagggtgctgccggcgcgggggttgcacaggcgggtccccttgtagatggagagctgctgaggcttcaggctgaaaacactgctctccagaaaaacgtggcagctctccaggagagatatgggaaggaagctggcaaattcagtgctgtatcggagggccagggagaccctcctggaggccctgcccctacagtgctggctcctatgcccctggctgaggtggaactgaagtgggagatggaaaaagaagagaagcgactgctgtgggaacagttgcaaggtctggaatcatcaaaacaggctgaaacgagtaggctgcaggaagagctcgctaagcttagcgaaaaactaaaaaagaagcaggagtcattctgccggcttcagaccgaaaaggaaacactcttcaatgacagcagaaataaaatagaagaattgcagcagagaaaagaagctgatcacaaagcacagctcgcccggacccagaagctccagcaggaacttgaagccgccaatcagagcctggccgaactgagggaccagcgccagggggaacgactcgagcacgccgctgccctccgggcattacaggatcaggtaagtattcagtccgccgacgctcaggaacaggtggaaggcctactggccgagaataatgcgcttcgtacatccttggcagccctcgaacagattcagaccgcaaagactcaggaattgaacatgttgcgagagcagacaaccgggttagcggctgagctgcagcagcagcaggccgaatatgaagatctgatgggacaaaaagacgaccttaatagtcagttgcaggagagtcttcgtgcaaacagccgccttctcgagcaactgcaagagatcggccaggaaaaagaacagctcacacaggagctgcaggaagccagaaaatctgccgagaagaggaaagccatgctagatgagctcgcgatggaaaccctacaggagaagtctcagcacaaagaggaactaggcgcggtaaggctgagacatgaaaaggaggtgttgggggtgcgggcccggtatgagagggaactgagggaacttcatgaggacaaaaagagacaagaagaagaactgagggggcagattagggaggagaaagcccgaacccgggagcttgagaccctgcaacagacagtggaggagctgcaagctcaggtccactctatggacggcgccaagggctggtttgaaagaaggctgaaggaagctgaggaaagtctgcagcagcagcagcaggaacaggaagaagctctgaagcaatgcagagaacaacatgccgccgaacttaaggggaaggaggaggaactgcaggatgtccgggaccaactcgagcaagcccaggaggagcgggactgccacctcaaaaccatctcttctctcaagcaagaggtgaaggacaccgtcgacggacagcgcatcctggaaaagaagggaagcgctgccctgaaggatctgaaaaggcaactccacctagagaggaagagagcagacaagctgcaggagagactgcaggatatccttaccaatagtaagtccagaagcggtctggaagagctcgtcctctcagagatgaactctccctcgaggacccagaccggcgactcttcttcgataagctccttctcctatcgtgagattctgcgagaaaaggaaagtagcgcagtgccagcaagaagcctatcttcctctccccaggctcagcccccacgaccagccgagctgtcagatgaagaagtggctgaactcttccaacggttggcggagacccaacaagagaagtggatgcttgaggagaaggtaaaacacctagaagtcagttcagcctccatggctgaggatctatgtagaaagtctgccataatcgagacatatgtgatggactcccggatcgacgtcagcgtagccgcgggtcacaccgacaggagcggactcggttccgttcttagagatctggttaagcccggagacgagaacttacgggagatgaacaaaaagcttcaaaacatgctagaggagcagctcaccaagaacatgcatctgcacaaagacatggaggtgttatctcaggagattgttagactgagcaaagagtgtgtaggcccccccgacccggatctggaacctggggaaacatcctag

SEQ ID NO: 189863 - DNA, 2433 bp, synthetic construct
  misc_feature 1..2433: note = Description of Artificial Sequence: Synthetic coding sequence
  source 1..2433: mol_type = other DNA
atggcccaggccctgagcgaggaggagttccagcggatgcaggcccaacttctcgagctccgaacaaacaattaccagctcagcgatgagctgcgtaaaaatggcgtagaactgacatctcttagacagaaggtggcatatctggataaagaattttccaaagcccaaaagtctccaggtccgtgccttccactgcaggaagtggaagtcctgctcagcgagaacgagatgctgcaggccaaattgcactcccaggaggaagatttcagattacagaatagcactttgatggccgagttctccaagttgtgtagtcagatggagcaactggagcaggaaaatcagcagctgaaagaaggtgcggccggggcaggggtggcgcaggccggaccactggtagacggggagcttctcagactgcaggccgagaacactgccttacagaagaacgtggctgcacttcaggaacgctacggtaaggaagccggcaaattttccgctgtttctgaaggccagggcgatccacccggcggaccagcacccactgtgctcgccccgatgcctctggccgaagtagagcttaagtgggaaatggagaaggaggagaagcgtctcttgtgggaacagctgcaaggactcgaatcctcaaaacaggccgaaacatctcgactgcaagaggagctggccaagctctccgaaaaactcaaaaagaaacaggagtcattctgtagactccaaaccgagaaagaaacgctttttaacgattccagaaataagatagaggagctgcagcagcgaaaggaggctgatcataaggcccaattagctcggacacagaaactgcagcaggagctagaagctgccaatcagtcactggccgaactgcgggaccagaggcagggggagagacttgagcacgcagccgctttgcgggctctgcaggatcagatccagaccgcgaagacgcaagaactgaatatgctccgggagcagaccaccggactggcagccgagctgcagcagcagcaggctgagtacgaggatcttatgggtcaaaaagacgatctgaacagccagctacaagagtccctgagggcgaactctaggctactcgagcaacttcaggagatcgggcaggagaaggagcaactaactcaggagctgcaggaggcccgcaagtcagctgagaagaggaaggccatgcttgacgaactggcaatggagacactgcaggagaagagtcagcataaggaagaacttggagccgtcaggctccgtcatgagaaggaagtgcttggagttagagcacgatatgaacgggagctacgagagcttcatgaggacaagaaacgacaagaggaagagctgagaggacagatcagggaggaaaaggctcggactcgagagttagagacactacaacaaaccgttgaggaattacaggcacaggtgcactctatggacggggctaagggatggttcgaaaggaggctcaaggaagctgaagagagcctgcaacagcaacagcaagagcaggaggaggccttgaaacaatgccgcgagcagcatgcagcagaactcaaaggtaaggaagaggaacttcaggatgtgagggatcagttggagcaagctcaggaggagagagactgccatctgaagacgatttcttccttgaagcaagaagttaaggatacagtggatggtcagcgaatccttgagaagaagggaagcgctgcattgaaagacttgaaaagacaactccacttagaaaggaaacgagcagataagctgcaagaacgacttcaggatatactcaccaactccaagtccaggagcgggcttgaggagctggttttatccgagatgaatagtccttctagaacccagaccggcgacagctctagtatctctagctttagctacagggaaattctgcgggagaaagagagctccgctgtgcctgctagaagcctatcgagtagcccacaggcacagccaccaagacccgcagagctgagcgatgaagaggtggcggagctgtttcaacgtcttgcagagacacaacaggaaaagtggatgcttgaagaaaaggttaaacatctcgaagtgtcttctgcctccatggctgaggacctgtgtcgtaaaagcgcgatcatcgagacgtacgtaatggacagccgcattgacgtcagtgtggccgccggacatactgacaggtccggcctggggtccgttctgagagacctagtgaaacccggtgacgaaaaccttcgtgagatgaacaagaaattgcagaacatgttagaagaacagctgaccaagaatatgcatttacacaaggatatggaagtcctttcgcaagagatcgtgaggctgagtaaagagtgcgtgggaccacctgatcctgatctcgagcccggtgagacctcatag

SEQ ID NO: 189864 - DNA, 1425 bp, synthetic construct
  misc_feature 1..1425: note = Description of Artificial Sequence: Synthetic coding sequence
  source 1..1425: mol_type = other DNA
atgaagcgggtgctggtgctgctgctggccgtggccttcggccacgctcttgagcgaggcagggactatgaaaagaataaggtttgtaaagaattctcccatctgggaaaggaggatttcacttctctgtccttagtcctttatagtaggaaatttccaagcgggaccttcgagcaggtgagccagctcgtgaaagaggtggtgagcctcactgaagcttgttgtgccgagggggccgatcccgattgctatgacactcggaccagtgcccttagtgctaagtcgtgcgagagcaattctccctttcctgtgcatcccggtacggccgagtgttgcacgaaagaaggccttgagcgtaaactttgcatggcggccctgaagcaccaacctcaagagtttcctacatacgtggagcctacaaatgatgagatttgtgaggcctttcgcaaagatccgaaggaatacgccaatcagttcatgtgggagtacagcactaactatggtcaggcccccctctccttgctggtatcatacacaaaaagttacctcagcatggtcggtagttgttgtaccagtgcttcacctaccgtttgcttcctgaaagaacggcttcagctaaagcacctctccctgcttactacattgtctaaccgtgtttgtagccaatacgcagcatacggcgagaagaagtcgcggctctctaacttgattaagcttgcacaaaaagttcctaccgcagacttggaagacgtgctgccccttgcagaagacattacaaatatcctgagtaaatgctgcgaatctgcctcagaagattgcatggccaaggagctgcccgaacacacagtgaagttgtgcgataatctatcaacgaagaatagcaagtttgaggattgttgtcaagaaaagaccgccatggatgtgtttgtgtgcacctacttcatgccggccgctcaactgccagagctcccagatgtggaattacccacgaacaaggacgtgtgtgacccaggcaacacgaaagttatggataaatatacattcgagttgtcaaggaggacccatcttccagaggttttccttagtaaagtcctggaacctactcttaagtcactgggggagtgctgcgacgtggaagattccaccacatgttttaatgccaagggaccactgcttaaaaaggagttgtcgagtttcattgacaaggggcaggagctatgcgccgactattccgagaatactttcacagaatacaaaaagaagttggccgaacggctgaaggccaaattaccggacgccacccctacagagttggccaagctggttaataaacactccgacttcgcttctaactgctgctccattaactcaccgcctttatactgtgacagtgaaattgacgcagagctgaaaaatatcctctag

SEQ ID NO: 189865 - DNA, 438 bp, synthetic construct
  misc_feature 1..438: note = Description of Artificial Sequence: Synthetic coding sequence
  source 1..438: mol_type = other DNA
atgaagcgggtgctggtgctgctgctggccgtggccttcggccacgcactcgaaagaggacgtgactatgagaagaacaaggtgtgcaaggagttttctcacctgggcaaagaggacttcactagtctctctctcgtgttatactccaggaagttccctagtggaacttttgaacaggtgagccaactggttaaagaggtagtgtctctgaccgaagcgtgctgcgccgagggggctgacccagactgttacgatacccggacttccgcattatccgcaaagtcctgtgagagtaatagcccttttcctgtacacccaggtaccgcggagtgttgcactaaggaagggctggaaagaaaactctgcatggctgccttaaaacatcaaccacaggagttccctacctacgttgagccaaccaacgatgagatttgttag

SEQ ID NO: 189866 - DNA, 1482 bp, synthetic construct
  misc_feature 1..1482: note = Description of Artificial Sequence: Synthetic coding sequence
  source 1..1482: mol_type = other DNA
atgctgtggagctggagcgaggagcggggcggcgccgcccggctgtctggccggaagatgaaacgagtgctcgtcctactacttgcagttgcatttggacatgctctagagaggggccgagattacgaaaaaaataaagtgtgtaaagaattttcgcaccttgggaaggaagacttcaccagcctatctttagttctgtattctaggaagttccccagcggtacttttgagcaagtgtctcagttagtcaaggaggtagtctcccttaccgaggcatgttgcgccgagggtgcagatccagattgctatgatactcgcacatcagccctgagtgcaaaatcttgtgagagcaatagcccctttcctgtgcacccaggtaccgcagaatgctgcaccaaagaaggactggagaggaaactgtgcatggcggccctgaaacaccagccccaagagtttccaacctatgttgaacctacaaacgacgaaatctgcgaggctttcagaaaggacccgaaggagtatgctaatcagtttatgtgggagtattccacaaattacggccaggccccgctgagtctgttggtctcttacacgaagagctatctttccatggttggatcttgttgcacttcagcaagtcccacggtctgttttctgaaggaacggctgcagctgaaacatttaagtctcctcaccacgctgagtaacagagtttgttcacagtacgccgcttatggcgaaaaaaagagcaggctcagtaatctaattaaactggcacaaaaggtcccaacggctgatctggaagacgtgctgcctctggctgaagatatcaccaatattttgtcaaaatgctgcgagtcggcttcagaggattgtatggccaaagaactgcctgaacacactgtgaagctgtgcgataatctctccactaagaatagcaaattcgaggactgctgccaggagaaaaccgctatggacgtgtttgtatgcacctactttatgcctgccgcacaattgcccgagctgcccgacgtggagttacccacaaacaaggacgtgtgcgatcccggaaacacaaaggtcatggacaaatacactttcgagttatctcgcagaacacacctgcccgaggtatttctatcgaaggttttggaaccgactcttaaaagcttaggcgagtgctgcgacgtcgaggacagcacaacctgctttaacgcaaaaggtccacttctcaaaaaagagctgtcttcctttatagacaaagggcaagaactatgtgccgactactccgagaacacattcaccgagtataaaaaaaagcttgcggagcggctgaaggccaaactaccggatgccactccgactgagctggccaagttggtgaataaacatagcgatttcgcgtccaactgttgctcgatcaacagcccgccactgtattgcgacagcgaaatagatgctgagctgaagaatatcctgtag

SEQ ID NO: 189867 - DNA, 669 bp, synthetic construct
  misc_feature 1..669: note = Description of Artificial Sequence: Synthetic coding sequence
  source 1..669: mol_type = other DNA
atggccgccagcgtgcggcaggcccggagcctgctgggcgtggccgccactcttgcccccgggtctagaggatatagggccaggccaccaccaaggaggcgcccaggaccccgatggcctgatcctgaagaccttctgaccccacggtggcagctcggcccaagatacgctgccaagcagtttgcccgctacggcgctgcctctggggtggtccccgggtctctatggccttcccccgaacagttgcgggaacttgaagccgaggagcgcgagtggtatccgtcccttgctacgatgcaggaatcactgagggtgaaacagctggccgaggagcagaaacgtcgtgagcgcgaacagcatatcgctgagtgtatggccaagatgccacagatgatcgtgaactggcaacagcagcaaagagagaactgggagaaggctcaagcggataaggaacgacgggcaagactgcaggcagaagcccaggagctgctggggtaccaggtagatcccagaagcgcacgctttcaggaactgttacaggacctggaaaagaaggagaggaagcgcctgaaagaggaaaagcaaaagcggaaaaaggaggctagagccgcggcactcgctgccgcagtggctcaggacccagctgcctcaggagcacccagttcctag

SEQ ID NO: 189868 - DNA, 1038 bp, synthetic construct
  misc_feature 1..1038: note = Description of Artificial Sequence: Synthetic coding sequence
  source 1..1038: mol_type = other DNA
atggtggccgccctgctgggcggcggcggcgaggcccggggcggcaccgttccaggggcctggctgtgccttatggcactactgcagctgctgggatctgccccacgggggtctggactggcccacggcagacggctgatctgctggcaagcgctcctgcagtgccagggcgagccggaatgttcatacgcatacaatcagtacgccgaggcttgcgcacctgtgttagcacagcatggcgggggggacgccccgggcgccgcagctgcagcgttccctgcatccgctgcatccttttcctcccggtggcgctgcccatctcactgtatctcagccctcattcagctaaatcacacaaggcgtggccctgcactggaggattgtgactgtgcccaagacgaaaactgtaagagcacaaagagagccatagaaccttgtcttcctcgaacaagcggcggcggtgccggggggccaggtgccggcggtgtcatggggtgcacggaggcccggagacggtgtgatagggacagtagatgcaatctggccctgtcacgctatctgacatactgcggcaaagttttcaatggtctgcgctgtacagacgaatgccgcactgttatcgaagatatgttggccatgccgaaagccgctctgttgaacgactgtgtgtgcgacgggctggaacggccgatctgtgagtccgtgaaggagaatatggcacggttatgtttcggcgcagaactgggtaatggccccggctcgtctggctccgatggcggtctcgatgactactacgatgaggattacgacgatgaacagcggacgggaggtgccggcggggaacagcccttagacgatgacgatggggttccacatcccccacgaccagggtccggggctgccgcttccggcggccgtggcgaccttccatacggaccaggacggcggagcagcggaggaggcggtagattggccccccgcggcgcatggacacccctcgcttctatcttactgcttctgctggggcctttattctag

SEQ ID NO: 189869 - DNA, 942 bp, synthetic construct
  misc_feature 1..942: note = Description of Artificial Sequence: Synthetic coding sequence
  source 1..942: mol_type = other DNA
atgtgcaccgccctgagccccaaggtgcggagcggccccggcctgtcagacatgcaccagtactcccaatggcttgctagtagacatgaggccaacctgctgcccatgaaggaggacttggcactgtggcttaccaacctgttaggtaaggaaatcacagcagaaacattcatggaaaaattggacaacggagccctgttgtgtcaattagcagagacaatgcaagagaagttcaaggagtccatggatgccaacaagcctaccaaaaaccttccattgaaaaaaattccctgcaagacatcggcgccttctgggagtttctttgccagagataacaccgcaaatttcctgagttggtgcagggatctcggtgttgacgaaacgtgcctgtttgaaagcgaagggctggtactgcacaagcagccccgtgaggtttgcttatgcttgttggaattgggaaggatagctgccaggtacggcgttgagcctccaggcttaatcaagctggaaaaggagattgaacaggaagaaactctgagtgctccttctccaagtccctcaccctcgtctaagtcttctggcaagaagtctacaggtaatttgttggatgatgctgttaaacggataagtgaagaccctccatgcaagtgtccaaataagttctgcgtcgagcgattgtcgcagggacggtaccgtgtgggagaaaaaatacttttcatacggatgctgcataataaacacgttatggtgcgcgttggagggggatgggaaacttttgccggttacctcctgaagcacgatccttgtcgaatgctccagattagccgcgtagacggaaagacctctcccatccagtctaagtccccaacactcaaggatatgaatcctgataattacctggttgtgtctgccagctacaaagccaagaaagaaatcaagtag

SEQ ID NO: 189870 - DNA, 942 bp, synthetic construct
  misc_feature 1..942: note = Description of Artificial Sequence: Synthetic coding sequence
  source 1..942: mol_type = other DNA
atgtgcaccgccctgagccccaaggtgcggagcggccccggcctgtccgatatgcaccagtactctcaatggctagcctctagacatgaggcaaaccttctgcctatgaaggaggatctggccctgtggcttaccaacttattaggcaaggaaatcacagcagagacctttatggaaaagctggataacggcgccttgctctgccagctggccgaaactatgcaggagaagtttaaggaatctatggacgctaacaagccaacaaaaaatctgcccctaaaaaagattccctgcaagacctcggcccccagcgggtcctttttcgcccgggataacactgccaatttcctgagttggtgtagagatcttggtgttgacgagacctgtttattcgagtccgagggcctcgtgcttcacaagcagcctcgagaagtgtgtctgtgcttgctggagctaggccggattgccgcccgttacggtgttgaaccaccagggttgatcaaactcgaaaaggagatcgagcaggaggagactctgtcagcaccatcaccttccccctcaccctcttctaaaagtagcggcaaaaagtccacagggaatctcctggatgacgcggtaaaaagaatttccgaggatcccccatgtaagtgtcccaataagttctgtgtggagcgactctcgcagggacggtaccgcgttggagaaaaaatcttgttcattaggatgctgcacaacaaacacgtgatggtaagggttggaggcggatgggagacgtttgctggatacttgctcaagcatgatccctgccgcatgctacagatctctagagttgacggtaaaacatccccaatccagtccaaaagccctactctaaaggacatgaatccagataactatcttgtggtttctgccagctataaagcgaaaaaggaaattaaatag

SEQ ID NO: 189871 - DNA, 942 bp, synthetic construct
  misc_feature 1..942: note = Description of Artificial Sequence: Synthetic coding sequence
  source 1..942: mol_type = other DNA
atgtgcaccgccctgagccccaaggtgcggagcggccccggcctgtctgacatgcaccagtactcccagtggctggcctctcgccacgaagctaacttgcttcctatgaaggaagatctggcattatggctgaccaacctgctgggcaaggaaataaccgctgagacctttatggagaaactcgataatggcgccctgctatgccagctggctgaaaccatgcaggaaaagtttaaggagtctatggatgccaacaaaccaaccaaaaatcttccgctgaaaaagattccttgtaagacctccgccccgagcgggtctttctttgcccgagataatacggccaactttctgtcctggtgtagagatcttggagtagacgaaacttgcctgtttgaaagcgaggggcttgtgctgcataagcagccacgcgaggtctgtctgtgcctgctggagcttggaaggatcgccgccagatacggagtagaacccccaggactgatcaagctcgagaaagaaatagagcaggaggaaactttatcagctccaagcccatcaccatcacctagctcaaagtcctctggcaaaaagtccaccggcaacctgcttgacgatgcagtgaaaaggatctctgaggatccaccatgcaaatgcccaaacaagttttgcgtcgaacggctttcacaaggacgctatagagttggtgaaaagatcctcttcattaggatgctgcataataaacacgtaatggtgagggtgggaggcggatgggagacctttgccggttatctcctgaagcacgacccttgccggatgctccagatcagtagggttgatggtaaaaccagcccaatccaatccaagtctcccaccctcaaagacatgaacccagacaactatttggtggtcagcgcttcttacaaggccaagaaggaaattaaatag

SEQ ID NO: 189872 - DNA, 546 bp, synthetic construct
  misc_feature 1..546: note = Description of Artificial Sequence: Synthetic coding sequence
  source 1..546: mol_type = other DNA
atgtgcaccgccctgagccccaaggtgcggagcggccccggcctgagtgacatgcaccagtatagtcagtggctcgctagtagacacgaggcaaatcttttgcctatgaaagaggatctcgcattgtggttaaccaacctgctgggtaaggaaataaccgctgaaacctttatggagaagctggacaatggtgcgctcctctgtcagctggccgaaacaatgcaggaaaaatttaaggagtcaatggacgccaacaaacctacaaaaaacctgccactgaagaagataccctgtaaaacctctgccccatcaggatcctttttcgcaagagacaacacagcaaactttctgtcttggtgtagagatctcggagtggacgagacttgcctattcgagagtgagggcctcgtcctacacaaacagcctcgcgaagtatgcctgtgcctgttggaattgggcagaattgccgcgcgatacggcgtggagccgcccggcctgataaagcttgaaaaggaaattgagcaggaagagacactttccgcgtag

SEQ ID NO: 189873 - DNA, 618 bp, synthetic construct
  misc_feature 1..618: note = Description of Artificial Sequence: Synthetic coding sequence
  source 1..618: mol_type = other DNA
atgtgcaccgccctgagccccaaggtgcggagcggccccggcctgagtgacatgcatcaatacagccaatggctagcttctagacatgaagccaacctcctcccaatgaaagaagatctggcactctggctcactaatctcctggggaaagagatcactgccgagacatttatggagaagctggacaatggcgctttactatgccagttggcagagactatgcaggagaaatttaaagagagtatggacgcgaataaacccaccaaaaaccttcccctcaagaaaattccctgcaagacctctgcgcctagcgggagtttcttcgccagggacaacacagctaatttcctaagctggtgtagagaccttggggtcgatgagacatgcttattcgagtctgaggggctggtgctgcataaacagccgcgggaggtttgcctttgtttgttggaactcggtcggatcgccgcacggtatggagtcgaaccccctgggctcataaagctggaaaaagagattgagcaggaagagactctgtctgcaccaagtccctcgccttccccttcttctaagtcctcaggcaagaagagtacagggaacttgctagacgatgcctag

SEQ ID NO: 189874 - DNA, 411 bp, synthetic construct
  misc_feature 1..411: note = Description of Artificial Sequence: Synthetic coding sequence
  source 1..411: mol_type = other DNA
atgtgcaccgccctgagccccaaggtgcggagcggccccggcctgtccgatatgcaccagtactcccagtggctggctagtcgtcacgaggcaaacctgcttccgatgaaggaggatctggccctgtggctcactaatctgttgggaaaggaaataaccgctgagaccttcatggagaagctggacaacggagccttgctttgtcagctagcagagactatgcaggagaaattcaaagagagcatggatgctaacaagcccactaagaatctccccctcaaaaagattccctgtaagactagcgcgccatctggatcttttttcgctagagacaacactgcgaacttcctgtcttggtgtagggatctcggggtcgacgaaacctgtctgtttgagtctgaaggcctgtag

SEQ ID NO: 189875 - DNA, 468 bp, synthetic construct
  misc_feature 1..468: note = Description of Artificial Sequence: Synthetic coding sequence
  source 1..468: mol_type = other DNA
atgtgcaccgccctgagccccaaggtgcggagcggccccggcctgtcagacatgcatcagtattctcagtggctggcaagccgccatgaagctaatctgttaccaatgaaggaggatctggccctgtggctgacgaatcttctcggcaaggagattacagcggaaactttcatggaaaaactagataacggcgcccttctgtgccagctcgcggagacaatgcaggagaaatttaaagagagcatggatgcgaataaacctactaaaaacctccccctcaagaaaattccttgtaaaacaagtgcaccgagcggcagcttttttgctagagataataccgctaactttttatcgtggtgccgagatctcggcgttgacgaaacttgtctgttcgagagcgaagggcttgtccttcataagcaaccccgtgaagtttgcctgtgcctgctggagctgggccgcatctag

SEQ ID NO: 189876 - DNA, 2043 bp, synthetic construct
  misc_feature 1..2043: note = Description of Artificial Sequence: Synthetic coding sequence
  source 1..2043: mol_type = other DNA
atggccgaccccgtggccggcatcgccggcagcgccgccaagagcgtccggccctttcgctctagtgaggcctacgtcgaagctatgaaggaggatctcgctgaatggctgaatgccctctacggattgggtctgcccgggggcggcgacggcttcttgaccggcctggccacagggacaaccctttgtcagcatgcaaacgcagtcaccgaggctgcgagagcgctggctgccgcgcgtccagctagaggcgttgcttttcaagctcattctgtggtgcccggcagctttatggcaagggacaacgtagccacatttatcggatggtgtcgcgtagaacttggagtccccgaagttttgatgtttgagactgaagatctggtgttgcgtaaaaatgaaaaatccgtggtgctctgcctactggaagttgctagacgcggcgctcgcttggggcttcttgcacccagacttgttcaattcgaacaggagatcgagcgcgaactgagagccgcgccgccagctcctaacgcacccgccgctggagaagacacaactgagacagcaccagcacctggcacacctgcccgcggtcctagaatgaccccttccgatcttaggaaccttgatgagttagtgcgcgaaattttgggccgatgtacatgtcccgatcagtttcctatgataaaggtgtcagaagggaaataccgggtgggagacagcagcttacttatctttgttcgcgtcctgagaagccacgtcatggtccgtgtcggcggtgggtgggacacactagagcactacttggacaaacacgatccctgtcgatgttcttccacagcacataggcccccccagccgcgtgtgtgtacttttagcccacaacgggtgtcccccacaacaagtccacgccccgcatcgccagtccctggcagtgaaaggcgcggcagccggcctgagatgacccccgtgtccctgcggtccactaaggagggccccgagacccctccacgtccgcgggaccaactacctcctcacccacggtctcgaagatattcgggcgacagcgactcgagtgcctcaagcgcacagtctgggcctctggggactcggagtgatgacacagggactggcccgagaagagaacgaccctctcggcgactgaccacagggaccccggctagcccacgcagaccccctctccgaagccagtcccgagaccgtctcgaccgaggaagaccccgtggcgcacctggcgggcgtggggcccagctctccgtgccttcaccagcccgacgggccaggtctcagagccgcgaggagcaagccgtgctgctggtgagaagggaccgggatggccaacactcatgggtacccagagggaggggctcagggggaagcggacggtccacaccacagacaccccgcgcccgatctccggctgcgcctaggctgtcacgggtgtcatcaccatctccagagctggggaccacgcctgccagtatctttcggactcccctgcagttggatccccagcaggagcagcagctgtttcgtcgcctggaagaggagttcctcgcaaatgccagagctctggaggccgtggcttctgtgacgcccacagggcccgctcccgatccagcccgggcccctgatccaccggcacctgacagtgcctattgctcatcctcatcctcatctagttccctcagcgtcctgggcgggaagtgcggtcagccaggggatagcggccgcaccgccaacggattgccggggcctcggtctcaggctcttagctcatctagcgacgagggttcaccctgccccggaatggggggaccgctcgacgctcccgggagtccccttgcctgcaccgagccatctcgtacatgggcccgtggacgtatggacacgcagccagatcgcaagcctagtagaatccctacgccccgggggccccggcggccctctggccctgctgagctgggcacctggcacgctttgcactctgtgacgccgcgggccgagcctgactcgtggatgtag

SEQ ID NO: 189877 - DNA, 1014 bp, synthetic construct
  misc_feature 1..1014: note = Description of Artificial Sequence: Synthetic coding sequence
  source 1..1014: mol_type = other DNA
atggccgaccccgtggccggcatcgccggcagcgccgccaagagcgtacggcccttccgttcctcagaggcttacgtggaggcgatgaaggaagatctggccgagtggcttaacgcgctctacggcctcggtctgccaggagggggagacggcttcctaaccgggcttgccaccggcactacgctgtgccagcacgcaaatgcagtaaccgaagcagctagggcactggccgctgctaggcctgcaaggggtgttgcattccaggctcactccgtggtgccagggtcttttatggccagggacaatgtggcaacttttatcggatggtgcagagtagaattgggagttcccgaggttctgatgtttgaaactgaggaccttgtactgcgcaaaaatgaaaaaagcgttgtgctctgtctcctggaggtcgcacgacggggagcgcgccttggcttgctggccccgcgtttggtccaatttgagcaggaaatcgaacgggagctcagggccgcgccgcccgctccaaatgccccggcggccggggaagacaccacggaaaccgctcccgcacccggaactccagccaggggtccgaggatgacccctagtgatctccggaacctagatgaactcgtgagagagattttggggcgctgcacctgcccggaccaatttcctatgataaaagtcagcgagggcaagtaccgggtcggcgattctagcttgttaatatttgtgcgcgtcctgaggtcccacgtgatggtccgcgtgggaggtggctgggatactctggaacactacctggacaaacatgatccttgcagatgctcaagcactgcccaccgccccccgcaaccaagagtttgtaccttcagtccccagcgtgtttctcccacgaccagccctagacccgcctctcctgttcctggtagtgagcgccggggctcacgtccggaaatgaccccagtgagtctgcgcagcaccaaagaggggcccgaaaccccacctcgatag

SEQ ID NO: 189878 - DNA, 990 bp, synthetic construct
  misc_feature 1..990: note = Description of Artificial Sequence: Synthetic coding sequence
  source 1..990: mol_type = other DNA
atggccgaccccgtggccggcatcgccggcagcgccgccaagagcgttagaccttttcggtcatccgaggcttacgttgaagccatgaaggaagacctcgccgagtggctgaacgctctctatggcctcggcctcccaggcgggggggatggcttccttaccggtctcgccaccggcactaccctgtgccagcatgctaatgctgtcacagaagctgctagggcactagctgccgcccggcccgcaaggggggtcgctttccaggctcattcagtggtgcctggctcgttcatggctcgcgataatgtagccaccttcatcggctggtgtcgcgtggaattgggcgtccccgaagtgctgatgtttgaaactgaagatctggtccttaggaaaaacgagaaatccgtggtgctgtgtctcctagaggtggcccggcgaggagctcggctggggctgctggcaccgagactggtccaattcgaacaggagattgaaagggaattacgggcggccccacccgccccgaacgcgccggcggccggcgaggacaccacagaaacggctcccgccccgggaacgcctgcccggggcccgcggatgactcccagtgacctgcgaaacctggatgagctggtacgggagatcttgggacggtgtacttgtccggatcagttccccatgattaaggtatctgaggggaagtacagagtaggtgattcctcattactgattttcgttcgggtactccgcagccatgtgatggtcagagtcgggggcggctgggacactttagagcactacctggacaagcacgatccatgcaggtgctccagcaccggccctggaatctcatgtcctcctatcccagccccagctgctacacctggaacagtcacaccacagccaccaccaccgcgcgccgcgccgctggtgcccgccgtgatgactcaggctctggccccaggcggctccgacccggcaggcggctag

SEQ ID NO: 189879 - DNA, 1614 bp, synthetic construct
  misc_feature 1..1614: note = Description of Artificial Sequence: Synthetic coding sequence
  source 1..1614: mol_type = other DNA
atggccgaccccgtggccggcatcgccggcagcgccgccaagagcgtacgtccgttccggagttccgaggcatacgtggaggccatgaaagaagatttagctgagtggctgaatgccttgtacggcctgggcttgcctggcggaggcgacgggtttcttacgggcctggctactggcaccacactctgtcagcatgccaatgccgtcaccgaggccgcccgcgcgcttgcagcagcaaggcctgcccgcggtgtcgcgttccaggctcacagtgtagtacctgggagctttatggcacgggataacgtggccacattcatcggctggtgcagagtggaactgggggttccagaggtgctgatgtttgaaactgaggatctggtactgaggaaaaacgaaaagtccgtcgtgctgtgtctgcttgaggtcgctcgacgaggagccagactgggacttctggcccccagattggtacagtttgaacaggaaattgagagagaactgcgcgcggcaccaccggccccaaacgctcccgccgcaggagaggacacaactgagaccgctcccgcacccggtacacctgcacgggggcctagaatgaccccatctgatcttcggaatctggacgaactggtgagagaaattctcggccgatgcacctgccctgaccagtttcctatgattaaggtgtctgagggcaagtatcgcgtcggcgatagtagcttactgattttcgtccgggtgttgagaagccatgtgatggtgagagtaggcggggggtgggacacactggaacactacctggataagcacgacccttgccgctgctcgtctactgcccatcggccgccccagcctcgggtatgcacgttttccccccaaagggtgagcccaaccaccagcccacgcccagcctctcctgttcccggtagcgaaagacggggaagccgaccagagatgactcccgtttcgctccgttccacgaaagagggacctgaaacaccacctcgccccagggaccagcttcccccacatcctaggtcccggcgctattccggcgactctgattctagtgcgtcatcagcacagagcggtccactggggactagatcagacgatacagggactggtccccggcgggagagaccttctcggagactgacgaccggaacaccagcatcccctagacgaccccccgcctgtgcagccagtcctgagacaggctggatcgctgctgggcccggcgggccccaggaggccggcgagccgagttgcaggtccccggccctgcctggaggcccgggagctagggcagctcggtcgagactgtgttgcctgtgcgctggtatcgagacgggcagtactcacgggtgtcaaggggccggtgccgtcggggccagagccggcgcgcccccaaggctacccgtgccagcggctcttcagcatcccggattccccggttcacccgcacccgtgcagtcttgggccccacacaggcccgcgtctagcgctcatccttgcagctccaccagatcaagaagttcttcatgctccggggcttggaaaagatcatcatggccaatgcctggtccactacgactactgctggcttag

SEQ ID NO: 189880 - DNA, 1614 bp, synthetic construct
  misc_feature 1..1614: note = Description of Artificial Sequence: Synthetic coding sequence
  source 1..1614: mol_type = other DNA
atggccgaccccgtggccggcatcgccggcagcgccgccaagagcgtgcgtccttttcggagcagtgaagcttacgttgaagccatgaaagaggatctagctgagtggctcaatgctctctacggcctggggctgcctggcggaggcgacggtttcctgaccgggttagctactggcacaactctgtgccagcatgcaaatgccgtgacagaggctgcccgtgcgcttgcagcggcacgaccagcgaggggtgtggcgttccaggcccacagtgtcgtgcccggctcattcatggccagggataatgtggcaaccttcataggctggtgcagagtggaacttggtgttcctgaagttctgatgtttgagacggaagacttggtgttgcgcaaaaacgaaaaatctgttgtactgtgcctgttggaggtggcaagaaggggagccagactggggttgcttgcaccacgccttgtgcagtttgaacaggaaattgaaagagagctgagggcggcgccaccggcaccgaatgctcccgccgctggcgaagacacaaccgaaaccgctccagctccgggcaccccggcaagaggcccacggatgacaccgtccgatctacgaaacctggacgagctagtgcgtgagatcctgggaaggtgcacttgccctgatcaattccccatgatcaaggtcagtgagggcaagtacagagtcggcgactcctctctgctgattttcgtgcgggtgcttcgttctcatgtcatggtgagagtgggaggcggctgggatactctcgagcattatctcgataagcatgatccctgtaggtgttctagtaccgcacaccgacctccacagccccgtgtctgcacattttcccctcagagagtcagtcctacaacctcaccccggccagcaagccccgtgccagggtccgaacggagaggctctcgtcccgagatgacccctgtgagcttgaggtccactaaggagggccctgagacccccccccgcccacgggatcaactgccaccccacccccgtagcaggcgctattccggcgactctgactctagcgcaagtagcgctcagagcggtccattagggacgcgcagtgatgacaccggaacaggacccagaagagaacgtcctagcaggagactaaccactggaaccccagcttctccacggcgtccccccgcttgtgctgcctctcctgagacgggctggatagccgctggtcccggcgggccgcaggaggcaggtgaaccttcctgccgaagcccggccctgcccggcggtccaggagcaagggccgctcgctcacgtctctgctgtctatgcgccggaatagaaacgggatcgacacatgggtgtcaaggggcaggggcagtgggcgcaagagcgggggcacccccacggctcccggtgcccgccgcattgcaacatcctggatttcccgggtctcccgctccagtccaatcatgggccccccaccggcctgcctccagcgcccatccgtgcagctctaccaggagtagatcatcatcctgttccggcgcctggaaacgctcgtcttggccgatgcccggccccctgcggttattgcttgcgtag

SEQ ID NO: 189881 - DNA, 1614 bp, synthetic construct
  misc_feature 1..1614: note = Description of Artificial Sequence: Synthetic coding sequence
  source 1..1614: mol_type = other DNA
atggccgaccccgtggccggcatcgccggcagcgccgccaagagcgttcgcccattcagatcttctgaggcctacgtcgaggccatgaaggaagatctggctgagtggctgaacgctctgtacggccttgggctgcccggcggaggagatggttttttaaccgggctggctacggggacgacactctgccagcatgcgaacgctgtgaccgaggctgcccgggccttagccgccgcaaggcctgctaggggcgtcgcttttcaggcccatagcgtcgttccagggagttttatggccagagacaatgtggcaactttcatcggatggtgtcgcgtggagctcggggtacctgaggtactcatgtttgagactgaggacctggttcttagaaaaaatgagaagtcggtggttctatgcctgctggaggtcgcccggcgaggtgccagactgggtctgcttgccccccggctggttcaatttgagcaggagatcgagcgggaactgcgggctgcaccccccgctcccaacgcccccgctgccggtgaggacacgaccgagaccgcacccgcaccagggactccagcccgaggccccaggatgacaccatctgacctccggaacctcgacgagctcgttcgggaaatactgggacgatgcacatgccctgatcaattccctatgatcaaggtgtcagaggggaagtaccgtgtcggggacagcagcctcctaattttcgtgagggtgctgaggtcccatgtgatggtgagggtcggtggaggctgggacactctcgaacactacctcgacaagcatgatccctgtaggtgcagctcaactgctcacaggcctcctcaaccccgtgtgtgcacattctccccacaaagagtatccccaacaactagccctcgtccagcttccccagtgccaggcagtgaaagacgcgggtctcgcccagaaatgactccagtctccctgaggagcaccaaggagggaccagaaactccacccaggcccagagatcagctccccccccaccctaggtcacggcgttatagcggagactctgactctagcgcaagtagcgcacagagcggccccctaggcactcgaagcgacgataccggcaccgggcccagaagagaaagacctagccgcagacttactaccggcacgccagcatcaccccgtaggcctcccgcatgcgccgcgtctcctgaaaccggatggatcgccgccgggccaggaggcccacaggaggccggggaaccatcatgcagaagtcccgctctccccggaggacctggagctcgcgcagcaagaagcagattgtgctgtctatgcgctggtattgagaccgggagcacacatggctgccaaggcgcgggggcagtgggagccagggcgggcgctccacctcgactgcccgtgccagctgcactgcagcacccaggattcccagggtcacctgcacccgtgcaaagctgggctcctcatagaccagcctcatcagcacacccatgttcttccacaagaagcagaagtagctcttgctctggtgcttggaagcggtccagttggcccatgccgggcccactccggttactgctcgcatag

SEQ ID NO: 189882 - DNA, 417 bp, synthetic construct
  misc_feature 1..417: note = Description of Artificial Sequence: Synthetic coding sequence
  source 1..417: mol_type = other DNA
atggccgaccccgtggccggcatcgccggcagcgccgccaagagcgtaaggccattccgctcatccgaagcctatgtggaagcgatgaaagaggatctggccgagtggctcaatgccctttacgggcttgggctcccgggcggcggtgatggtttccttacagggctggctaccgggacaactctctgtcagcatgccaacgcagttaccgaagcagcacgcgcccttgcggctgcacggcctgcgaggggcgtcgccttccaggcccatagtgtcgtcccggggagtttcatggcccgcgataacgtcgctacattcatcggctggtgtagggtggagctgggggtccccgaggttttgatgtttgaaacagaggatctggtgctccggaagaacgaaaagtctgtggttctctag

SEQ ID NO: 189883 - DNA, 432 bp, synthetic construct
  misc_feature 1..432: note = Description of Artificial Sequence: Synthetic coding sequence
  source 1..432: mol_type = other DNA
atggccgaccccgtggccggcatcgccggcagcgccgccaagagcgtgcgcccgtttcgatccagcgaagcctatgttgaggctatgaaagaagacctcgcagagtggctgaatgctctgtacggactgggactcccaggcggcggggacgggttcttgacaggattagctaccggcacaaccttgtgtcagcacgctaatgccgtcaccgaggcggctagggccctagctgcagctagacctgcaagaggcgtcgcttttcaggcgcacagtgtggtcccgggctctttcatggcccgcgacaatgtcgcaacatttatcggctggtgccgtgttgaactgggggtacccgaggttctaatgttcgagaccgaagacctcgtgctgcgtaagaacgagaaaagtgttgtgctctgcttactagaagtgtag

SEQ ID NO: 189884 - DNA, 1614 bp, synthetic construct
  misc_feature 1..1614: note = Description of Artificial Sequence: Synthetic coding sequence
  source 1..1614: mol_type = other DNA
atggccgaccccgtggccggcatcgccggcagcgccgccaagagcgtgcgaccttttagaagctccgaagcttacgttgaggcgatgaaagaggatctggccgaatggttgaacgcgctctatgggctcggtctgccaggcgggggggatggattcctaaccggcctggccaccgggacaaccctgtgtcaacacgccaacgcagtgaccgaagctgcgcgcgcattggcagcagcccgccctgccaggggcgtggccttccaggcccattccgttgtaccaggcagctttatggcacgcgacaacgtggccaccttcataggatggtgccgcgtggaactgggtgtccctgaggtcttgatgttcgagaccgaagatctggtgctgcgcaagaatgagaagagcgttgttctatgccttcttgaagtagcccgccggggtgcacggctgggtctgttggctcctagactggtgcagttcgagcaggagatcgaacgagagctccgcgctgctccgccagcccctaatgccccagcagcgggggaagacacgacagagactgctccagcccccgggacaccagcccggggacctagaatgactccttctgatttacgcaatttagatgagctagtgcgggagatcttaggcagatgcacctgtccggaccagtttcctatgattaaggtgtccgagggaaaatatagagtgggagatagctccctgctaatctttgtgcgcgtattgaggtcccacgtcatggtgcgcgtgggtggaggatgggatactttggagcattacctagacaaacatgacccctgccggtgcagctcgaccgcccatcgtcctccacaacccagagtctgtactttctccccccagagagtgtctccgacgacttctccccgaccggcaagcccagtgcctgggtcagagcggagaggatcccgccccgagatgacacccgtcagcttgaggagcacaaaggagggtccagaaacgcccccaaggccgagggaccagttgcctccccatcctcgtagccgtaggtacagcggtgattccgacagttctgcctcttcggcgcaaagcggccctcttggaacacggagcgatgacacaggaaccggccccagaagggagcgtccgtctaggcgtctgacaaccgggacgcccgcctcccccaggcgtcccccggcttgcgccgcaagcccagagacagggtggatcgcagctggtcccggagggccgcaagaagccggagaaccatcttgccggagccccgcgctgcccggagggcccggtgctcgggctgccaggagccggctttgttgtttgtgtgctggaatcgaaactggcagcactcacggatgtcagggcgctggtgcggtcggtgcccgtgccggtgcaccacctcgtctgccggtgcctgctgccctacagcatcccgggtttcctggctcgcccgcccccgtgcagtcctgggcgccccaccgtccagcgtcctcggcccatccatgtagtagcacacggtctagatcctcatcctgttcgggcgcatggaaacggtcatcatggcctatgcccggccccctgcggctgctcctggcttag

SEQ ID NO: 189885 - DNA, 2037 bp, synthetic construct
  misc_feature 1..2037: note = Description of Artificial Sequence: Synthetic coding sequence
  source 1..2037: mol_type = other DNA
atggcccccagcctgagccccggccccgccgccctgcggcgggccccacaactcttgctgctgctgctcgccgctgaatgtgctctggcagcgttactgccagcacgcgaggctacccagtttctacggccccggcagagacgagcctttcaggtgttcgaagaggcaaaacagggtcatctggagcgggagtgtgtggaggagctttgttccagagaggaggcacgcgaagtgttcgaaaacgaccctgagactgactacttctaccctcggtatctggattgcattaataagtatgggagcccctatacaaaaaatagcggattcgctacatgtgtgcagaacctccctgatcaatgtacaccaaatccctgtgataggaaaggcacacaagcatgccaggacctcatggggaattttttttgcctgtgtaaggctgggtggggaggacgcctgtgtgacaaggacgtaaacgagtgtagtcaagagaatggtggatgtctccagatttgtcataataagccaggttctttccactgctcttgtcacagcgggttcgaactgtcaagtgacggtagaacatgccaggacatcgacgagtgtgccgattccgaggcctgtggcgaagctaggtgtaaaaatctgcccggctcgtatagttgtctatgcgatgaaggctttgcctactccagtcaggagaaagcatgccgggacgttgatgaatgcttgcagggcaggtgcgagcaagtttgtgtcaatagtcccggcagttatacttgtcactgcgacggccgtgggggacttaagctgtctcaggatatggacacctgcgaagatatccttccatgcgtaccgttttctgttgcaaagtcagttaagtccctgtacctcggcagaatgttcagcggcaccccggtaatacgcctgcggttcaagcgactacaacctactagactcgtggcggaattcgacttccggacatttgaccccgaagggattcttctgtttgcaggaggacaccaggattccacctggattgtcctggcactgcgggcaggccggctggaacttcaattgcggtataatggagtgggtagggtcacatcatcgggtccagtgatcaaccatggcatgtggcagaccatttctgtggaggaactggcacggaacctggtgatcaaggtaaacagggatgccgttatgaagatcgctgtggctggggaccttttccagcctgaaagggggctctatcatctgaatctaaccgttggagggattcctttccacgagaaggacttggtgcaacctattaaccccagactggacggctgtatgagaagctggaattggcttaatggagaggataccactatccaggagaccgtgaaagtgaacacaagaatgcagtgttttagcgtgacagagcgcggctctttctatccaggatccgggttcgcattttacagtctggattatatgagaaccccactggacgtcgggaccgagagcacttgggaagtcgaagtcgttgcccacatcaggccggccgctgatactggagtgctgttcgcactgtgggccccagatctgcgcgcggtccctctgtccgtcgctttggtggactaccatagtaccaagaaattgaaaaaacaactcgtggtgttggctgtggagcataccgccctggcgttgatggagatcaaggtgtgcgatgggcaggagcatgtggttaccgtgtcactgcgcgatggagaggcaactctcgaagtcgacggcaccaggggtcagtctgaggtttctgctgcccagctccaggagcgcctggctgtgctagaaaggcatctgcggtctcccgtgctgacctttgcggggggtctgccagatgtcccagtgaccagcgcaccagtaacagccttctataggggctgtatgacactggaagtgaatcggaggctgctggacctggatgaagctgcttacaaacactccgacatcactgcacactcttgtccacctgttgagcctgccgcagcttag

SEQ ID NO: 189886 - DNA, 1875 bp, synthetic construct
  misc_feature 1..1875: note = Description of Artificial Sequence: Synthetic coding sequence
  source 1..1875: mol_type = other DNA
atgtgcatgtgccaggccagccccccccccgccgccctggccggctgtctcctgtcctcctgcgtccagcctgcacgcgaacatggcggcgcgttcagcaaggctgaatggctctccaactgcataaacaagtacggtagcccctatactaaaaacagcgggttcgcaacctgtgtgcaaaacctgcctgaccagtgtacaccaaacccgtgtgaccggaaaggcacacaggcctgccaagacctcatgggaaacttcttctgtttatgtaaggcgggctggggaggccggctgtgcgacaaggacgtcaatgagtgtagtcaagaaaacggcggatgtctgcaaatctgtcataacaagccaggctctttccattgtagctgtcacagtgggtttgaactttcctccgatggcaggacatgccaggatattgacgagtgtgctgactccgaggcctgcggagaggcccgttgcaaaaacttacctggttcttactcctgcctctgcgatgagggttttgcatactcatcgcaggaaaaggcttgccgagacgttgacgagtgcttacaggggcggtgtgagcaggtatgcgtcaactctcccgggagctacacgtgccactgtgacggcaggggaggcctgaaactgtctcaggatatggacacatgtgaagacattctgccttgtgtacccttcagcgtggctaagtcggtcaaatccctttatcttgggagaatgttcagcggtacaccagtaatacgcctccggtttaagcggttacagcccacgcggctggttgcagagttcgattttcgaacattcgacccggaaggaattctgctgtttgctggaggtcaccaggactccacatggatcgtgctcgcgctccgcgcgggccgactagagctacagcttcgatataacggggtcggacgggtgaccagctccggcccggtcataaaccacggaatgtggcagactatcagtgtggaagaactagcccgaaaccttgttattaaggtgaacagagacgccgttatgaagatagcggttgctggagacctgtttcaacctgaaagaggcttgtaccatttgaacttgactgtggggggcataccgttccacgagaaagacctggtacagcccattaatccccgcctggatggctgtatgaggagctggaactggctgaacggcgaagacactacaatccaggaaaccgtcaaagtgaacacacgcatgcagtgcttcagcgtaacggaacgaggatcgttctatcctggatctggattcgccttttactcccttgattacatgcggacacctctggacgtgggtactgagtccacatgggaagtggaggtggtggcccatattcggccagctgccgacactggcgtgctgttcgcactgtgggcacccgacttgagagccgtccccctgtctgtcgccctggtggactatcatagcaccaagaagttgaagaagcagctagtggtgttggctgtggaacacaccgcactggccttgatggaaattaaagtctgcgacggccaagagcacgtcgtcacagtgtccttgcgagatggcgaagccaccttggaagttgacgggacccgtggccagtccgaggtgtctgccgcacagctgcaagaacggctcgctgtgcttgagcgacatctgcgtagtcccgtcctaacatttgccgggggacttccggatgttcctgtaacatcagcacccgttactgctttctacaggggatgtatgactctggaagtgaaccgacgtcttcttgacctggacgaggcagcatacaaacactccgacatcacagcgcactcttgcccgcctgtagaaccggccgcggcctag

SEQ ID NO: 189887 - DNA, 2166 bp, synthetic construct
  misc_feature 1..2166: note = Description of Artificial Sequence: Synthetic coding sequence
  source 1..2166: mol_type = other DNA
atggcccccagcctgagccccggccccgccgccctgcggcgggcccctcagctgcttctactgctactggctgcagagtgcgcactcgccgctttgctacccgcacgggaagccacccaattcctaagaccgcggcagcggcgtgcttttcaggttttcgaggaggctaaacagggacacctggagagagaatgtgtggaggagttgtgttctcgtgaggaggctcgcgaagtattcgaaaacgatccggagacagactacttttacccccgctacctggactgcatcaataaatatgggtcaccttacactaagaacagcggcttcgcgacctgtgtgcagaacctcccagatcagtgtacaccaaatccatgtgacagaaaaggcacgcaggcgtgtcaagatctcatgggtaactttttttgtctgtgtaaggctggttggggcggacgtttatgcgataaggatgtgaatgagtgttcccaggaaaatggtggatgcctccagatctgtcacaataaacccggctctttccattgttcttgtcactcaggtttcgagttatcctccgacggaaggacttgccaggatatcgatgaatgtgccgacagcgaggcgtgcggggaggctagatgtaaaaatctccccggctcgtactcttgtctgtgcgatgagggcttcgcatattcctcccaagaaaaggcatgcagagacgtggacgagtgtttgcaaggcagatgtgaacaggtatgcgtgaactcacctggctcttatacatgccattgtgacggacgcggcggtctcaagctgagccaggatatggatacatgcgagttggaagctggctggccactgcctaggcacaggagggatagcggcccggccgcgcgcccaggacgcggagcccagggctcacgaagcgaaggccatattccagacagacgagggccccggccctggcaggatattctgccctgcgtgccattcagcgtggctaaatctgtgaagagtctatacctgggccggatgttttccggtacccccgtgattaggttgagatttaaacgcttacagcccaccaggcttgtggctgagtttgactttaggactttcgatcctgagggtatcctcctcttcgcaggggggcatcaggactccacgtggatagtacttgcactgcgcgccggtcgcctagaattgcaactcaggtacaatggtgtcggacgcgtgacatcctcaggtcccgtcatcaatcacgggatgtggcagaccattagcgtggaagaattggcccggaacctagttatcaaagtgaatagggatgcagtgatgaagatagcagtggctggagacctgttccagcctgaacgcggactttaccacctgaatctgaccgtgggagggatccctttccacgaaaaggatttggtccagccgatcaacccacgactggatggctgcatgaggagttggaattggctcaacggggaagacaccaccattcaggaaaccgtcaaagtgaacacacgtatgcagtgtttttccgtcaccgagagagggtcgttctatcccggtagtggattcgcattctatagcctggactacatgcgcacccccctcgatgtgggaaccgagagcacatgggaggtggaggtggtggcccacatccggccagcagccgacactggtgtgctgtttgccctctgggccccagatctgcgcgctgtacctctttccgtggcgctcgtagattaccactccacaaagaagctgaagaaacagctcgttgttctggccgtagagcataccgctctggcgttaatggaaattaaggtttgtgatggccaggagcatgtggtaacagtgagccttcgtgatggagaggcaacactggaagtagatggcactagaggccagtccgaggtgagtgcggcacagttgcaagagaggctcgcggttcttgagcggcacttgcgatcccctgtgctgacgttcgctggaggcttgcccgacgtacccgtcacatcggcacccgttacagccttctacaggggctgcatgaccctggaagtgaaccgcaggcttctcgatctggatgaagccgcgtataagcatagcgacatcaccgctcactcttgcccccctgtggaaccggcagctgcctag

SEQ ID NO: 189888 - DNA, 1140 bp, synthetic construct
  misc_feature 1..1140: note = Description of Artificial Sequence: Synthetic coding sequence
  source 1..1140: mol_type = other DNA
atgttcagcggcacccccgtgatccggctgcggttcaagcggctgcagcccacaagactggtggccgagtttgattttaggacatttgatccggaagggatcctgctgtttgccgggggccatcaggactctacatggatcgtgctggccctgcgcgccggccgattagaactccagttgagatacaacggcgtgggacgggtcacctccagtgggccagtgattaatcatggcatgtggcagactatatctgtcgaggagctggctcggaatctggtgatcaaggttaacagagatgcagtgatgaagatcgccgttgccggcgaccttttccagccggagagagggctgtaccatctgaacctcacagttggtggaattccatttcacgaaaaggacctggtacagcccatcaatcctcgactcgacgggtgcatgagatcttggaactggttgaacggggaggatactacgattcaggaaaccgtcaaggtaaatacaaggatgcagtgtttcagcgttacagagcgcggtagtttctaccctggatctggatttgctttttattccctagattacatgcgcacaccccttgatgtgggaacggaaagtacctgggaggttgaagtggtcgcacacatcaggcccgcagccgataccggtgtcttgtttgccctgtgggcacccgacttacgcgcagtgcccctgtccgtcgcactggtagactatcactccacaaagaaattgaagaaacagctcgtggtgctggcagtggaacacacagctcttgcactgatggaaataaaagtttgtgacggtcaagaacacgtggtcactgtctcactccgcgatggggaggcaaccctggaggtggatgggacgagaggccagagcgaggtctctgcggcccagctccaggagaggctagcagttttggaacggcaccttcgctcacccgtgttaacatttgccggtggactccctgacgtccctgtgacgagtgctcctgtaacagccttttaccgcggatgtatgaccctggaagtcaacaggagactgctggacttggatgaagctgcttataaacactcagacattacagcacacagctgccctccggtcgaacccgctgcagcatag

SEQ ID NO: 189889 - DNA, 1218 bp, synthetic construct
  misc_feature 1..1218: note = Description of Artificial Sequence: Synthetic coding sequence
  source 1..1218: mol_type = other DNA
atggacacctgcgaggacatcctgccctgcgtgcccttcagcgtggcaaagtcagtgaagagtctctatctgggacggatgttttctgggactcccgttatcaggctgcggtttaaaagactgcaaccgactaggctggtagcagaatttgacttcagaacattcgatcccgaaggaattctgttgtttgctggaggccaccaggacagcacttggatcgtactcgccctgagagccgggaggctagagctccagcttagatataacggggtagggagggtgacctcctcaggacccgtgatcaatcacggaatgtggcagacaatcagcgtggaggagcttgctagaaacctcgtgatcaaagtcaacagggacgctgtgatgaagatcgccgtagccggcgaccttttccagcctgaacgaggtctatatcacctgaatctgaccgtcggtggtattcccttccatgaaaaagatctggtccagccaatcaatccccgcctggatggctgtatgagatcctggaactggctaaatggcgaggacaccaccattcaggaaaccgtcaaggtgaatactaggatgcaatgttttagcgtcactgaacgcgggtccttttacccaggctctggattcgctttctattcactcgactacatgagaacccctctggatgtggggaccgagagtacatgggaagtcgaggttgtcgcacacattcgtcctgccgccgatacaggtgttctgttcgctctatgggcacccgacttgcgggctgtcccactgagcgtggctctggttgattaccactcaaccaagaaactcaagaagcagttagtggtgctggctgtggaacacaccgcattagcactgatggagatcaaagtctgcgacggtcaggagcacgtggtaaccgtgtccctgagagatggggaggctactctggaggtggacgggacacgagggcagtctgaggtgtctgccgcccagttacaagaaagactggccgtcctggaacggcatctgaggtcccccgtgctcactttcgccggggggctgccagacgtgcctgtgacctctgcccccgtgaccgcattttatcgaggatgtatgactcttgaggtgaatagacgcttgctggacttggacgaggcagcctataagcacagcgacataacagcccatagctgcccacccgtggagcctgctgccgcatag

SEQ ID NO: 189890 - DNA, 1431 bp, synthetic construct
  misc_feature 1..1431: note = Description of Artificial Sequence: Synthetic coding sequence
  source 1..1431: mol_type = other DNA
atgagcggcgcccggtgccggaccctgtaccccttcagcggcgagagacacggacaaggactgcgcttcgctgccggggagctcattaccttgctgcaagtgcccgacggcgggtggtgggaaggggagaaggaggatgggctccgaggatggttcccagctagttatgtgcagctgctagaaaagcctgggatggtaccgccaccaccaggggaagaatcccagaccgttatcctccccccagggtggcagtcttacctaagcccccagggtagaaggtactatgtcaataccacaacaaacgagactacttgggaacggcccagctcttccccaggaattcccgcatcgcctggctctcaccgctcttccctgccccccaccgtcaatggctatcacgcgtcgggaaccccagcgcaccctcccgaaactgcgcatatgtccgtccggaagtccaccggtgatagccaaaatctcgggtcgtcatctcccagcaaaaaacagagcaaggagaacaccattactatcaactgcgtcacgtttccacaccctgacacaatgcccgagcagcagttacttaagccaacagaatggagctattgtgattatttctgggctgataaaaaagacccccagggcaacggaacagttgctggcttcgagttactgcttcagaaacagctaaaaggaaagcagatgcagaaggaaatgtccgagttcattagagagaggatcaagatcgaggaagactatgctaagaaccttgcgaagctatcccagaactcactagctagccaggaggagggctccctgggcgaagcttgggctcaggtgaagaaatcactggccgacgaggccgaggtccatctcaagtttagcgccaagctccattccgaggtggaaaagccacttatgaatttccgtgagaatttcaagaaggatatgaagaagtgtgaccaccacatagccgacctgcggaaacagctggcatccaggtacgcctctgtggaaaaggctcggaaagccttaactgaaagacaaagggacttggaaatgaaaacccagcagctggaaataaagttgagcaataaaaccgaggaggacattaaaaaagcaagaaggaagagtacccaggccggcgatgacctgatgcgctgcgtggatctttacaaccaggcccagagcaagtggtttgaggagatggtaacgaccacacttgagctcgagcgcctggaggtcgagagagttgaaatgatacggcagcacctgtgccagtatacgcagctgcgtcacgaaacagacatgttcaaccagagcacagtggagcctgtggaccagttactgcgaaaggtagacccagctaaggaccgggaactctgggtaagggagcataaaaccgggaatattagacccgtcgacatggagatctag

SEQ ID NO: 189891 - DNA, 1251 bp, synthetic construct
  misc_feature 1..1251: note = Description of Artificial Sequence: Synthetic coding sequence
  source 1..1251: mol_type = other DNA
atgaagcccggcatggtgccccccccccccggcgaggagagccagacagtaatacttccgccggggtggcagagctatctaagtccccaaggccgacgatattatgtgaataccaccaccaacgaaactacctgggagcgcccaagttcaagccccggaatccccgccagcccaggaagtcaccggtccagcctgccaccaaccgtcaacggatatcacgcatccggaacccccgcacacccacctgagacagctcacatgtctgtacgcaagagcactggagactcccagaatttgggcagctctagcccatccaagaaacagtccaaggagaataccatcaccatcaactgtgtgacgtttcctcacccagatacgatgccagagcagcagctccttaaacccacagagtggtcttattgcgactacttctgggccgacaagaaagatccccagggcaatggcacagtagccggctttgagctgctgctccagaagcagctgaagggtaaacaaatgcagaaggaaatgtccgagttcattagagaacggatcaagattgaggaggattatgctaaaaatttagcaaaattgagccagaactctcttgcgtcccaggaggaaggctccctgggagaggcctgggcccaggtgaaaaaatccctggctgatgaggctgaggttcatctgaaattctcggctaaactgcatagtgaggtggagaaacctctcatgaactttagggagaacttcaaaaaagatatgaaaaaatgtgaccaccatatcgccgatctaaggaaacaattagcctccaggtacgcttctgtagaaaaagctcgcaaagcccttacagaaaggcaacgggatctagaaatgaaaacacaacagctggagataaaactgtctaacaagacggaggaggacataaaaaaggctcggaggaaatctacccaggccggcgatgacctgatgagatgcgtggacctttataaccaggcccagtccaaatggttcgaggaaatggttaccacaacactggagcttgagaggctcgaagtggagcgggtggagatgattaggcagcatctgtgccaatacacccagttacgacatgagaccgatatgttcaaccaaagcaccgttgaaccagttgaccagcttctgcgcaaagtagatccagccaaggacagagagctatgggtgcgtgaacataagacaggcaatatcaggccggtagatatggagatctag

SEQ ID NO: 189892 - DNA, 1011 bp, synthetic construct
  misc_feature 1..1011: note = Description of Artificial Sequence: Synthetic coding sequence
  source 1..1011: mol_type = other DNA
atgagcaacatggagaacagcttcgacgacgtgagctgcctgagccctcaaaacctgggatcctcatcacccagcaaaaaacaatctaaggagaacacgataaccatcaattgtgtaacattcccccacccagacaccatgcccgagcagcagctgttaaagccgacagaatggagttattgtgattacttttgggcagataaaaaggacccccaagggaacggcacggtggccggatttgaactgctgcttcagaagcaactcaaagggaagcagatgcaaaaggagatgtctgagttcattcgggaaagaattaagatcgaagaggactacgctaagaatctcgcaaagctttcacagaactccttagcttcccaggaggaagggtctctcggagaagcctgggcacaggtaaagaaatccctggcagatgaggcagaggtccacctcaagttttctgctaagctgcattccgaagtggaaaagccgctgatgaactttagggaaaacttcaaaaaagatatgaagaaatgcgaccatcacatagccgacctcaggaagcaactcgcatcgaggtacgccagcgtcgaaaaggcaaggaaagccttgacggagaggcagcgagatctggaaatgaaaacccagcagctggaaattaagctctctaataaaacggaagaggatatcaaaaaggctaggcggaaatctacacaggccggggacgacctgatgaggtgtgtggatttatataaccaagctcagagcaaatggtttgaagagatggtgacaacaacccttgagctggagagacttgaagtggaaagagtcgagatgatacgccagcacttatgtcaatacactcagttacgccacgagacagacatgttcaatcagtctaccgtagaacccgtcgatcaattattgaggaaggtggatcccgctaaggacagagagctctgggtccgagagcataagacgggaaacattcggccggttgacatggagatatag

SEQ ID NO: 189893 - DNA, 1248 bp, synthetic construct
  misc_feature 1..1248: note = Description of Artificial Sequence: Synthetic coding sequence
  source 1..1248: mol_type = other DNA
aagcccggcatggtgccccccccccccggcgaggagagccagaccgtgatcctgccacctggctggcagagctatctgtcaccacagggccgcagatattacgtaaacaccaccactaatgagacgacctgggaaagaccttcttcgagcccggggattcctgcatctcccggctctcatcggtcctctctacctccaaccgtgaatggctaccacgcctcaggtacacctgcccaccctcctgagacagcccatatgtccgtcagaaagagtacaggtgacagccaaaacctcggatcttcaagtccctcaaaaaagcagtcaaaggagaacacaatcacaatcaactgtgtgactttcccccaccctgataccatgcccgaacagcagctgctgaaacccaccgaatggtcctactgcgactacttctgggctgacaaaaaggatcctcagggcaacgggactgttgctggttttgagttgctcttgcaaaagcagctgaaggggaaacagatgcagaaagagatgagcgagttcattcgggaacgaattaaaatcgaggaggattacgctaaaaacctcgccaagctttcccagaattcacttgcgtctcaggaagaaggaagtctgggggaggcctgggcacaggtcaagaaatccttagccgacgaggctgaggtgcatctaaagttctctgccaaactgcactcggaagtggaaaaaccgctgatgaatttcagagagaactttaagaaggacatgaaaaaatgcgaccaccacatcgctgatctgagaaagcagctggcaagccggtacgcttccgtggagaaagcaagaaaggcgctaaccgaaaggcaaagagatctagagatgaagacacagcagttggaaatcaagctttccaacaagacagaagaagacatcaaaaaagcacgccgtaagagtactcaagcaggtgacgatctaatgaggtgtgtggacctgtacaatcaggcacagtctaagtggtttgaagaaatggtgacaacaacccttgaactcgagcggttagaagtcgagcgcgtggaaatgatcagacagcatctctgccagtacacccaactgcgacatgaaaccgatatgtttaaccagtcaactgtagaaccggttgatcaactgctgagaaaagttgaccccgccaaggatcgggagctgtgggtgagagagcataagacagggaatatacgcccagtagacatggaaatttag

SEQ ID NO: 189894 - DNA, 1251 bp, synthetic construct
  misc_feature 1..1251: note = Description of Artificial Sequence: Synthetic coding sequence
  source 1..1251: mol_type = other DNA
atgaagcccggcatggtgccccccccccccggcgaggagagccagactgttatactaccccccggatggcagtcctacctttcgccgcaaggacggaggtactacgtcaatactactaccaatgagacgacttgggagagacccagtagctctcctggcatccctgcatcgcctggttcccaccgcagctcgctcccaccaaccgtcaacgggtaccatgcttctggtactccggcccaccccccagaaactgctcacatgtctgtgaggaagtctaccggcgactcacagaaccttggcagcagctctccaagtaagaaacagtcaaaggaaaataccattactatcaattgtgtcaccttccctcatcctgacacaatgcctgaacaacagcttctcaagcccacggaatggtcctactgcgactacttctgggcagacaagaaagaccctcagggtaacggcactgttgcgggcttcgagctgctcctgcagaagcagctgaagggtaagcagatgcagaaggaaatgagtgagttcataagggaacggatcaagatcgaagaggactacgccaagaatctcgcgaagttgtctcagaactccttggctagccaagaggaaggtagcctaggcgaggcatgggctcaggtgaagaagtcactggcggacgaagccgaggtgcaccttaaattttctgcaaagctgcacagcgaagtagagaaaccacttatgaattttcgtgagaacttcaagaaggacatgaagaaatgcgatcatcacatcgctgacctgaggaagcagttagcgtcacgatacgcttctgtcgaaaaggcacggaaggccctcaccgagaggcagagggatctggagatgaagacccagcagctcgagattaagctctcaaataagactgaggaggatatcaaaaaggcaaggagaaagagcacacaagccggggatgatctgatgagatgcgtggatctatataaccaggcccagagtaaatggtttgaggagatggtgaccacaacactggaattagaacggttggaggtggagagagtggaaatgattcgccagcacttatgccagtacacccagctaagacatgagacagacatgtttaatcagagtactgtggaacccgtggatcagctcctaaggaaagtggatccagcaaaggatagggagctttgggtccgggagcacaaaaccggaaatatccggcccgtagatatggaaatctag

SEQ ID NO: 189895 - DNA, 546 bp, synthetic construct
  misc_feature 1..546: note = Description of Artificial Sequence: Synthetic coding sequence
  source 1..546: mol_type = other DNA
atggtgccccccccccccggcgaggagagccagaccgtgatcctgccccctgggtggcaaagttacctgtccccacaaggacgccgatattacgtgaacactacgacaaacgaaactacctgggagaggccaagtagcagcccgggtattcccgcctctcccgggagccatcgctcatcgctgcctccaactgtcaacgggtatcacgcgagtgggacgcccgcgcaccctcccgaaactgcacatatgagcgtccgtaaatctacaggtgattctcagaacctgggcagcagtagtcctagtaaaaagcagtctaaggagaacaccattacggaactggaacgcttagaagtcgaaagagtggagatgattcgacaacacttgtgccagtacactcagctgcgacacgagactgatatgttcaatcagtccaccgtagaacctgttgatcagttgctgaggaaggtcgaccccgcaaaagatcgcgagctgtgggtccgcgagcataaaacaggcaacatacgtcctgtggatatggagatatag

SEQ ID NO: 189896 - DNA, 873 bp, synthetic construct
  misc_feature 1..873: note = Description of Artificial Sequence: Synthetic coding sequence
  source 1..873: mol_type = other DNA
atgcccgagcagcagctgctgaagcccaccgagtggagctactgcgattatttctgggccgataaaaaggacccacagggaaatggcacagtcgccggcttcgagctgctcttgcagaagcagcttaaaggcaagcagatgcagaaagagatgtctgagttcattagggagcgtattaagatagaggaagactatgccaaaaacttggcaaaattgagccagaatagcttggcttctcaggaggaaggctctctcggcgaggcatgggcccaggttaagaaaagtctagctgacgaggccgaggtccacttaaaatttagcgcaaaactccattcagaggtcgagaagccactgatgaattttcgggagaatttcaagaaagacatgaagaaatgcgatcaccacattgctgatctaagaaaacagcttgcctcacggtatgcgagtgtggaaaaagcgcggaaggcattgaccgagaggcagcgagatctcgagatgaaaactcagcaactggagattaagctgagcaacaagacagaagaagatattaagaaagcgaggcggaaaagcacccaggccggcgacgatctgatgagatgtgtcgacttgtataatcaggctcaaagcaaatggtttgaagagatggtaactaccacccttgaattagaacgcctcgaggtcgagcgggtggaaatgatccgccagcacctctgtcaatatacccagttgcgacatgaaacagacatgtttaatcaaagcacagtcgaacctgtggaccagttgttgaggaaagtggatccagccaaggatcgggaactgtgggtccgggaacacaagacaggaaatatcagaccagttgatatggagatctag

SEQ ID NO: 189897 - DNA, 378 bp, synthetic construct
  misc_feature 1..378: note = Description of Artificial Sequence: Synthetic coding sequence
  source 1..378: mol_type = other DNA
atgaagacccagcagctggagatcaagctgagcaacaagaccgaggaagatatcaaaaaggcccggcgaaagagcactcaggcaggtgacgatctgatgcgctgcgtcgacctctacaatcaggcacagtcaaaatggtttgaggagatggttactacaacacttgagttggaacgtctggaagtggaacgtgtagaaatgattaggcagcatctgtgtcagtatacacagctacgccacgagaccgacatgttcaaccagtcaactgtcgaaccagtcgatcagcttctacgaaaggtcgaccccgcgaaggaccgcgaactgtgggttcgtgaacacaagactggtaatattcggccagtagacatggagatctag

SEQ ID NO: 189898 - DNA, 1011 bp, synthetic construct
  misc_feature 1..1011: note = Description of Artificial Sequence: Synthetic coding sequence
  source 1..1011: mol_type = other DNA
atgagcaacatggagaacagcttcgacgacgtgagctgcctgagccctcagaacttgggttcaagttctccttccaagaaacagtccaaagagaacactatcaccataaattgcgtcacctttccccaccccgataccatgcctgagcagcagctactgaagcccactgagtggagctactgcgactatttctgggctgataaaaaagatccgcaggggaacggaacagttgctggattcgaactactgcttcagaagcagctcaaaggcaaacagatgcaaaaagaaatgagtgagttcataagagaacgcattaagatcgaagaggactatgcaaagaaccttgcaaagttgagccagaacagtttggcctcacaggaggagggctccctcggcgaggcctgggcacaagttaagaagtcattggcagacgaggcggaagtgcaccttaaattttctgcgaaactgcacagcgaagtggagaagcctctaatgaatttcagagagaatttcaagaaagatatgaagaaatgtgatcaccatatagccgatcttaggaagcagctcgcttcccgctatgcatccgtggagaaagccaggaaggcccttaccgaacggcaacgggatttagagatgaagactcagcaactcgagatcaaactatcaaataagacagaagaggacattaagaaagctagacgtaagtccacacaggcaggcgatgaccttatgcgctgtgtggacctctacaaccaagcccagtcaaagtggttcgaggaaatggtcaccactaccttggagttagagcggctggaagtggaaagagtagaaatgatccgccagcacctctgccagtacacgcagctgcgacatgaaaccgatatgttcaatcagtcgacagtcgaacctgtggaccagctgctgcgcaaagtggatcccgccaaagaccgggagctttgggttcgggagcacaaaactggcaacattcgccccgtagacatggaaatctag

SEQ ID NO: 189899 - DNA, 1437 bp, synthetic construct
  misc_feature 1..1437: note = Description of Artificial Sequence: Synthetic coding sequence
  source 1..1437: mol_type = other DNA
atggcccccaagaagaagggcaagaagggcaaggccaagggcaccccgatcgtggatggtctggcccctgaggatatgtcaaaggaacaggttgaggaacacgtgtcccgtattcgggaagagctggatagagagagggaggagcggaattacttccagctggagagagacaaaatccataccttctgggaaattacgcgtcggcaattggaagagaaaaaagccgagctgcggaacaaggatagagagatggaggaagccgaagagcgacaccaggtggaaataaaagtgtacaagcagaaggtgaaacacctgctgtatgagcaccagaacaacctcacagagatgaaggcggaaggaaccgtcgttatgaagttagcacaaaaggaacatcggatccaagagtccgtgctcaggaaggatatgcgcgccctgaaagtagaactgaaagagcaagaactggcatccgaagtggtcgtcaagaacctgcgtctaaagcataccgaggaaattacccgcatgaggaacgacttcgagcggcaggtccgtgaaattgaagcaaagtatgataaaaagatgaaaatgctgcgtgatgaactggatctccgccggaaaacagaactgcacgaggttgaagagcgcaaaaacggtcaaattcacactctgatgcagcggcacgaggaggcatttaccgacataaaaaactattataacgacataacattgaataacctggccctgatcaatagtctcaaagaacagatggaagacatgcgcaagaaggaggaccatctggaaagggaaatggccgaggtgtcaggccaaaataagcggcttgccgatccacttcaaaaagcaagggaggaaatgagcgagatgcagaaacagctcgctaactacgagagggacaaacaaatcctcctatgtacgaaggctcggttgaaggtccgcgagaaagagctgaaggacttacagtgggaacacgaggtgctggagcagcgtttcacaaaagtgcaacaggagcgagacgagttgtatcgcaagtttaccgcagcaatccaggaagtccagcagaaaactggattcaagaatctggtcctcgaacgtaaactgcaggcattgagtgcagccgtggagaaaaaggaagtgcaattcaacgaagtgctcgccgcaagtaatctggaccccgctgccctgactctcgtcagtagaaagctcgaggacgtgttggagtctaaaaatagtaccattaaggacctccagtacgagttagcacaagtgtgcaaagcccataacgacctgcttaggacatacgaggcaaagctactcgcctttggtattcccctggacaatgtcggcttcaagccgcttgagactgcggtcatcgggcagacactcggtcagggcccagccggtctggtgggaactcctacatag

SEQ ID NO: 189900 - DNA, 1362 bp, synthetic construct
  misc_feature 1..1362: note = Description of Artificial Sequence: Synthetic coding sequence
  source 1..1362: mol_type = other DNA
atgagcaaggagcaggtggaggagcacgtgagccggatccgggaggagctggatagagagagagaagagagaaactatttccagttggaacgcgataaaattcacaccttctgggaaatcacccgccgccagcttgaagaaaagaaggctgagctgcggaacaaagatcgtgaaatggaagaggcagaagagagacaccaggttgagatcaaagtctataaacaaaaggtgaaacatctgctctacgaacaccaaaataacctaacagaaatgaaggccgaaggcaccgtggtgatgaagctggcacaaaaagaacatcgaattcaggagtctgtgcttcgaaaggacatgcgcgcactgaaagtggagctgaaagaacaggagctggcgagtgaggtcgtcgtgaaaaatctcaggttgaaacatacagaagaaattactcgtatgagaaacgactttgagcgtcaggttagagaaattgaggcgaaatacgacaagaaaatgaaaatgctgcgtgatgagttggaccttaggagaaaaactgagttgcatgaggtggaggagcggaaaaacggccaaatacacaccttgatgcagcgacacgaggaggcttttacggacattaagaactattacaatgacatcacactcaataacctggctctgatcaattcactcaaggagcagatggaggatatgcggaagaaggaagaccacctggaacgagaaatggctgaggtgagtggacagaacaaaaggctggcagatccactccaaaaggctcgggaagaaatgagcgaaatgcagaagcaactggctaattatgaacgagataaacaaattctcctctgtaccaaggctcgactgaaggtgcgtgagaaggaactgaaagatctgcagtgggagcacgaagtcctggagcaaagattcaccaaggtacaacaggagcgagatgaactgtaccggaaatttactgcagcaatccaagaagttcagcaaaaaacaggatttaagaacctggtcctagagcgtaagctccaggcactgagcgccgctgtggagaagaaagaagtgcagttcaatgaggttctcgccgctagcaatctggaccctgccgctctgactctggtctcccgaaagcttgaagacgtgctcgaatctaaaaactcgactatcaaggatctgcagtacgagctggcccaggtatgcaaggcccataacgacctgctgcgcacctatgaagcgaagctcctggcctttggaatccccctggataatgtaggattcaaacccctggagactgccgtgatcggtcagaccctagggcaggggcccgccggactggtgggaacccctacttag

SEQ ID NO: 189901 - DNA, 525 bp, synthetic construct
  misc_feature 1..525: note = Description of Artificial Sequence: Synthetic coding sequence
  source 1..525: mol_type = other DNA
atggcccccaagaagaagggcaagaagggcaaggccaagggcacccccatcgtggatggacttgccccagaagatatgtccaaggaacaggtggaggagcacgtttctcgaattcgcgaggaactcgaccgcgaacgagaagagcgcaactattttcagttggagcgcgacaaaatccatacattctgggaaatcacacgcagacagcttgaagaaaaaaaggccgagctcagaaataaagaccgcgaaatggaagaagcggaagagagacatcaagtggaaatcaaggtttacaagcaaaaggttaagcacttactgtacgagcaccaaaataatttaaccgaaatgaaagctgaggggactgtcgtgatgaagttagcccagaaggagcatagaatccaggagagcgtgctcagaaaggatatgcgtgctctcaaggtcgagctcaaggaacaagagctggcgtcggaggtggtggttaaaaatctgagactgaaattgcggcccagcatgatccggagatag

SEQ ID NO: 189902 - DNA, 1149 bp, synthetic construct
  misc_feature 1..1149: note = Description of Artificial Sequence: Synthetic coding sequence
  source 1..1149: mol_type = other DNA
atggtggaggagcacgtgagccggatccgggaggagctggaccgggagcgtgaagaacgcaattactttcagctcgagagagacaaaatccatacattctgggaaatcaccaggagacagctcgaggagaagaaggctgagctgagaaataaggaccgcgagatggaggaggcagaggaacgccaccaggtggaaattaaagtatacaagcagaaagtgaagcatctgctgtacgaacaccaaaacaacctgaccgagatgaaggccgaaggaactgtggtcatgaagctggcacagaaggaacaccgcatccaggaatcagtgttgagaaaagacatgagagctctgaaggtcgagctcaaggagcaggagcttgcatccgaagtggtcgtgaaaaatctgcggttgaagcatactgaggagatcactcgcatgcggaacgacttcgagcggcaggtacgtgagattgaagccaagtacgacaaaaagatgaagatgctcagagacgaactcgacttgcggaggaaaaccgagctccacgaggtggaggaaagaaagaatggccagatccacactctgatgcagcgacatgaggaggccttcactgatattaagaactactacaatgatatcaccctgaacaatctagctctgatcaattctctgaaagagcagatggaggacatgagaaaaaaagaggatcacctggaacgggaaatggccgaggtgagcggccaaaacaagagactcgctgacccactacaaaaagcccgcgaagaaatgagcgagatgcagaagcagctggcaaactatgaaagagacaaacaaatattgctttgtactaaagcaagactcaaggttagagaaaaagagcttaaggacctccagtgggaacacgaagtcctcgaacaaaggtttacaaaggtacaacaggagcgcgatgagctctatagaaagtttacggcagccatccaagaagtccagcaaaaaaccggcttcaaaaatctggtcttggagcgaaaactgcaggccctctccgcagctgtggagaaaaaggaagttcaattcaacgaagtgcttgccgcgtctaatctcgaccccgccgcactgactcttgtgtcccgaaagctggaaacattcttctgctag

SEQ ID NO: 189903 - DNA, 717 bp, synthetic construct
  misc_feature 1..717: note = Description of Artificial Sequence: Synthetic coding sequence
  source 1..717: mol_type = other DNA
atgctgtgctgcatgcggcggaccaagcaggtggagaagaacgacgacgatcagaagatagagcaagacgggatcaagcctgaggacaaagcacataaagccgcaaccaagatacaggcatcatttcgaggccacattaccaggaagaaactgaaaggcgaaaagaaagacgacgtgcaggccgcggaggccgaggctaataagaaggatgaggcccctgtggcagacggtgtggagaagaagggcgagggaaccactactgccgaagcagcgcctgctactggctctaagcctgacgagcccggcaaggcaggcgagaccccttccgaagagaagaaaggggagggagatgcggccaccgaacaggcagctccccaagctccggcctcaagtgaagagaaagcaggctctgccgagactgagtccgcaacgaaagcatccacagacaatagcccgagttccaaggctgaagatgcccctgcaaaggaggaacctaaacaggctgacgtgcctgccgccgtgacggccgctgctgctaccactccggctgccgaggatgcagcggctaaagccacagcccagcctccaaccgaaactggtgaaagtagccaagccgaggaaaacatcgaagcggtggacgagaccaagcccaaagaaagcgcaagacaggatgagggcaaggaggaggagcctgaggcagatcaagagcatgcatag

SEQ ID NO: 189904 - DNA, 825 bp, synthetic construct
  misc_feature 1..825: note = Description of Artificial Sequence: Synthetic coding sequence
  source 1..825: mol_type = other DNA
atgaccaagagctgcagcgagctgtgccaccccgccctgcacttcttaccctgcctaggaggtctccgaaagaatctacagagagcggttagacccagtccctactccctcggcttcctgacattttggatatcacgggtcgagaagaacgatgatgaccagaagatcgagcaggacggcattaagccagaggacaaagctcataaggctgcaactaaaatacaagcttccttcagaggacacattactcgtaaaaaactcaagggtgaaaagaaagacgatgtgcaagcagctgaagctgaggccaataagaaggacgaggcgcccgtggccgacggcgtggaaaaaaagggcgaggggacaacgacggccgaggccgcgccagccactggcagcaagcctgacgaacccggtaaagccggcgagactccaagcgaagagaaaaaaggggagggagatgccgcgacagagcaggcagccccccaagcgcccgcctccagtgaggaaaaggctggatccgccgaaactgagtctgccacgaaggcgagcaccgacaactctccctcttcaaaggctgaggatgctccggctaaagaggagccaaagcaagcagatgtcccagccgcggtgaccgctgccgcagccacaacacccgccgcggaggacgccgcagccaaggctaccgctcagccccccacagaaaccggtgaaagctcccaggccgaggagaacatcgaagcagtggacgagaccaaacccaaggaatctgctcgacaggacgaggggaaggaggaggaacccgaagccgatcaggaacacgcctag

SEQ ID NO: 189905 - DNA, 1119 bp, synthetic construct
  misc_feature 1..1119: note = Description of Artificial Sequence: Synthetic coding sequence
  source 1..1119: mol_type = other DNA
atgccccccccccagcagggcccctgcggccaccacctgctgctgctcctggccctgctgcttccctctctccccctgactcgggcacccgtccctcccgggccggccgctgcattgcttcaggctctcgggctgcgggacgaaccccagggcgcaccccggttgaggccagtgccccccgttatgtggcgcctcttcaggagaagggacccacaggagacacggtctggcagcagaagaactagcccgggggtgaccttgcagccatgccatgtggaagaactgggcgtcgccggcaacatcgtcaggcatattcccgatcgtggggccccaacccgagcgtctgagccagcctctgccgcgggtcactgtcctgaatggacagttgtgttcgaccttagtgctgtggagcccgcggagcggccatcgagagcaagactggagttgcgattcgccgcagcagctgccgctgcacctgagggtggctgggagctctcagtggcccaggccgggcagggcgctggcgccgacccagggccggtgctcttgcgacagctagtaccagccttaggacctccagtgcgtgcggagctgctcggagcagcctgggcaaggaatgcctcttggccacggtcactgcgcctggcccttgcgctccgaccccgcgcacccgctgcgtgtgcaaggctggccgaagcctctctgctattggtcacccttgaccctaggctctgccacccactggccagaccgcgacgcgacgccgaacccgttctcgggggaggaccaggcggggcttgccgtgcccgtagactgtatgtttccttccgggaagtcggctggcaccggtgggtaatcgccccccgtggctttctggctaactactgtcaggggcagtgtgctctgcctgtcgccctgtcaggtagtggcggcccaccggctctgaatcatgctgttctgcgggccctgatgcatgccgcagcaccaggtgccgctgatctgccgtgctgcgtgcccgcgcggctgagtcctatctcagttctgttcttcgataatagtgataacgtcgtacttagacagtacgaggatatggtcgtcgatgaatgcgggtgtcggtag

SEQ ID NO: 189906 - DNA, 1224 bp, synthetic construct
  misc_feature 1..1224: note = Description of Artificial Sequence: Synthetic coding sequence
  source 1..1224: mol_type = other DNA
atggtgctggccgcccccctgctgctgggcttcctgctgctggccctagagctccgacctcggggggaggctgccgagggcccagctgctgccgctgcagctgccgccgctgctgcggcggccggcgtgggcggggagcgttcatcaaggcccgcgccaagtgttgcaccggagcctgatggctgccccgtctgtgtgtggaggcagcactcacgggaactacgcctggaatctattaaatcacagattttgtcaaagcttaggttaaaagaggctcccaacattagccgcgaggtcgtgaagcaactcctgccaaaggctcccccactccagcagatactggaccttcacgattttcagggggacgctttgcagccagaggatttcctcgaggaagatgaataccacgccaccaccgagactgtcattagcatggcacaggaaacagacccagcagttcaaacagacggcagtccgctatgctgtcatttccatttctcccccaaagtaatgttcacaaaagtacttaaggcccagttgtgggtgtacctgaggcccgtcccccgtcctgcaacagtgtatcttcagatcctcagactgaagccgcttacaggcgaggggacagctggcggagggggcggtggacgccgtcatattcgtattcggagcctcaaaattgaactacatagtcgctcgggacactggcagtcaatcgatttcaagcaggtcctccattcttggttcagacaaccccagtcgaactggggcattgagatcaacgctttcgatccaagtggaacggacctggcagtgacatccctgggtcctggggccgagggtctccatcccttcatggaactccgggtactggagaatacaaagagaagtaggagaaaccttgggctggactgcgacgaacactcctcagagtcccggtgctgccggtacccactgacggtcgactttgaagcctttgggtgggactggattatcgctccgaagcgatacaaggccaactattgctcggggcaatgtgaatacatgtttatgcagaagtacccccatacccacctagtgcagcaagccaatccaagaggctcagctggaccttgctgcacgcctacgaagatgtctccaatcaatatgctgtatttcaacgacaagcaacagattatttacggcaagattccagggatggtggtggaccgctgtggttgcagctag

SEQ ID NO: 189907 - DNA, 1143 bp, synthetic construct
  misc_feature 1..1143: note = Description of Artificial Sequence: Synthetic coding sequence
  source 1..1143: mol_type = other DNA
tgagccgccgccgccgccgccgccgccgccgccgccgccgccggcgtcggcggcgaaagatcaagccgaccggcacccagcgtcgcccccgaacccgatggttgccctgtatgtgtttggcgacagcacagccgagaattgaggcttgaatccattaaatcccagatactctctaagctcaggctgaaggaagccccgaatatctcaagagaggtagtaaaacagctactccccaaggccccacctctgcagcagatcctggacctgcacgatttccagggcgacgcgctgcaaccggaggactttctagaagaagatgagtatcatgcaaccacggaaaccgtgatttccatggcacaggagaccgatcccgccgtgcagacagatggcagccccctatgctgccacttccatttttcccctaaagtaatgtttacaaaggtgcttaaggcccagttgtgggtctacctgcgtcccgtaccccgcccagcaaccgtgtaccttcaaattttgagactaaagcccctaaccggcgaggggaccgctgggggcgggggaggggggcgtcgtcatatccgtatccgtagcttaaaaatcgaattacactcacggtcaggacactggcaaagtatcgacttcaagcaggtgctacactcctggttcaggcaacctcagagcaactggggcatcgaaatcaatgccttcgatccttctgggacagacctcgcagtgacttccctgggacctggggccgagggtctccatccgttcatggaactccgagtcctggagaacaccaagcggtcgcggcgtaacctgggcctagactgcgacgagcactcctccgaatcgcggtgttgtaggtatccactgaccgtggattttgaagcctttgggtgggactggatcatcgccccaaagcgatacaaggctaattactgctcagggcagtgcgaatacatgttcatgcagaagtatcctcacacacatctggtgcagcaggcaaaccctagaggctctgctggtccctgttgcaccccaactaagatgtcacctatcaacatgctgtacttcaacgacaaacagcagattatatatggcaagatcccaggaatggtcgtggataggtgtgggtgtagctag

SEQ ID NO: 189908 - DNA, 927 bp, synthetic construct
  misc_feature 1..927: note = Description of Artificial Sequence: Synthetic coding sequence
  source 1..927: mol_type = other DNA
atgcccggccaggagctgcggaccgtgaacggcagccagatgctgctggtcctactcgtgctgtcctggctgcctcacggaggagctctgtctcttgccgaagctagtcgcgcatcttttccagggccaagtgaactacactccgaagactctaggtttcgcgaattgaggaaacggtatgaggaccttctcactaggctgagagccaaccagtcctgggaggattccaataccgacctggtgcctgcccccgctgtcaggatcctgacccctgaggtcagactgggcagcggggggcacctgcacctgaggatttcgcgggccgcactgccggaaggtctgccagaggccagcaggctccaccgagcactgttcagactgtctcccaccgcttcaaggagctgggatgttacaaggccacttcgccggcagctgagcctggcgcgtcctcaagctccagctctccatttgagactatccccgcctcctagccaaagtgaccaactgcttgccgagagttccagcgccaggcctcagttggagcttcatttgcggccccaagctgcaaggggcaggcggagggccagagccaggaatggagatcattgtcctctgggccctggacgctgctgccggttacacaccgtgcgtgctagcctcgaggatctcggatgggcagattgggtgttaagcccaagagaggtgcaggtgaccatgtgtattggcgcttgtccgtcccaattcagagcagcaaatatgcatgcccaaataaaaacttctttgcaccgcctgaagcctgatactgttcccgcaccctgctgtgtgccggcgtcgtataaccccatggtgttaatccagaaaaccgacaccggcgtatcgcttcagacatatgacgatctcctagcaaaggattgccactgtatctag

SEQ ID NO: 189909 - DNA, 927 bp, synthetic construct
  misc_feature 1..927: note = Description of Artificial Sequence: Synthetic coding sequence
  source 1..927: mol_type = other DNA
atgcccggccaggagctgcggaccgtgaacggcagccagatgctgctagtgctacttgtgttaagttggctgcctcacggcggagccctttctctggctgaggcatcacgggcaagcttccccgggccaagtgagctacactctgaagactctaggtttagggagctgcgcaagcgatatgaggacctattgaccaggctgcgggcgaatcaatcatgggaggactcaaacacagaccttgtaccagctcctgccgttcgcatactcactcccgaggtgcgtctcgggagcggggggcacctgcatcttcggatctcacgcgccgcacttccagagggcctccctgaggccagcagacttcatcgggctctgttccgtctgagccctaccgctagtcgcagttgggacgtcactcgccccctgcgaagacagctctcgttggccagaccacaggccccagcgctacacctgcgcttaagccccccccccagccagtccgatcaacttctcgctgaaagctccagcgctaggcctcagctagagttgcacctgcgtccccaggccgcacgcggccgccgtcgcgctcgtgctagaaacggtgaccattgtcctctggggccaggtcgctgctgcagactgcatacagtgagggcctcgctggaggatttaggctgggcggattgggtgctgtcccctcgcgaggtacaagtgaccatgtgtattggcgcatgtccgagtcaattccgcgcggccaatatgcatgctcaaatcaaaacctcgctacacagacttaagccagacacggtccccgctccatgttgcgtgccagcgtcttacaaccctatggtgttgatccaaaagaccgataccggagtgagtctgcagacgtacgacgatcttcttgctaaggattgccattgcatctag

SEQ ID NO: 189910 - DNA, 1290 bp, synthetic construct
  misc_feature 1..1290: note = Description of Artificial Sequence: Synthetic coding sequence
  source 1..1290: mol_type = other DNA
atgtgccccggcgccctgtgggtggccctgcccctgctgagcctgctggcagggtctctgcagggaaagcccttgcagagctggggccggggatcagccgggggcaatgctcattcccctttgggtgtgccagggggcggcttgcccgagcacacgttcaaccttaagatgttcctggagaacgtgaaggtcgatttcctgagaagcctaaatctgagtggcgtgccttcacaggataagaccagggtggagccgccgcaatacatgattgatttgtacaacaggtacacttcagataagtccactaccccagcatctaatatcgtccggtcatttagcatggaagatgctatatctattaccgcaaccgaagatttccccttccaaaagcacatactcctcttcaatattagcattcctaggcacgagcaaatcacccgtgctgagcttcgcttgtatgtgtcctgtcagaaccatgttgacccttcccatgacttaaaagggagtgtggtgatctacgatgtactcgatggaactgacgcttgggacagcgccaccgagactaagacctttctcgtatctcaggatattcaggatgaaggctgggaaacactggaagtgtcatccgcagtgaagaggtgggtccgatcagattccacaaagtctaaaaataaactggaggttacagtggagagtcacagaaaaggctgcgatacattggatatttcagtgccccccggcagcaggaacctgccattctttgtcgtcttttccaatgaccattctagcggaactaaagaaactcgcctggagcttcgcgagatgatctcccacgaacaggaaagtgtattgaagaagttgagtaaagacggcagtactgaggccggggagtccagccacgaggaggatacagatggccatgtggcagcaggaagcacattggcacgtaggaagaggagcgcaggcgctggttcacactgtcagaagacatccttgagggtaaatttcgaggacatcggttgggatagttggattatcgcacccaaagaatacgaagcatacgaatgtaaagggggctgcttctttccactcgcagatgatgtcactcccaccaaacacgccatcgtccagactttggttcacctcaagtttccaaccaaagtcggtaaggcttgctgcgtgcccacaaagttgagtccaatctccgtgctctacaaagacgacatgggggtaccaacactcaaataccactatgaaggaatgagcgtggccgagtgcggatgccggtag

SEQ ID NO: 189911 - DNA, 1095 bp, synthetic construct
  misc_feature 1..1095: note = Description of Artificial Sequence: Synthetic coding sequence
  source 1..1095: mol_type = other DNA
atgctgcggttcctgcccgacctggccttcagcttcctgctgatcctagctctcggccaggcagttcagttccaagagtatgtatttctgcagtttctaggactggacaaagcaccttcgccgcaaaaatttcagcccgtcccatacattcttaaaaaaatcttccaggatagagaggcagcagctacaaccggcgtgagcagggatctgtgttacgttaaagaactaggggtgaggggcaacgtactaagattcttacctgaccagggcttcttcttgtacccgaagaagattagccaagcctcgtcttgtcttcagaaattgctctacttcaatctttctgccatcaaggagcgcgagcagctgacacttgcccagttgggcttggatttagggcctaacagctactataaccttggacctgagctggaactggctctgttcctcgtacaagagccccatgtgtgggggcagaccaccccaaaaccgggcaaaatgttcgtgctgaggtcagtgccgtggccccagggagccgtccatttcaatctgcttgacgtcgctaaggactggaatgacaatccacgcaagaactttggcctattcctggagatcctcgtcaaggaggatcgcgattccggagtaaacttccagcctgaagatacctgcgctcggttacgctgctctctgcatgcgagtctgttggtcgtgactctgaaccctgaccaatgtcatccttcgaggaaaagaagggccgctatccccgtacccaaacttagctgcaagaatttgtgtcaccgccaccagctcttcatcaatttcagagacctagggtggcacaaatggattatagctcctaagggctttatggccaattattgccacggagagtgccctttcagcctgactatcagccttaattcgagtaactacgccttcatgcaagcccttatgcacgcagtggatcccgaaatcccccaggccgtctgcatccctacgaagctttctccgattagtatgctatatcaagataataacgataacgtgattctgaggcattacgaggatatggtcgttgatgagtgtggatgcggttag

SEQ ID NO: 189912 - DNA, 1506 bp, synthetic construct
  misc_feature 1..1506: note = Description of Artificial Sequence: Synthetic coding sequence
  source 1..1506: mol_type = other DNA
atgcggctgcccaagctgctgaccttcctgctgtggtacctggcctggttagatcttgagttcatttgcacggtgctcggcgctccggatctcggacaacgaccgcagggtacccgtccaggtctagcgaaagctgaagccaaggagaggccaccactggcacggaacgtatttcgacccggtgggcattcttatggagggggcgcaacaaatgcaaacgcacgcgcgaaagggggcaccggccagactgggggacttacacagcctaagaaggacgagcctaagaaactgcctcctagaccgggtgggccagaacccaagcctgggcacccgccccagacccgacaggctaccgccagaacagtcacacccaaggggcagctgccaggcggtaaagctccgccaaaggcagggtcagtgcctagtagcttcctgctgaagaaggctcgcgagccaggtccacccagagaaccaaaggaaccattccggcctccccctatcacaccacacgagtacatgttgtctttatatcgcacactgagtgatgcagatcggaagggaggtaacagtagcgtgaagcttgaagccggactggctaatactatcacatctttcattgataagggtcaggacgaccggggcccagtggtcagaaaacagaggtatgtgttcgacattagtgctctggagaaagacggactacttggcgctgagttacgaatcttgcgcaagaaaccaagtgacaccgcaaagcctgctgcgccaggcggtggcagagctgcgcagttaaagctgtcctcttgcccttccggtcgtcagcccgcctctctcctggatgtccggtcagtccccggactggatgggagtggatgggaagtattcgatatatggaaactgttccgcaacttcaagaatagcgcgcagttatgcttagaactcgaggcatgggagagaggacgcgccgtggatctgagagggctagggttcgatcgcgccgcacgtcaggtgcacgaaaaagcgttgtttctggtgttcgggcgcacaaagaaacgggacctcttttttaacgagattaaagcccgctcagggcaggatgataagaccgtgtacgaatatttattctcccagcgccgaaaaagacgagctcctctggctaccagacagggaaaaaggcccagcaaaaatcttaaagccagatgttccaggaaggctctgcacgttaattttaaagacatggggtgggacgactggatcattgcacctctggagtacgaggcctttcattgtgaagggctctgcgagtttcccttgagatctcatctggaacccacaaatcatgctgtcatacagacccttatgaattctatggaccccgagtccaccccgcccacttgttgcgtgcccacgcgcctgtctcccatctcaattcttttcattgacagtgccaataatgtcgtgtataagcagtatgaagatatggtagtagaaagttgtgggtgtcggtag

SEQ ID NO: 189913 - DNA, 1506 bp, synthetic construct
  misc_feature 1..1506: note = Description of Artificial Sequence: Synthetic coding sequence
  source 1..1506: mol_type = other DNA
atgcggctgcccaagctgctgaccttcctgctgtggtacctggcctggctggacttggaattcatctgtacagtgctgggggcccccgatttgggccagcggcctcagggaactcggcccggcctagctaaggccgaggctaaagaaaggccccccctggcgaggaatgtgttccgacctggcggccatagttatggcggaggcgcaacaaatgccaacgctcgggcaaagggtggaactggtcagaccgggggattgactcagcccaagaaggacgaacccaaaaaactcccacccagaccaggtggccctgagcctaagccgggccaccctcctcagaccagacaagctactgcccgcacggtcaccccaaagggtcagctccctggcggcaaggcccctccgaaggccgggtctgtgccttcaagttttttgctgaagaaggcccgagaacctgggccgcctcgggaacctaaagaaccttttcgaccacctccaatcacaccacacgagtacatgctttccctgtatagaactctatccgacgctgatagaaagggaggaaatagcagcgtgaagttggaggcaggactcgcgaacaccatcaccagtttcatagataagggccaggacgatcggggccccgtggttcggaagcaacggtacgtgttcgacatcagcgccctggagaaagacggattactgggggccgagctgcggattttaagaaaaaaacctagtgatacagcaaagcccgctgcccccgggggcggccgtgccgcacagctgaagctctcttcatgtccttccggaaggcagccggcttctctgctagatgtgagaagtgttcccggattggatggcagtggctgggaagtctttgatatctggaaactgtttcgcaatttcaagaactccgcgcagctgtgcctggagcttgaggcatgggagagggggcgggctgtggatctccgcggccttggctttgacagagccgcccgccaagttcatgagaaggcactgttcttagtgttcggacggaccaaaaaacgtgacctgtttttcaatgagataaaagctcgctccggtcaagatgacaaaaccgtgtacgaatacctattttctcagcgccgaaagcgccgtgctccattggccaccaggcagggcaaacggcccagtaagaatctcaaggccaggtgttctaggaaggcgcttcatgtgaactttaaggacatggggtgggacgactggatcatcgcgccattggagtacgaagcctttcattgtgagggcttatgcgagtttccgcttaggagccacctggagccgacaaaccatgccgtcatccagacgcttatgaactctatggaccccgagagtacacccccgacatgctgcgtcccgacgagactctcccccatctcaatccttttcatcgattccgccaacaatgtcgtctataagcagtacgaggacatggtagttgaaagctgtggttgcaggtag

SEQ ID NO: 189914 - DNA, 1368 bp, synthetic construct
  misc_feature 1..1368: note = Description of Artificial Sequence: Synthetic coding sequence
  source 1..1368: mol_type = other DNA
atggacaccccccgggtgctgctgagcgccgtgttcctgatcagcttcctgtgggacctgccgggcttccagcaagcgagtatttcatcgagcagttcctcagccgaactcggttccaccaagggcatgaggagtagaaaagaaggcaagatgcaaagagctccacgggactctgacgcaggccgtgaagggcaagagccccaaccccggccccaggatgaaccacgggcccaacagccaagggctcaggaaccccctggacgcgggcccagggtggttcctcacgagtacatgctgagcatttatagaacctatagcatcgcagagaagctgggaatcaatgcctcatttttccaaagtagcaaatctgctaacactattacttccttcgttgacagggggttggacgatttatcccacactcctttgcgtcgtcagaagtacctcttcgatgtgagcatgctgagtgacaaggaagaactcgttggtgccgaactcaggcttttcagacaagccccttccgccccatggggcccgcccgccggtcctctgcacgtgcaactgtttccttgcctgtctccccttctgttagacgcacgtaccctggacccccaaggggcaccacctgctggttgggaagtttttgatgtgtggcagggtcttaggcaccagccatggaagcaactgtgtctcgaacttagggccgcatggggagaactggacgctggggaagccgaagcccgtgcccgtggtcctcaacagcctccaccccccgatctcaggtcgctcggattcggccgccgcgtgcgccccccccaggagagggctctgctggtcgtgttcactcgtagccagcgcaaaaacttattcgcagagatgagagagcagctcgggagcgccgaggcagctggtcctggtgccggggctgaaggctcctggcctcccccgagtggcgcccccgatgctcgaccatggctacctagcccaggtcgacgccggaggcgcaccgcgtttgcctcgcgccacgggaagaggcacggaaaaaaatcgcgcctgcgctgttccaagaagccgctgcatgttaactttaaggaactgggctgggatgactggattatcgcccctctggaatacgaggcctatcattgcgaaggtgtatgtgattttcccctgagatcacatcttgaacccacaaatcatgccatcatccagaccctcatgaacagcatggatcctgggagcacacccccatcctgctgtgtgcctaccaaactgacgcctataagtatattgtatattgacgccgggaacaacgtcgtgtacaagcagtatgaagacatggtcgtcgagtcctgcggatgcaggtag

SEQ ID NO: 189915 - DNA, 1062 bp, synthetic construct
  misc_feature 1..1062: note = Description of Artificial Sequence: Synthetic coding sequence
  source 1..1062: mol_type = other DNA
atggacaccccccgggtgctgctgagcgccgtgttcctgatcagcttcctgtgggatcttccgggttttcagcaggctagtatcagctcgtctagcagttcagcggagctaggtagtacaaaggggatgagaagtagaaaggaaggaaaaatgcagcgagccccgcgggattccgatgccgggcgcgagggacaggaaccgcagcctcgccctcaggacgagcctcgggcacagcaaccacgggctcaagagccccccggacgtggtccaagggtggtcccacacgagtacatgctgtcgatctaccgtacatattctatcgcagagaagctcggcatcaatgcttccttctttcaatcctctaagtccgccaacactattacaagcttcgtggaccgaggcttggacgatctgagccacactcctttgcgcagacaaaaatatctgtttgacgtttcaatgctgtctgacaaggaggaattagtgggcgctgagctgcgactcttcagacaggcaccctcagccccgtggggtccgccagccgggcctctccatgtgcagttgttcccttgcctgtcaccactgcttctcgacgcccggacacttgatcctcaaggcgcgcccccagccggatgggaagtttttgacgtttggcaagggttgcggcaccagccatggaaacagctgtgcctcgagctgagagctgcatggggggagctcgatgcgggcgaggcagaggcccgggcgagaggcccacagcaaccccccccccccgacctcagatctctcgggttcggaaggagagttcggcctcctcaggagagggcacttttagtggtgttcactcggtcccagcgcaaaaatctgttcgctccaggcgtgcgcggcctcagtttgagaggctgcatgaggcttccggcggcacttgcgccaggggcccaccaaccccgtcatcaccccgatgccgacgagctgcacggaccccgcttgcatcccgcgcagctgcttcgggcgcaccagatcgactcccatcagcactctatccatagaagaggccagtag

SEQ ID NO: 189916 - DNA, 816 bp, synthetic construct
  misc_feature 1..816: note = Description of Artificial Sequence: Synthetic coding sequence
  source 1..816: mol_type = other DNA
atggacaccccccgggtgctgctgagcgccgtgttcctgatcagctttctgtgggacttgcccggctttcagcaagccagcattagctccagtagtagctccgcagagctgggttccaccaaagggatgcgatcccgtaaggagggcaagatgcagagggccccgagggacagcgacgccggaagagagggacaggagccacaacccaggccgcaggacgagcccagggctcaacagccccgcgcgcaggagccacctggacgggggcctcgggtcgttccccacgaatatatgctcagtatttatcgaacctacagcattgctgaaaagttgggcataaacgcctccttcttccaaagctccaaatctgcaaatacgattacaagcttcgtggacagagggctcgatgacctcagccatacacccctgcggaggcaaaagtatttattcgacgtatcgatgctctctgacaaggaggagctagtgggcgcagaattgagactgttccgccaagctccgtccgccccatggggccctcctgctggcccactgcacgtccagctctttccttgtctgtcccccttgctgctcgacgctaggaccttggacccgcagggtgccccaccagctggatgggaagtgttcgacgtctggcaaggtttacggcaccaaccatggaagcagctatgtcttgagctgcgggccgcacctggaccagcggagtcaggtctgcgcccggaaggagctgcttcacccggcgccggccccgctggtggcatccaccaaatccccgcagccgcctgcccccctaattag

SEQ ID NO: 189917 - DNA, 1353 bp, synthetic construct
  misc_feature 1..1353: note = Description of Artificial Sequence: Synthetic coding sequence
  source 1..1353: mol_type = other DNA
atggacctgagcgccgccgccgccctgtgcctgtggctgctgagcgcttgccgcccccgcgatggactggaagctgcagcagtgctgagggcggcaggcgccggtcccgtgagatccccaggagggggtggtggcggtggcggtgggggacgaactctggcccaagcagccggtgctgccgccgtcccggctgctgccgtgccacgagccagggccgcaagaagagcagccggctcaggctttcggaatgggtcggtggtgccgcatcactttatgatgtccttgtaccgaagtctcgcaggtcgtgcaccggcaggggccgcggcagtatctgcctccgggcacggccgggccgataccatcaccggtttcacagaccaggctactcaggatgagagtgcggccgagaccggtcagtcattcctctttgatgtgagctctctcaatgatgccgacgaagtcgtgggcgcggaattacgggtcctgcgtagaggttcacctgagagcgggcctggctcatggactagccctcctcttctcctgctatctacttgccccggcgccgcgagggctccccgtctcctgtactcacgcgcagccgaacctcttgtgggccagagatgggaagccttcgacgtggctgatgctatgcggcgccatcgacgcgagccaagaccacccagagcgttttgtctcttactgcgtgccgttgcagggcctgtgccctcccctcttgccctgagacgcttaggctttgggtggcctggtgggggagggagcgctgctgaggagcgggccgtgctagtggtgagctctcggacccagagaaaagaatccctgttcagagagatcagggcccaggccagggctctgggggccgctcttgcttctgagccacttccagacccgggtactgggacagcatcacccagggcagtgatcggaggcaggagacgcagaagaacggctctagcaggcactcgaacggctcaggggtctggcgggggggccgggcgcgggcacgggagaagggggagatctaggtgttcaagaaaacccttgcatgtcgattttaaggaacttggttgggatgactggataatcgctccactcgactatgaggcgtatcattgcgagggcctatgtgattttcctttacggtcccacctcgagccgaccaatcacgcgatcattcagactctgctgaactccatggcgcctgacgccgccccagctagctgctgtgtgcccgctagactttctcctattagcattctgtatatcgatgcagcaaataacgtggtttataaacagtacgaagacatggtagtcgaagcatgtggatgtcggtag

SEQ ID NO: 189918 - DNA, 1269 bp, synthetic construct
  misc_feature 1..1269: note = Description of Artificial Sequence: Synthetic coding sequence
  source 1..1269: mol_type = other DNA
atgccccggagcttcctggtgaagagcaagaaggcccacagctaccaccagcctcggtcacctggcccagactacagcttgaggctggagaatgtgcctgccccgagcagagcggactcaaccagcaatgcagggggagccaaagccgagccacgcgacaggttatctccggagtcacaattgacagaggcgcccgatcgtgccagcgctagtcctgatagctgcgaaggaagcgtgtgcgagcggtccagcgaattcgaagatttctggcggccaccaagtccgtctgcgagtcccgcctctgagaagtccatgtgcccttctctggatgaggcacagcctttcccccttcctttcaagccatattcctggtctggactcgccgggtcagatctccgacaccttgtacaaagttacaggccctgtggtgcccttgagcgaggcgcaggtctcggactgttttgtgagccggcacccgagccaggacacccggcggccttatatggtcccaaacgcgcggctggcggagccggcgccggagccccgggcagttgctccgcaggagcaggagctaccgctggccctggactcggcctctatggcgacttcggtagcgccgccgccggcctttacgaaaggcctacggccgctgccggcctgctgtatccagaaagagggcatggtctccacgccgataagggagctggtgtgaaggtggagtctgaactcctttgtacccgcctgctgctggggggagggtcttacaaatgtatcaagtgttccaaagtattcagtacaccccacggactggaagtacacgtgagaagatcccattcaggcaccagaccgtttgcttgcgagatgtgtggaaagactttcggccacgccgtgtcactcgagcagcacaaggccgtgcactctcaagagaggagcttcgactgcaagatctgcggcaaatcttttaaacgcagtagcaccctaagcacccacctgttgatccattctgacacgaggccctacccgtgtcagtattgcgggaagcgctttcaccagaaatccgacatgaagaagcacaccttcattcacacaggcgagaaaccacacaaatgtcaggtgtgtggaaaggccttctcccagtccagcaacctgattacgcatagcagaaagcacaccgggttcaaaccattcggctgtgatttatgcggaaagggctttcagcgcaaagtggatcttcggcgtcacagggaaactcagcacggactgaagtag

SEQ ID NO: 189919 - DNA, 1269 bp, synthetic construct
  misc_feature 1..1269: note = Description of Artificial Sequence: Synthetic coding sequence
  source 1..1269: mol_type = other DNA
atgccccggagcttcctggtgaagagcaagaaggcccacagctaccaccagccccggtcccccggtcccgactactctctgcgcttggagaatgtgcctgcacctagtagagcggactcaacttccaacgccggaggggccaaggctgaaccgagagacagactgtcacccgaaagccagctcactgaggcacctgatagagcaagcgctagcccagacagttgtgagggatccgtttgcgaaaggagtagtgaatttgaagacttctggcggcctccaagtccatcagcatccccagcctctgagaagtccatgtgcccctcactggatgaagcccaacctttccccctgccctttaaaccttattcttggagtggcctggctggttcagatctgcgtcatctggtgcagagttaccgtccgtgcggcgccttggaacgtggggcaggccttggcctgttttgcgagcccgcaccagagcctggacaccccgcggctctgtacggcccgaagagggctgcaggcggagctggagcaggagctcccggcagttgttccgctggggctggcgctaccgctgggccagggttgggcctgtacggcgactttggcagcgcagctgccggactgtatgaacgccctactgcagccgcaggcctgctgtatcctgaaaggggtcacgggctgcacgctgataagggggccggtgtcaaagtcgaatcagaactgttgtgcacacgtctcctgctggggggtgggtcctacaaatgcatcaaatgttctaaggttttcagcacccctcacggactggaagtccacgtacgacgcagtcacagcggtaccagacctttcgcctgtgagatgtgtggcaagacattcggccatgccgttagcttggaacagcataaggcagtccactcccaggagagatcttttgactgtaagatttgcggaaagtctttcaaacgtagctctactcttagcacccacctgttgatccatagcgacaccaggccctacccatgtcagtactgcgggaaacgctttcatcagaagtccgacatgaagaagcacacctttatacacactggagagaagcctcacaaatgtcaagtgtgtggaaaggccttctcacagtcaagcaatctgataactcactcccgtaagcatacaggatttaagccttttggttgcgacctctgtggaaaaggatttcagcggaaagtggacctgagacgccacagagaaactcagcatggtctgaagtag

SEQ ID NO: 189920 - DNA, 1269 bp, synthetic construct
  misc_feature 1..1269: note = Description of Artificial Sequence: Synthetic coding sequence
  source 1..1269: mol_type = other DNA
atgccccggagcttcctggtgaagagcaagaaggcccacagctaccatcaaccacggagtccggggccggattactctctgcgtctcgagaacgtgcccgcccccagcagagccgattctacctctaacgcgggaggggccaaggccgaaccacgagatagactatcccctgagtcccagctgaccgaggcacctgacagagcttccgcctctccggattcttgtgaagggtcagtctgtgagcggagcagcgagtttgaagatttttggagacccccttctcccagcgcttcacctgccagcgaaaagagtatgtgcccgtcactcgacgaagcacagcctttccccctgcccttcaagccctacagttggtctggacttgccggaagcgatttaagacatctggttcagtcatacaggccctgcggcgctctggaacgaggggcagggctgggcctgttttgcgagccagcacccgagccaggtcaccctgctgcactctacggcccaaagcgtgccgccgggggcgcaggcgcaggcgcccctggctcttgcagtgcaggcgccggcgccacggcaggcccgggcctgggattatacggagatttcggatcggccgccgccggcctgtacgagagacccaccgcggccgctggcctgctgtacccagaacgtggccatggcctgcatgcagataaaggagctggtgtgaaagtcgagtctgagctactatgcacccggctgctcctagggggcggatcatacaaatgcatcaagtgttcaaaggttttcagtactccccatgggctcgaagtacacgtgcgtcggtctcactctgggacaagacctttcgcctgcgagatgtgtggcaagacattcggccatgccgtgtctttggaacagcacaaagccgtgcactctcaggagaggagtttcgactgtaaaatttgtggcaagtcttttaagcgctctagtaccttatcaacccacctgttgattcacagcgacacccgcccctatccttgtcagtactgcggtaagagattccatcagaagtcagatatgaagaagcataccttcatccacacaggagagaagccgcacaagtgtcaggtgtgtgggaaagcctttagccagtcttccaatctgatcacacattccagaaaacacaccggcttcaagccttttgggtgtgacctatgtgggaaaggcttccagagaaaagtcgaccttaggcgccacagggagacccagcatggcttgaagtag

SEQ ID NO: 189921 - DNA, 993 bp, synthetic construct
  misc_feature 1..993: note = Description of Artificial Sequence: Synthetic coding sequence
  source 1..993: mol_type = other DNA
atgccccggagcttcctggtgaagagcaagaaggcccacacctaccaccagccacgcgtgcaagaagatgagcccctctggcctcctgcccttacacccgtcccgcgcgaccaggctcctagtaattctccagtcctgtccacactgttcccaaatcagtgccttgattggacgaacttgaagcgggagcctgaacttgagcaggatcaaaacttggctcggatggccccagcacccgaggggcccattgtactaagtcgccctcaggacggggactcccctctgtctgattctccccccttttataagccctcattcagctgggacacactggccactacctacgggcattcttatcggcaggccccatccacaatgcagtcggccttcctcgaacactcagtatctttatatggtagtccacttgttcctagcacagagccagcactggattttagcctgcgatatagtcccggcatggatgcctatcattgtgtgaagtgcaataaggttttctcaacaccccacggcttggaggttcacgttcgaagaagccactccggcactcggccctttgcctgtgatatctgcggcaaaacgttcggacatgctgtgagtctggagcagcacacacatgttcacagtcaagaacgaagctttgagtgccggatgtgcggcaaggcattcaaacgctcctctacactgagtacacacttgcttattcatagcgacacaaggccgtatccatgccagttctgtggtaaacggttccatcagaaaagcgatatgaagaagcatacctatatacacactggggagaagccccacaaatgtcaagtgtgcgggaaagcttttagtcagtcctctaacttgatcactcattctcggaaacacaccggattcaaaccctttagctgtgagctctgcacaaagggtttccagcggaaggtggatctccggcgccatagagagtcacaacataatttaaaatag

SEQ ID NO: 189922 - DNA, 993 bp, synthetic construct
  misc_feature 1..993: note = Description of Artificial Sequence: Synthetic coding sequence
  source 1..993: mol_type = other DNA
atgccccggagcttcctggtgaagagcaagaaggcccacacctaccatcaaccacgggtccaggaggacgaaccgctatggccccctgccctcactcccgtgccgagggaccaggccccttcaaattctccagtcctcagcacacttttcccaaaccaatgtctggactggacaaatctcaagagagaacccgaactggaacaggatcagaacctggcacgaatggctcccgcaccagaggggccaattgtgctctcccggccccaagatggggatagccccctatctgacagtcctccgttctacaaaccttcattcagctgggatactctggccacaacatacggacattcctacaggcaggcgccctccactatgcaatcagcgttccttgagcacagcgtaagtctctacggcagcccgcttgtaccttccactgagcccgccttggatttctccctcaggtatagcccaggcatggatgcttatcactgtgtcaaatgtaacaaggtcttctccaccccgcacggtctcgaggtgcacgttcgaagatcccacagcgggaccagaccttttgcttgcgatatttgcggtaagaccttcgggcatgcagtgagcctggaacagcacactcacgttcattctcaagaacgctcattcgaatgtaggatgtgcggcaaagcgttcaaaagaagctcaactctgagtacacatctgctcattcatagcgacactcgcccttatccctgccagttctgcggtaagcggtttcaccagaagtctgacatgaaaaagcatacctacatccatacaggagagaagccccacaagtgccaggtgtgcggcaaggcttttagccagagttcaaacctcatcactcattccagaaagcatacaggcttcaagccgttttcatgtgaactttgtacgaagggatttcagaggaaggtggacctgcgacgccaccgcgagagtcagcataacctgaaatag

SEQ ID NO: 189923 - DNA, 855 bp, synthetic construct
  misc_feature 1..855: note = Description of Artificial Sequence: Synthetic coding sequence
  source 1..855: mol_type = other DNA
atgccccggagcttcctggtgaagagcaagaaggcccacacctaccatcaaccaagagtgcaggaggacgagccactgtggccaccagcattgacgcccgttccgcgcgaccaagctccttcaaactcacctgtgttgtcaacactttttccaaaccagtgcctggattggacaaatttaaaacgcgagcccgagcttgaacaggaccaaaacttggcccggatggcacccgccccggaaggccctatagtgttatccaggccccaggacggcgatagcccactgtcggatagcccaccattttataagccgtcattctcatgggatactctagctacgacttacggacattcatatcggcaggctccctctactatgcaatctgccttcctggaacactcggtttccctttatggcagtccccttgtcccgagtactgagccggctctcgattttagcctcaggtatagccccggcatggacgcttaccattgtgtcaagtgcaacaaggagcggagttttgagtgtcgcatgtgtggcaaggcctttaagaggagttctactttatcaacccatctcctgattcatagcgatacccggccctatccttgccaattctgcggaaagcggttccaccaaaaatcagacatgaaaaaacacacttacatccacaccggcgaaaagccccacaagtgccaggtctgcggcaaggcctttagtcagtcaagtaatttgattacgcatagtcggaagcataccggcttcaagcccttcagctgcgaactctgcacaaaggggtttcagcggaaggtggatctcagacgccacagggagtctcaacacaacttaaaatag

SEQ ID NO: 189924 - DNA, 855 bp, synthetic construct
  misc_feature 1..855: note = Description of Artificial Sequence: Synthetic coding sequence
  source 1..855: mol_type = other DNA
atgccccggagcttcctggtgaagagcaagaaggcccacacctaccaccaacctagagtgcaggaagatgaaccgctttggccgcccgctctgacccctgtgccccgcgatcaggccccaagtaacagtcctgttttgtcgacattgttccctaatcagtgtctggactggactaacctcaaaagggaacctgaactggagcaggaccagaacctggcccgcatggctcctgccccggaaggacctatcgtcttgtccaggcctcaggacggcgattctcctctgtcggactctccccccttttataaaccgtccttctcctgggacacactggcaaccacctacgggcactcatatcggcaagccccaagtactatgcagagtgcatttctggaacacagcgtctctctctatgggtcccctcttgttccgtctaccgagcccgcattggacttttctcttcgctactcacccgggatggacgcgtatcattgtgtcaagtgcaataaggaacgcagtttcgagtgtcgcatgtgcggaaaagctttcaagcgcagctcgacattgagtacacacttgctcattcactcagataccagaccatatccctgccagttttgcggaaagcgcttccatcaaaagtccgatatgaagaagcatacatacatccacaccggcgaaaagccgcataagtgccaggtgtgtggcaaagcatttagccagagctctaacttaatcacccactcaaggaagcacacgggcttcaagccctttagctgtgaactgtgtaccaaaggttttcagagaaaggtagacttgcgcagacacagagagagccagcacaaccttaagtag

SEQ ID NO: 189925 - DNA, 993 bp, synthetic construct
  misc_feature 1..993: note = Description of Artificial Sequence: Synthetic coding sequence
  source 1..993: mol_type = other DNA
atgccccggagcttcctggtgaagagcaagaaggcccacacctaccatcagccacgggtccaggaggatgagccgctgtggcctcctgcgttaacccccgtgccacgggaccaggcgcccagcaactcacctgtgctctccaccttgttcccgaaccagtgtcttgattggaccaatctgaagagagagcctgaactggagcaggaccagaatttagccagaatggccccagctcctgagggccctatcgtgttatcgcgcccccaggatggggattcccctctgtctgactccccccccttctacaagccttcattttcctgggacacccttgcaaccacgtatggccactcctatcggcaggctcctagtacaatgcagtccgctttccttgagcactcagtgtcactttacggttctccccttgtaccaagcaccgagcccgctcttgacttcagtctgcgctattctccagggatggacgcgtaccattgcgtgaagtgtaacaaagtgttctcgacgccacatggactggaagttcacgtacgcagatcccatagcggcacgaggccatttgcatgtgacatttgtggaaagacttttgggcatgctgtgtctttagagcagcatactcatgtccacagtcaggaacgctccttcgagtgtaggatgtgtggtaaggcatttaagaggagtagtacacttagtacccacctgctgattcatagtgatacgcggccctacccctgccagttctgcgggaaacgcttccatcagaagagtgatatgaaaaagcatacttacattcacaccggggaaaaaccccacaagtgccaggtgtgcgggaaggccttcagccagagctctaatcttatcacgcatagccgcaagcataccgggttcaagccttttagttgcgaactctgtactaaaggattccaaagaaaggtggatctgagaaggcatagggaaagccagcacaacctcaagtag

SEQ ID NO: 189926 - DNA, 855 bp, synthetic construct
  misc_feature 1..855: note = Description of Artificial Sequence: Synthetic coding sequence
  source 1..855: mol_type = other DNA
atgccccggagcttcctggtgaagagcaagaaggcccacacctaccatcagcctagagtgcaggaagacgagcccctgtggccccccgctctaacccccgtccccagagaccaggcccccagcaacagtcctgttctgagcaccctgtttcctaatcagtgtctggattggaccaacttaaagcgagaacccgaactagaacaggaccagaatcttgcccgcatggctcctgcgccagaggggccaattgtgctatcccggccccaggatggggactctcctctcagtgactcgcccccattctacaagccgtctttctcttgggatacgctcgccacgacttatgggcactcctaccgccaagcaccatcaactatgcagtcagcatttttggagcacagcgtgtccttgtatggcagtccgctggttcctagcaccgagcccgctctggatttctccctcagatactccccggggatggatgcataccactgcgttaaatgcaataaggaacggtcctttgagtgccggatgtgcggtaaggccttcaaacgctcgagcacccttagcacacatctcctcatccattccgacacccgcccatacccatgccagttctgcggaaaacgtttccatcagaagtccgatatgaaaaagcatacctatattcacacaggggaaaaacctcataagtgccaagtttgcggcaaggcattctcacaaagcagtaacctcattacccacagccgcaaacacaccgggttcaaaccattcagttgtgagctgtgcacgaagggatttcagcgcaaggtggatttgagaaggcatagggaaagtcagcacaacttgaagtag

SEQ ID NO: 189927 - DNA, 1623 bp, synthetic construct
  misc_feature 1..1623: note = Description of Artificial Sequence: Synthetic coding sequence
  source 1..1623: mol_type = other DNA
atgaccaccagcctgcaggacggccagagcgccgccagccgggccgccgcacgcgatagcccacttgcagctcaagtatgtggtgctgcccagggccggggggatgcccatgatctggctccagccccatggctgcacgcccgggcattattaccgctgcccgatgggacaagaggctgcgctgcagaccgcagaaaaaaaaaggacctcgacgtacctgaaatgccaagtatccccaacccatttcctgagctgtgctgctcccccttcactagcgtcctgagcgccgacctgttccctaaagctaactcgcgaaaaaaacaggttattaaagtgtatagcgaagatgaaactagccgagcactggatgttccatccgacataactgctcgagacgtctgccagctgctgatcctcaaaaaccactacatcgatgaccactcatggacattatttgagcatctgcctcacattggtgtggaacgaacaatagaggatcatgagttggtcatagaggttctcagtaattgggggattgaagaggaaaacaaactgtacttcaggaaaaattacgcaaagtacgaatttttcaagaatccaatgtatttttttcctgagcatatggtgtcgttcgctactgagacgaatggcgagatctcccctactcaaatcctgcaaatgttcctttccagcagcacctatcctgaaatccacgggttcttgcatgccaaggaacagggtaagaaaagctggaaaaagatctacttttttctgaggaggtcaggcctgtattttagcactaagggcactagcaaagagccgcgacatctgcagttcttctccgaattcgggaatagcgacatctatgtaagcctggccggcaagaagaaacacggcgcacctacaaactacggattctgtttcaaacccaacaaggccggtggaccacgcgacttgaagatgttatgcgccgaagaagaacaatccagaacttgttgggtcaccgcgatccgtctgctgaaatatggaatgcagctgtaccagaactacatgcacccctaccaaggacgatccgggtgcagttctcagagcatttcccctatgcggtctatttcagaaaacagcctggtggccatggacttttccggacagaagtcgagggttatagaaaatcccaccgaagctctcagcgtcgctgttgaagaggggcttgcgtggcgtaaaaagggctgtcttcgcttaggcacccacggctcccccacggccagttcccagtcttctgcgaccaacatggccattcacaggagccagccctggtttcaccacaagatcagcagagatgaggctcagcgtctgattatccaacagggactggtggacggtgttttcctggtaagagattcacaatcaaaccccaagacgttcgtcctgtccatgagtcacgggcagaaaatcaaacactttcaaattatacctgtggaggacgacggagagatgtttcacacattggacgacggccacacacggttcaccgatctaatccaactggtggagttctaccagctgaacaaaggggtacttccctgcaagcttaagcattattgtgctcgcatcgcactgtag

SEQ ID NO: 189928 - DNA, 1362 bp, synthetic construct
  misc_feature 1..1362: note = Description of Artificial Sequence: Synthetic coding sequence
  source 1..1362: mol_type = other DNA
atgagcctgagcgcccggcgggtgaccctgcccgccatcacccccataattctccagaagcgggtgattaaggtgtactctgaggatgaaacaagtagagctcttgacgtgccttcagacattacagcaagagatgtgtgtcagctactgatactgaaaaatcactatatcgacgaccacagctggacgctgttcgagcacttgccccatatcggcgttgagaggacaattgaggaccacgagcttgtgattgaggtgctgagtaactgggggatcgaggaagaaaataaactgtactttcgcaaaaattatgccaaatacgagttttttaagaatcctatgtatttctttcccgagcacatggtgtcatttgccaccgagactaatggagaaatatctcctacccagatacttcagatgttcctctcgtcaagtacatatccggagattcacggcttccttcacgccaaggaacaaggaaaaaagagttggaagaagatctacttctttttgcgtagaagcggtctctacttctcaaccaagggtacttctaaagaacctagacacctgcaattcttctccgaattcggcaatagtgacatctatgtcagtctagcggggaagaagaaacatggggccccaaccaactatggcttctgttttaagcccaacaaggccggcggccccagggacttaaagatgctgtgtgctgaggaagagcaaagtcgaacatgttgggtcaccgccatccgactgctgaagtacggcatgcagctgtatcagaattatatgcacccttatcaagggcggagtgggtgctcctctcagagcatttctccgatgagatccatcagcgaaaacagccttgtagccatggactttagcggtcagaaatccagagtgattgagaaccctacagaggctttgtccgtcgctgttgaggaaggcctcgcatggcgaaaaaagggctgcctgcgtctagggacgcacggcagccccacagcctcttcacaatctagcgccaccaatatggcaattcaccgcagccagccatggtttcatcacaaaatatccagggacgaagcacagagactcataattcagcaagggctcgtcgatggggttttcctggtgcgggattctcagtcaaaccctaaaacattcgtgctgtcaatgagccacggccagaagatcaagcactttcaaattattccagtagaagacgatggggaaatgttccatactctcgacgatggccacacacggttcactgacctgattcagctggtggagttttatcagctaaataagggcgtgctcccgtgcaagctaaagcactactgtgcccgaatcgcactgtag

SEQ ID NO: 189929 - DNA, 1599 bp, synthetic construct
  misc_feature 1..1599: note = Description of Artificial Sequence: Synthetic coding sequence
  source 1..1599: mol_type = other DNA
atggagctggacctgagccccccccacctgagcagcagccccgaggacttgtgtcccgcacctggcaccccacctggaactccgagaccgccagacacaccactgcccgaagaagtcaagcgaagccagccgcttttgattccaacaaccgggcggaagctgagagaggaggaaaggcgcgcgacttcgctgccatctatccctaacccctttcccgagctgtgctcccctccgagtcagtcgcccatcttgggcggacctagcagcgccaggggcctgcttcctcgcgacgcatctaggccacacgtagtgaaagtctacagcgaagacggagcatgtaggtctgtcgaagtggcagctggagcgacagccaggcatgtgtgcgaaatgctcgtgcagagagcacatgccttatccgatgaaacttgggggctcgtggaatgtcatccacatttggcccttgaacgagggctggaggatcacgagtccgttgttgaggtgcaggcagcctggcccgtgggtggtgacagccgcttcgtcttccgaaagaacttcgccaagtacgaactgtttaaaagttccccccactcattgtttccagaaaaaatggtgtcctcctgtttggatgcccatacggggatctcccacgaggatctgatccagaacttcctgaatgccggctctttccccgaaatccagggatttctacagcttcggggtagtggaaggaaactctggaaacggttcttttgcttccttcggcggagcggcctctattattcgacaaagggtactagtaaagacccccgccacctgcagtatgtggcagatgtgaatgagtccaatgtgtatgtggttacccagggcagaaaactgtatgggatgccaaccgacttcggtttttgcgtaaaacctaacaaactgcgcaatggtcacaaaggcctgagaattttctgctccgaagacgagcaatctcgcacatgttggctcgcagcctttcggttgtttaagtatggcgtgcaactgtacaagaattaccaacaggcacagtcaaggcatctgcatccgtcctgcctggggtcaccacctctgcgtagcgcttccgataatacactcgtggcaatggattttagcggccacgccgggagagtgatcgagaatcctcgcgaagccttatcagtggccttagaggaggctcaggcgtggcgcaaaaagaccaatcaccgactgtctttgcccatgcccgcctctgggacctccctgagtgccgccatccaccgaacccaactttggttccacggccgtatcagccgggaagagtcccaaaggctgatcggtcagcagggactggtggatggtctgtttctggtccgtgagtctcagcgaaatccgcaaggcttcgtgttgagcctctgtcacttgcagaaagtgaaacactacttgattttaccttcagaagaagagggccggttgtatttctctatggacgacggccaaaccaggtttaccgatctgttgcaattagtggagtttcatcagctcaacagagggattcttccttgtctgctgcggcactgctgtacaagggtcgctttgtag

SEQ ID NO: 189930 - DNA, 1344 bp, synthetic construct
  misc_feature 1..1344: note = Description of Artificial Sequence: Synthetic coding sequence
  source 1..1344: mol_type = other DNA
atggagctggacctgagccccccccacctgagcagcagccccgaggacctctgtccagctcctggcacacctccaggtacaccacgcccccccgacacccccctaccagaggaagtcaagagatcccaacctttgctgatcccaactaccggtcggaagctgagggaggaggagcggagagccacgagcctcccgtccatcccaaaccccttccctgaattgtgttctcctccaagccagtctccgatactgggtggaccttcgagcgcgcgaggactccttcctagagatgcatcccgcccccacgtggtcaaggtttactccgaggacggggcctgcaggtcagtggaggttgcagccggtgcaacagcgaggcatgtgtgcgagatgctggtacagcgagcccatgccctgagcgacgagacttggggcctggtcgagtgtcacccccacctggccctggagcgcggcctggaggaccatgagtccgtcgtagaagtgcaagctgcctggcctgtgggaggggactccagatttgtgtttcgtaaaaattttgctaaatatgagttgttcaaatcgagccctcatagtcttttccctgaaaaaatggtaagttcgtgccttgacgcccatacggggattagtcacgaggatctcattcagaattttctgaacgccggcagttttccagagatccagggctttctgcagctgaggggcagcggccgaaagctgtggaaacggttcttctgcttcctgagacggagtggcctctactacagcactaaaggaaccagtaaagatccacgtcacttgcaatacgtggcagacgtcaatgagtccaacgtttacgtggtgactcagggtaggaagctgtacggcatgcctacagattttggattttgtgttaagccaaataaacttaggaatggacacaagggccttcggatattttgcagtgaagacgagcaatcccgaacctgctggttagccgcgtttagattattcaagtatggagtgcaactatataaaaattatcagcaggcccagtctcggcatttgcaccctagttgccttggatctcccccgctgaggtctgcttcagataatactctagtcgccatggacttctccggtcacgctggaagggtcattgagaaccctcgtgaggcactgtctgtagcactggaagaagcccaggcctggcgaaagaagacaaatcatcggctatccctccccatgccagcatctgggacttccctgtctgctgcgtgctcctggtctgggagagtgagtggaacccctagagccttgagttctctgtgtgccacatgtcgcaagtag

SEQ ID NO: 189931 - DNA, 1344 bp, synthetic construct
  misc_feature 1..1344: note = Description of Artificial Sequence: Synthetic coding sequence
  source 1..1344: mol_type = other DNA
atggagctggacctgagccccccccacctgagcagcagccccgaggatttatgccctgctcccggcacacctcctgggacaccaagaccccctgatacacctttgcccgaggaggtgaaaagaagccagcctctgctgatcccaaccaccggtcggaagctgcgcgaggaggagcgccgcgcgacaagtctcccctctattcctaatcccttccctgaactttgctcccccccttctcagtctcctattctgggcggtccgtcttctgcccgcggactgctgcctagagacgccagccgccctcacgtcgtcaaagtttatagcgaagacggcgcctgcaggtcagtcgaggtggccgctggtgctaccgcaaggcacgtctgcgaaatgctggtccagagagctcatgcactgagtgatgagacctggggtctggtcgaatgtcaccctcacctggccctggaacgtgggctggaggatcacgagagtgtggttgaggtgcaggccgcatggcctgtcggtggcgactcgagattcgttttcaggaagaattttgcaaagtacgaactcttcaagagctccccccattcccttttccctgaaaaaatggtgtctagttgcctcgacgcacacacaggaattagtcacgaggatttgatacaaaacttcctcaatgctggctctttccctgagattcagggattcctacagctgcgggggtctgggcgcaaactgtggaagcggtttttctgctttctgagacggtccggattgtactattctaccaaggggacgagcaaagatcccaggcatttgcaatacgtggccgacgtgaatgagagcaacgtgtacgtggtaacacagggcagaaagctgtatggtatgccaacagactttgggttctgtgtaaagccaaacaaactcaggaatggacataaaggtctccgaatcttttgtagcgaagacgaacagagccgaacatgctggctggccgctttccgccttttcaagtacggcgtacaactctacaaaaactatcagcaagcgcaatccaggcatttacatccaagttgcttaggctccccaccattaagatcggctagcgataatacgctcgtggcaatggatttttcaggtcacgccggccgggtgatcgagaacccaagagaggccttaagtgtcgcactcgaagaagctcaggcctggaggaaaaagacaaatcatcgcctgagcctgcccatgcccgcatccgggacttccctcagcgcagcatgctcctggagcggccgcgtgtctggcaccccccgcgctctcagttcactgtgtgccacctgtaggaaatag

SEQ ID NO: 189932 - DNA, 1599 bp, synthetic construct
  misc_feature 1..1599: note = Description of Artificial Sequence: Synthetic coding sequence
  source 1..1599: mol_type = other DNA
atggagctggacctgagccccccccacctgagcagcagccccgaggacctgtgtccagccccaggtacccccccagggacaccccggccccctgatacaccactgcccgaggaggtgaaaagaagtcagccattactgattcccactaccgggcgaaagttgcgtgaggaagaacgcagggctacctccctgcctagtatccccaatcccttccccgaattgtgctcacctccttctcagtcacctattcttggcggccctagctctgcaagaggcttactgccccgcgatgcatctcgcccccacgtggtgaaggtatactccgaggacggggcatgtagatccgtggaagttgctgcaggagcaaccgcccggcatgtatgcgagatgttagtccagcgggcacatgccctgagcgatgaaacttggggtctggtcgagtgccacccccacctggccctcgagcgcggcctggaagaccacgaatcggtcgtggaggtgcaggccgcgtggccagtggggggtgattcaagatttgtgttccgcaagaatttcgccaaatacgagctgttcaagagctcaccccatagcttatttcccgagaaaatggtcagctcctgcctggatgcccacacaggcatcagccatgaagacttgattcagaatttcctgaatgctgggtcttttcccgagattcagggattcctgcagttgaggggatctggaaggaaactttggaaacgcttcttttgttttctcaggcggagtggactttactacagcacaaaaggcactagcaaggacccgcgccaccttcagtatgtggccgatgtcaatgaaagcaacgtctatgtggtcacacaagggcggaagctgtatgggatgccaaccgactttgggttttgtgtgaaacctaacaagttacggaatggacacaaggggcttagaattttttgcagcgaagacgagcagtccaggacatgctggctggctgccttcaggctatttaaatacggcgtacaactgtacaagaattaccagcaggcccaatcaagacacctgcatccgtcttgtctggggtctccacccctgaggtcggcctcagataacactttggtggccatggacttcagtggacacgcgggcagggtgatcgaaaatccgagggaggccctgagtgtggcccttgaggaggcacaagcatggagaaagaaaacaaatcatcgtctgagtctaccgatgcccgcctctggcacctcgctgtccgctgcaatccatcgcacccagctctggttccacgggcgcatcagcagggaagaatcccaacggctgatcggccagcagggtttagtcgacggcctctttctggtcagagagtcccagcgcaatccgcagggtttcgtgctctcactctgccatttgcagaaggtgaaacattatctcatattgccgtccgaagaggaaggacggctctatttttccatggacgacggccaaactcgattcaccgaccttctccaacttgttgaatttcatcaacttaatagaggaattctgccctgtttattgagacactgttgtaccagagtagctctgtag

SEQ ID NO: 189933 - DNA, 1599 bp, synthetic construct
  misc_feature 1..1599: note = Description of Artificial Sequence: Synthetic coding sequence
  source 1..1599: mol_type = other DNA
atggagctggacctgagccccccccacctgagcagcagccccgaggacctctgtccagctccaggcacccctcccggtactccaaggcccccggacactcccctgcccgaggaagtgaagagatctcagcccctgcttattcccaccacgggacggaaactcagagaggaagagcgaagggccacaagcctcccatctatcccaaatccatttccagaactgtgctcacctccctcacaatcccccattctgggtggaccgtcctcagcccgcgggctccttccccgagatgcatcacgaccccacgtggtgaaggtgtactctgaagacggcgcctgccggtctgtggaggttgccgcgggcgctacagccagacatgtatgcgagatgctagtgcaacgggcccacgcgcttagcgacgaaacttggggcctcgtagaatgtcatccccacctggctttagagcggggattggaggaccacgaatctgtggtggaggtgcaggccgcttggccagtcggtggggactcacgtttcgtcttcagaaaaaacttcgcaaaatatgagctcttcaagtcctcaccacattccctctttccagaaaagatggtatcctcttgccttgacgcccacacgggcatctcccacgaagatctgattcagaatttcttaaatgctgggtctttcccggagatccaaggcttccttcagttgagaggtagcggccggaagctgtggaagcgcttcttctgttttcttcgccggtcaggtctctactacagtaccaagggtacgtctaaggaccccagacacttacagtacgtggctgacgtaaatgaaagcaacgtgtacgtcgtcactcaaggcaggaagctttacggcatgcccacagatttcggattctgcgtgaagcctaacaaactgagaaacggccataaaggattaagaatattttgctctgaagacgaacaaagtcggacctgctggctggcagccttccggctgtttaaatacggcgtccaactgtataagaattatcagcaagcacagagcagacatctgcacccgagctgcctcggatctcctccattgcgcagtgcctcagacaatactttggtagcgatggattttagcggacacgcgggccgggtgattgagaacccccgagaagccctgtctgtggccttagaagaggcccaggcatggcgaaaaaagaccaaccataggttgagcctgcccatgcccgcctcaggaacatcacttagcgccgccatccataggactcagctctggttccacggccgaatctcaagggaggagagccagaggttgatcgggcagcaaggcttggtggacgggctgtttcttgtccgcgagagtcagaggaacccacagggatttgtgttatccctgtgccatcttcagaaagttaagcactatcttattcttccaagtgaggaagaaggaagactgtacttcagcatggatgatgggcagaccaggttcaccgacctcttgcagctggtggagtttcatcaactgaatcgcggcatactcccctgcctcctgaggcattgttgcacaagagttgctctttag

SEQ ID NO: 189934 - DNA, 1668 bp, synthetic construct
  misc_feature 1..1668: note = Description of Artificial Sequence: Synthetic coding sequence
  source 1..1668: mol_type = other DNA
atgggcaagtggcggcccggccagggccacaccaccggcagcgtgaagcctcttagctgctccgacgcaatggagctcgatctttcgccgcctcacctctcaagcagcccagaggatctttgtccagctccaggaacacccccgggaactccccgaccgcctgacaccccgctcccggaagaggttaaaagatcccaaccgctactgatacccactacgggaagaaaacttcgagaggaagagaggcgggccacttccctgccatctataccgaaccctttccctgaactttgctctccccctagccagtcccctattttggggggaccgtctagcgcacggggccttcttccacgagatgccagccgtccacacgtggtgaaggtctacagtgaagacggtgcctgtcgctccgtggaggtggcagctggggcaacggctcgacatgtgtgcgagatgcttgtgcagagagctcatgccctgagcgacgagacgtggggcctcgtcgagtgtcatccacaccttgcactggagcgaggcctggaggatcacgagagcgtcgtggaagtgcaggccgcttggcccgttggaggagattcgagattcgtgttccggaaaaactttgcaaagtatgagctgtttaaaagttcccctcatagcttgtttccagaaaagatggtgtcatcctgcctcgacgcgcacactggcattagccatgaagatcttattcaaaactttctgaacgccgggtcctttcctgaaattcagggctttttgcagcttagaggatccggccggaagctctggaagaggtttttctgctttttgcgacgatcaggactgtattactctacaaaggggacatccaaggacccaagacatctgcaatatgtcgccgacgtcaatgagagcaacgtctacgtggtgactcaggggcgcaagttgtatggaatgccaaccgacttcggattctgtgtgaagcccaacaagttgcggaatggacacaaagggctacgcattttttgcagcgaagatgaacagagccggacttgctggctggcggccttcaggctcttcaagtacggggtgcaattgtataaaaactatcagcaggcccagtctaggcacctgcacccatcatgcctcgggagcccgcccctgcgcagcgcttcagataatacccttgtggctatggatttcagtggccacgcgggaagagtcatcgagaacccgcgggaagctctgagcgtcgccctggaagaggcccaagcttggcgcaagaaaaccaatcatcgcttgagccttcctatgccagcctcgggtacaagcctcagtgctgctatccaccgcacacagttatggttccacggacgaattagtcgggaggagtctcagcgcctcatcggccaacagggcttggtggacgggttgtttctcgtgcgtgaaagccagcgcaacccacagggctttgtcctgagcctgtgccatttacaaaaagtaaaacactacctcatcttacccagcgaagaagaagggcgcctgtattttagcatggacgacggtcagacacgttttaccgacttacttcagttggtcgagtttcatcaacttaaccggggaatcctcccttgcctcctgaggcactgttgcactagggtagccttatag

SEQ ID NO: 189935 - DNA, 618 bp, synthetic construct
  misc_feature 1..618: note = Description of Artificial Sequence: Synthetic coding sequence
  source 1..618: mol_type = other DNA
atggccgcccccggcgagcggggccggttccacggcggcaacctgttttttctcccaggcggtgctcggagcgagatgatggatgacctcgcaaccgacgcccgtggacgaggcgcaggaagacgcgacgctgcggctagtgcttccacacccgctcaagcaccaacaagcgattccccggtcgctgaggacgccagtagacgcaggccttgtagagcttgtgtggatttcaaaacatggatgagaacacagcagaagcgtgatacaaagtttagggaagattgcccccccgacagggaagagctggggagacattcttgggctgtactgcatacgctggccgcctactacccagacctgccaacaccggaacagcagcaggacatggcacaattcatccacctattctccaagttctatccgtgcgaagagtgcgccgaagacttgcggaaaagactgtgtcgcaatcatcccgacacgcggacgcgagcctgcttcactcaatggctgtgccatctgcacaacgaagttaatcggaagctcggcaagcccgatttcgactgtagtaaggtggacgagcgatggcgagacggttggaaagacggcagctgcgactag

SEQ ID NO: 189936 - DNA, 285 bp, synthetic construct
  misc_feature 1..285: note = Description of Artificial Sequence: Synthetic coding sequence
  source 1..285: mol_type = other DNA
atgcggacccagcagaagcgggacaccaagttccgggaggactgccctcctgaccgtgaggagctggggcgacactcctgggctgtcctgcacactctggcagcctattatcccgacctgccaactcctgaacagcagcaggatatggcacaatttatccatctgttcagcaaattttatccatgcgaagagtgcgccgaggacctcaggaaacgtttgtgtagaaatcacccagatacgcgcactagggcctgctttactgtggccgtgccacccgcacagtag

SEQ ID NO: 189937 - DNA, 1629 bp, synthetic construct
  misc_feature 1..1629: note = Description of Artificial Sequence: Synthetic coding sequence
  source 1..1629: mol_type = other DNA
atgagcccctgccccgaggaggccgccatgcggcgggaggtggtgaaacggatagagaccgtcgtgaaggacctgtggcctacagctgacgtgcagatctttggttctttttccacaggactctatttaccaacaagcgatattgatctcgtcgtctttggcaagtgggaacggccacccctgcaactcctcgagcaagctctgaggaaacacaacgtggcagaaccatgctccatcaaggtactcgacaaagctacagtgcctattataaaactgactgatcaggagacagaggtgaaagtggatatcagttttaacatggagactggagttcgagccgctgagtttatcaagaactatatgaagaaatactcgctgctgccatacctgatcctagtgctcaagcagtttttactccagcgtgatcttaacgaagttttcacagggggcatttcgtcgtatagcctaatccttatggcgatcagttttctccaactgcatccgaggatcgatgccagacgagctgatgaaaatctgggaatgctgttggtggaattctttgagttgtacggcaggaatttcaattacctgaagaccggcattcggatcaaggagggtggggcctacatcgcaaaagaagagatcatgaaagccatgacgtcagggtataggccatctatgctctgtatagaggaccctctcctgccaggtaatgatgtaggaagaagttcttatggtgccatgcaggtaaaacaggtttttgactatgcctacatagtcttgagccacgccgtgagcccactggccagatcctatcctaaccgcgatgctgagagtactcttggccgcatcataaaagtcacgcaggaggtgatcgactaccgacggtggataaaagagaagtgggggtctaaggcacatccttcaccaggcatggactcgaggattaagatcaaggaacgaatcgcaacttgtaacggcgagcagacacagaatcgggagcccgagtccccgtacggccagcggttaactctgagcctttcctccccgcagcttctatccagcggctcatctgcttcatcagttagcagtctgagcggatccgacgttgattccgataccccgccctgcaccacgccaagcgtgtaccagttttccctacaggcccctgccccgttaatggccggcctccctaccgcactgcccatgcccagcggcaagcctcagcccaccaccagcagaactctcattatgactacaaataatcagacccgattcaccatccccccccccaccttaggggtcgcgcctgtgccatgccgccaggccggcgttgaagggaccgccagtctgaaggccgtacatcatatgagctcgcccgctattccaagtgccagtccgaacccactgagcagtccgcatctttaccacaagcagcataatgggatgaaattgagtatgaagggcagccatgggcacacacaaggtgggggctattcctcagtgggtagcgggggagtccgaccgcccgtagggaaccggggtcaccaccagtataatcgcacaggctggcggcggaagaaacacacccacacacgagacagcttgccagtgagtctaagccgatag

SEQ ID NO: 189938 - DNA, 885 bp, synthetic construct
  misc_feature 1..885: note = Description of Artificial Sequence: Synthetic coding sequence
  source 1..885: mol_type = other DNA
atggacctgtggcagctgctgctgaccctggccctggccggcagctctgatgctttttccggttcggaagccacagccgcaatcctttcaagagccccatggtctctccagtctgtgaatcctgggctgaagactaatagtagcaaggagccaaagttcaccaaatgtaggagcccagaaagggagaccttctcctgccattggacggacgaggtgcaccacggcactaagaatctgggtccaattcagcttttctatacacggaggaatacccaggaatggactcaagagtggaaggagtgcccagactacgtgagtgccggagaaaacagctgctatttcaattcatctttcacctctatatggattccttattgcatcaaactgacctctaacgggggaacggttgatgagaagtgcttctctgtggacgaaatcgtgcagccagaccccccaatagccctgaattggaccctcttaaacgtctcactgacgggcatccatgccgacattcaggtccgatgggaggctcctcggaacgccgacatccagaagggctggatggttctggaatatgagctccaatataaagaggttaacgagaccaaatggaaaatgatggacccgattcttaccaccagcgtcccagtatatagccttaaagtagacaaggagtatgaggtgcgcgtccgatctaaacaaagaaactctgggaattatggcgagtttagcgaggtgctgtatgtgacactcccacagatgtctcaattcacttgcgaggaagatttttacttcccatggcttctgataataattttcggtatcttcgggttgacagtgatgttatttgtatttctcttcagtaaacagcagagccaaaactag

SEQ ID NO: 189939 - DNA, 1851 bp, synthetic construct
  misc_feature 1..1851: note = Description of Artificial Sequence: Synthetic coding sequence
  source 1..1851: mol_type = other DNA
atggacctgtggcagctgctgctgaccctggccctggccggcagcagtgatgctttcagtgggagtgaagattcctctaaagaaccaaagttcacgaagtgcagaagtcctgaaagagaaaccttcagctgccactggacagatgaggtacatcacggcactaaaaatttgggcccaatccaactgttctatacacgccgtaacactcaggagtggacgcaggagtggaaggagtgccccgattacgtgagcgccggcgagaattcatgctacttcaattcttcctttacttcgatttggatcccttactgcatcaaacttacatctaatgggggaactgtcgatgaaaagtgtttcagcgtcgacgagatcgtccagcccgacccccccatcgcgttaaactggactctgctgaatgtgtcattgacaggcatacatgcagatatccaggtccgatgggaggctccccggaacgctgatatccagaaggggtggatggtcctggagtacgagctgcagtataaagaggtgaatgaaacaaaatggaagatgatggacccgattctgacaacctctgttcccgtctattcattaaaggttgataaagaatacgaagtgagggttcgctccaagcagagaaactctggaaattacggagaattcagcgaagtgctgtacgttacactaccgcagatgtcccagttcacatgcgaggaggacttttattttccgtggcttctcatcatcatttttggaatcttcggcctgacagtcatgctgtttgtgtttctcttcagcaaacagcagagaatcaagatgctaattctccccccagtgccagtcccaaaaatcaagggcatcgaccctgacctgcttaaagagggaaaacttgaggaagtgaataccatactagccatacatgattcgtacaaacccgaatttcactctgacgatagctgggttgagttcatagaactggatatcgacgagcctgacgagaaaaccgaggagagtgacacagaccgccttttgtcatctgatcacgagaaaagtcattccaatctcggagttaaggacggcgactccggaagaacatcatgttgtgagccggatatactggagacagattttaacgctaatgacattcacgagggcacatcagaggtagcacagccccaacgccttaaaggtgaagcagatctgctctgcttagatcagaaaaatcagaacaattcgccataccacgacgcctgtccagccacccagcagccgagcgtcatccaagccgaaaaaaataaacctcagcccttgccgaccgaaggtgcggagtctactcaccaagccgcgcacatccagctgtctaacccgtccagcttatccaatatcgacttttacgcacaggtgtccgacatcacccctgccgggagcgtggtgctgagcccaggacagaagaataaggctggcatgtcacaatgtgacatgcacccagaaatggtctccctgtgccaggaaaacttcctgatggacaatgcttacttttgtgaggccgacgccaagaaatgcatccccgtagccccccacattaaggtggaatctcatattcagccctcattgaaccaagaggacatctatataaccacggaatctctcactacggccgctggtcggccaggcacaggtgaacatgtgcctggatccgaaatgccagtgccggactacacctccatccacatagttcagtcacctcaagggttaatcttgaacgcgaccgccctgcccctgcctgataaagagtttctgtcttcttgcggctacgtgagcacagatcaactcaataaaatcatgccttag

SEQ ID NO: 189940 - DNA, 1356 bp, synthetic construct
  misc_feature 1..1356: note = Description of Artificial Sequence: Synthetic coding sequence
  source 1..1356: mol_type = other DNA
atggtgctggagtacgagctgcagtacaaggaggtgaacgagaccaagtggaagatgatggatcctatcctgaccaccagtgttccggtttacagtttaaaagtcgacaaggagtatgaagtgcgggtgaggtccaagcagcggaactccgggaattacggagaattcagcgaggtgctctatgtcacgctaccccagatgtcacaatttacctgtgaggaggacttttacttcccctggttactcatcattatttttgggatcttcgggctgactgtgatgctattcgtgttcttgttctcaaaacagcagcgcatcaagatgctgatcctgcctcccgttcccgtgccaaaaatcaaaggaatcgatccagacctgctgaaggagggaaagctcgaggaagttaataccatcctagccatccatgattcctataagccagaattccactccgatgactcctgggtagagtttattgaattggatattgatgagcccgatgagaagactgaagagtccgataccgatcgcctgttgtcgtcagatcacgagaagagccattctaacttgggagtgaaggatggggattcagggcggacttcttgctgcgagccagatattctggagaccgacttcaatgccaacgatatacatgaaggaaccagcgaagttgcccaaccacaacggcttaaaggggaggcagacctcctctgtttagaccagaaaaaccagaataacagcccgtaccacgatgcatgtcccgccacacagcagccttctgttatccaggctgagaagaataagccccagcccctgcccaccgagggggctgagagcactcaccaggcagcacacattcaactgagcaatccatctagtttgtccaacatcgacttctacgctcaagtgagtgacatcacacctgctgggtccgttgttctgtctcccggccagaagaataaggctgggatgagccaatgtgacatgcatccagagatggtctccctgtgtcaggaaaatttcctcatggacaacgcttatttctgcgaagccgatgccaagaaatgtattcccgtcgcgcctcatattaaggtggaatcccacatccagccttcattgaaccaggaagacatctacatcaccactgaatctctcaccacggctgccggcagacccggtacaggtgaacacgtgcccggctccgagatgcctgtgcccgattacacatcaatccatattgtgcaaagcccgcagggcctaatcttgaacgcaactgccttgcccttgccagacaaggagttcctgtctagttgcggctacgtttctaccgaccagctgaacaagattatgccatag

SEQ ID NO: 189941 - DNA, 327 bp, synthetic construct
  misc_feature 1..327: note = Description of Artificial Sequence: Synthetic coding sequence
  source 1..327: mol_type = other DNA
atgcccctgtgggtgttcttcttcgtgatcctgaccctgagcaactcgtcgcactgctcacccccacctccactgacacttcgaatgcgtcgatatgccgatgccatcttcactaattcgtacagaaaggtcctcggacagttgtcagccagaaaactcctacaggacataatgtcccggcagcaaggtgaatcaaaccaagagcggggcgctagagccaggctggggcggcaggtggacagtatgtgggctgaacagaagcaaatggaactcgagtccatcctggttgcccttcttcaaaagcacagccggaactctcaaggatag

SEQ ID NO: 189942 - DNA, 324 bp, synthetic construct
  misc_feature 1..324: note = Description of Artificial Sequence: Synthetic coding sequence
  source 1..324: mol_type = other DNA
atgcccctgtgggtgttcttcttcgtgatcctgaccctgagcaacagtagccactgttcaccgcccccacctctcaccctgagaatgagacgctatgccgatgcaatttttacaaactcctacagaaaagtactgggccagttatctgcccgcaaactgctgcaggacattatgtcacgccagcagggggagtctaatcaggaaagaggggctcgtgcacgcctggggagacaggtagatagtatgtgggccgagcaaaagcagatggagcttgaatctattctggtggcattgctgcagaaacaccgcaattctcagggatag

SEQ ID NO: 189943 - DNA, 327 bp, synthetic construct
  misc_feature 1..327: note = Description of Artificial Sequence: Synthetic coding sequence
  source 1..327: mol_type = other DNA
atgcccctgtgggtgttcttcttcgtgatcctgaccctgagcaactctagccactgctcccctccgcctcccctgacgctgaggatgcgacggtacgccgatgctatttttactaacagctatcgtaaggtcctcgggcagctgagcgcgcggaaattgctacaggatatcatgagcaggcagcagggcgagtccaatcaggagcgaggtgcgagagcaagattaggaagacaggtcgactccatgtgggccgagcaaaaacagatggaattagagagtatcctcgtggcattgttgcagaagcatagcagaaattcgcagggttag

SEQ ID NO: 189944 - DNA, 1272 bp, synthetic construct
  misc_feature 1..1272: note = Description of Artificial Sequence: Synthetic coding sequence
  source 1..1272: mol_type = other DNA
atggaccggcggatgtggggcgcccacgtgttctgcgtgctgagccccttacctactgtgctcggtcacatgcatcctgagtgtgacttcattacacagctgcgcgaagacgaaagcgcatgtttacaagccgctgaggagatgcccaacacaacactcgggtgtcccgcgacatgggatgggctgctgtgctggcctacggccgggagcggcgagtgggtgactttgccgtgtcccgatttcttcagccacttctcatcagaaagcggtgcagtaaaacgcgactgtaccatcacgggctggagcgaaccatttccaccatatccagtggcctgtcccgtacccctggagctcttagccgaagaggagtcatacttttctacagtcaaaattatctacactgtgggccacagcattagcatcgtcgctctatttgtcgccatcaccattctggtcgccttaaggaggctccattgtcctagaaactacgtgcacacacagctctttactacctttattctaaaagccggagcagtgttcctaaaagacgccgccttgttccatagcgatgacacagaccattgcagcttcagtacggtactctgcaaagttagcgtcgctgccagccactttgcaaccatgactaacttctcttggctcctggccgaggccgtgtacctaaattgcttgctggccagcacttccccctcaagccgacgcgctttttggtggctggtgttggctggttggggcctgccagtgctgtttacagggacctgggtgagctgtaagctggcatttgaggatattgcctgttgggacctggatgacacgtcaccttattggtggataataaaggggcccatcgtgctgtcagtaggagtgaattttggactgtttttaaacataatccggatcctggtgcggaaactggagccagctcaaggtagcctccacactcagtcccagtactggcgcctgagcaagtcaactttgttcctcatcccgctatttggcatccattatataatttttaactttctgcctgataatgcaggtctaggtatcaggctgcccttagagctggggcttggttcatttcaggggttcattgttgccatactctactgtttcctgaaccaggaggtgagaactgaaatttccaggaaatggcatggacacgatcccgagctcctgcctgcttggcgcaccagggcgaagtggactactccaagtagaagcgccgcaaaggtgctgacatccatgtgctag

SEQ ID NO: 189945 - DNA, 207 bp, synthetic construct
  misc_feature 1..207: note = Description of Artificial Sequence: Synthetic coding sequence
  source 1..207: mol_type = other DNA
atggtgcccggcacccccagccccctgctgggccggggcaaggagctctggctggagtccctggcgtgtctacctggcgcagtgaaacgggattgtaccattaccgggtggtccgagcccttcccgccttatcccgtcgcttgccctgtgccgctggagctcctcgccgaggaggggtgtccgtgttcctctttggcaagaggatag

SEQ ID NO: 189946 - DNA, 438 bp, synthetic construct
  misc_feature 1..438: note = Description of Artificial Sequence: Synthetic coding sequence
  source 1..438: mol_type = other DNA
atggtgcccggcacccccagccccctgctgggccggggcaaggagctgtggctggagtcccttgcctgtttgccaggtgcggttaaaagggactgcaccatcacaggctggtccgagccctttcccccctatcctgtagcctgcccagtccctttggaactgctggccgaggaggaatcatacttttccaccgtgaaaatcatttacacagttggccacagcatttccattgtcgcgctgtttgtagctatcaccattctagtcgccctgaggcgtctccactgcccaagaaattacgtgcacacacagctgtttacaactttcatcctgaaagcgggggcagttttcctaaaggatgcagccctttttcacagcgacgatacagaccactgttccttctcaacaggatgcccttgcagttccctggcaaggggctag

SEQ ID NO: 189947 - DNA, 456 bp, synthetic construct
  misc_feature 1..456: note = Description of Artificial Sequence: Synthetic coding sequence
  source 1..456: mol_type = other DNA
atgctgcccttcagcaccgccaccaccctgaccaccgccgccagcccacttgcagcacgggctttgcactggcacgtgggcgaactccagaccgggttacggggacatagagtgttgggacccgggcgacatttgcctctgctagtagaccaccaacgagcccattgtcctttagggcgcggagaattatgggccttcagtcagtattacccccaccctggcgaggagacaggagcttcttccgggcagcctccgtaccctgtcagtgttctggccagtttgcaggtcgatacattccctgatccaacattgtggaattctcttcaccatctccagttgcccgcgagacaatgctggcctggccatcccccccctccgggcgccgggacaggatttcttcctggcctccattgttgccatcccttgttgctacctcagcctaggggcgaggattag

SEQ ID NO: 189948 - DNA, 1080 bp, synthetic construct
  misc_feature 1..1080: note = Description of Artificial Sequence: Synthetic coding sequence
  source 1..1080: mol_type = other DNA
atggtgcccggcacccccagccccctgctgggccggggcaaggagctgtggctggaatcgctggcctgcttacccggtgcagtgaaaagagattgcactattactggttggtctgagcctttcccgccctaccctgtggcatgccccgtgcccctcgagctccttgctgaggaggaatcctacttctccacagtgaaaatcatttatactgtcggccactctatcagcatcgtcgctctgttcgtcgccattacaatcctcgttgccctaagacgcctgcactgtcccaggaattatgttcacacccagctatttactacgttcatcctcaaagctggcgccgtgtttctaaaggacgctgccctcttccatagcgacgacactgatcattgcagcttttcgacggtgctgtgcaaggtgtccgttgcagcttctcattttgctacgatgaccaacttctcctggttgctggcagaggcagtatatcttaactgtctgcttgcctcaacttctcccagctcccgaagggccttctggtggcttgtactcgctgggtgggggttaccagttctatttacaggtacttgggtgtcatgtaagctggccttcgaggatattgcttgctgggacctggatgacacttcaccatattggtggattatcaagggacctatcgtattgtctgtcggcgtgaactttggtttatttttgaatatcattcgaattctggttcgaaagcttgagcccgctcagggctctctgcacacccagtctcagtactggcgactgagcaaatccaccctgttcctgatcccccttttcggaattcattacataatctttaacttcctccctgacaatgctggcttgggtatcaggctgccgcttgaattgggacttgggtcctttcagggcttcatcgtggcaatcctttattgtttcctcaatcaggaggtgaggacagagatctctcgcaagtggcacggccacgatccagagctcctgcccgcctggaggacacgcgccaagtggaccactccaagccggtcagctgccaaggttctcacgagtatgtgttag

SEQ ID NO: 189949 - DNA, 1101 bp, synthetic construct
  misc_feature 1..1101: note = Description of Artificial Sequence: Synthetic coding sequence
  source 1..1101: mol_type = other DNA
atgtggaacgccacccccagcgaggagcccggcttcaacctgaccctcgctgacctagactgggacgccagccccggtaacgacagcctgggcgatgagctcctgcagctgttcccagcccccctattagcaggggtgaccgctacatgcgttgcacttttcgtcgtcggcatagcaggtaatctcctgacgatgttggtggtatcgagattcagagagctccgtacgacgacaaatctctatctctcgtctatggcattttccgacctgctgatatttctatgtatgcctttggatctcgttaggctctggcagtaccggccatggaatttcggggatctactttgcaagttatttcagttcgtgtcagagtcttgtacttacgctaccgtgctgactattactgcgctgtctgtagagcggtactttgcgatctgctttcccctaagggcgaaggtggtggtcaccaaaggcagggtaaagctggtgatttttgttatctgggccgttgccttctgcagtgccggaccaatttttgttctcgtaggcgttgagcacgagaatggaaccgacccatgggataccaacgagtgtagacccaccgaatttgccgtgcgcagcggcctgttgactgtgatggtgtgggttagctctatcttttttttccttccagtattttgtctgacagttctgtattcccttatagggagaaagttgtggagacgtcgccgcggagatgccgtggtgggcgcctccttgagggatcagaatcacaagcagaccgtcaaaatgttagcagtggtggtattcgcattcatcctgtgttggctccctttccacgtgggtcggtacttattttctaagagcttcgagccaggttccctagagattgctcagattagccaatattgtaacctcgtgagctttgtgttgttctatctttccgccgctattaaccccattttgtacaacattatgtccaagaagtaccgggtcgccgtgttcaggttgctgggattcgaaccattcagccaacgcaagctatctaccctcaaggacgagtccagccgagcctggaccgaatcatcaatcaatacatag

SEQ ID NO: 189950 - DNA, 870 bp, synthetic construct
  misc_feature 1..870: note = Description of Artificial Sequence: Synthetic coding sequence
  source 1..870: mol_type = other DNA
atgtggaacgccacccccagcgaggagcccggcttcaacctgaccctggcggacctggattgggacgcgtcaccggggaatgattcattgggagatgagctattacagcttttccccgcgcctctgttggcgggcgttacggctacctgtgtcgccttatttgtggtaggtatcgcagggaatttgctgactatgcttgtggtgagtcggttccgggagctccgaactaccactaacctgtacctgtctagcatggcattctccgacctgctgatcttcttgtgtatgccgctcgaccttgtgcggctctggcagtaccggccgtggaacttcggagacctgttatgtaagttgtttcagttcgtatcagagtcatgtacatatgccactgttttaaccattacagctctttctgtggagcgctattttgcgatttgcttccctctccgggccaaggtggtggttaccaaaggccgcgtcaagctcgtaatcttcgtgatttgggctgtcgccttctgtagtgcagggccgatattcgttctcgtgggtgtggagcacgagaacggaacagatccctgggatactaatgagtgccggcctacagagttcgccgtccggagtggtctcctaactgtgatggtttgggtctcttcaatcttcttctttcttcccgtcttctgccttaccgtgctatactcgttgataggacggaagctatggcgccggcgccgtggtgacgccgtggtcggtgccagcctgcgggatcagaatcataagcagaccgtgaaaatgttgggcggctctcagcgcgctcttaggctgagcctggctggtccaatcctgagcctgtgccttctaccgtcgttatag

SEQ ID NO: 189951 - DNA, 666 bp, synthetic construct
  misc_feature 1..666: note = Description of Artificial Sequence: Synthetic coding sequence
  source 1..666: mol_type = other DNA
atggccttcgtgaagagcggctggctgctgcggcagagcaccatcctgaaaagatggaaaaagaattggttcgacctctggtccgacggccatttaatatattacgatgaccagactcgccagaacatcgaggacaaagtgcatatgcccatggactgcatcaatattagaactggccaagagtgcagagatactcagcctcctgatggaaaaagtaaagactgcatgctgcagatagtttgccgggacgggaagacgatatcactgtgtgctgagtcaacagacgactgcttggcgtggaaatttacactccaggactccaggactaatacggcctatgtcggctctgccgtgatgacagatgagacctcagtagtgtcaagtcccccaccctatacggcctatgccgcaccagcacccgaggcatatggatacggcccttacgggggcgcctaccctcccgggacacaggttgtgtatgctgccaatggtcaggcttatgcagtgccttaccagtacccctacgcggggctgtacggccagcaacctgcaaatcaggtcattatacgggaacgttacagagacaatgactcagatctcgccctgggaatgctggccggcgcggctacaggcatggctctgggatctttattctgggttttctag

SEQ ID NO: 189952 - DNA, 1230 bp, synthetic construct
  misc_feature 1..1230: note = Description of Artificial Sequence: Synthetic coding sequence
  source 1..1230: mol_type = other DNA
atgggcaacagctacgccggccagctgaagaccacccggttcgaggaggtcctccacaattcaatagaggctagcctgaggagcaacaatctggtgcctcggccaattttttcgcagctatatctggaggctgagcaacaattagctgcgctggaaggaggatctagagtcgacaacgaagaggaagaggaggaaggagaagggggcttggagacgaacggcccgccaaacccattccagctccaccctctcccagaaggctgctgcacaactgatggattctgccaggcaggaaaagacctcagactggtatccatctcaaacgagccaatggatgttcccgccggctttctcctcgtgggcgtgaaaagcccctctctccctgaccaccttctggtgtgtgctgtagacaaacggttccttccagacgacaacggccacaacgccctgctgggcttcagtgggaactgtgtcggatgcggcaagaaggggttctgttactttacggagttcagcaatcacatcaacctgaagttaacaacccagcctaaaaagcaaaagcacctgaaatactatctggtgaggaatgctcagggtacactgaccaagggccccctcatctgttggaagggctccgaatttaggtccaggcagattccagcatcgacctgctccagtagtctgttcccagcactcgagagcacggctgcattcccatctgaacccgtgccgggtaccaatccctctattcttatgggcgcacagcaagcaggaccggctagcgaccatccatccctgaatgctgcgatgggtcccgccgtattcaacggcaaggattctcctaagtgccagcaactggccaagaataatctgttggccctgcctcggccttccgcactcggcatccttagcaacagtggtccccccaagaagcgccacaaaggctggtcaccggaaagcccttctgctcctgacggcgggtgcccccaaggagggggcaatagagcaaagtacgagtccgccggaatgagctgcgtgccccaagtagggctcgttgggcctgcttctgtcacgttcccagtggtggcttcaggcgagcccgtgtctgtacccgacaacctactgaaaatatgtaaggcaaagcccgttatcttcaaagtgttcgtcaacggtgccacgcaaatggtggccttgggccccgcggagccagcctctccccggtctctgtag

SEQ ID NO: 189953 - DNA, 1374 bp, synthetic construct
  misc_feature 1..1374: note = Description of Artificial Sequence: Synthetic coding sequence
  source 1..1374: mol_type = other DNA
atgggcaacagctacgccggccagctgaagaccacccggttcgaggaggtgctccataactctatcgaagccagcctgcgttccaataatctcgtgccacgacctatatttagtcagctgtacttagaagcagaacaacagctggccgccctcgagggtggttccagggtcgacaacgaggaagaggaggaggaaggagaagggggcctagaaacaaacgggcccccaaatccattccagttacatcctctccccgagggctgctgtaccacagacggattctgccaggccgggaaagacctcaggttggtgtccatctctaacgaaccaatggatgttccggccggcttcttattggtgggtgtcaaatcaccatctctgcctgaccatctgctggtgtgtgcagtggataagcgtttcctgccagacgacaatggacataatgccctgttggggttcagcgggaattgtgtgggctgcgggaagaaggggttctgttacttcacagaatttagcaatcacatcaacctgaaactgaccacacagcccaaaaagcagaagcatttgaagtattatctagtcagaaacgcacagggcactctgacaaaaggccctcttatttgctggaaaggttccgagtttcgctctaggcaaattcccgcctccacatgcagctcctctcttttccctgccctggagtccacagctgccttccccagcgaacctgtgcctgggaccaacccctctattttgatgggagcacagcaggctggacctgcctcagaccatccttccctgaatgcggcgatgggtcctgcagtcttcaacgggaaagacagccctaagtgccagcagcttgccaagaacaatttgcttgccctgccccgtccaagtgccctcggtattctaagcaacagcggtcctcccaagaagcgccataagggatggagtcccgaatctccaagtgcccccgacggcgggtgtccccaggggggaggaaaccgtgccaagtatgaatcagccgggatgtcatgtgtgccacaggtgggccttgtcgggccagcctctgtgactttcccagtggtggccagcggcgagccagtctctgtcccggacaatttgctgaagatctgcaaggctaagccagtgatttttaagggacacggaaactttccctatctttgcgggaatctcaatgacgtcgtggtatcacccctcctgtatacttgctaccaaaacagccagagtgtgtctcgtgcctacgaacagtatggcgcttccgctatccagcctatatctgaggaaatgcagttgctgttaaccgtgtactacctggttcagctagcacatcagattagaaatcctgacgtatag

SEQ ID NO: 189954 - DNA, 5850 bp, synthetic construct
  misc_feature 1..5850: note = Description of Artificial Sequence: Synthetic coding sequence
  source 1..5850: mol_type = other DNA
atgggcaacagctacgccggccagctgaagaccacccggttcgaggaggtgctgcacaactcaattgaagccagcctacggagcaacaatctcgtaccccgacccattttctcccaactttaccttgaagcagagcagcagctcgccgccctagagggcggcagtcgagttgataacgaagaagaggaggaggagggcgagggcgggctggagacgaacggacctccaaatccttttcaactccaccctctgccagaagggtgttgtacgaccgatggcttctgtcaggccggaaaagacctcagactggtcagtattagcaacgagccaatggatgtgccagccggtttcctgcttgtgggtgtgaaatcccctagtctgcccgatcatctcctcgtgtgcgccgtggacaaaagatttctccctgacgacaatggtcacaacgccttgcttggtttctctgggaactgtgtcggctgtggaaaaaaagggttctgttacttcacagagttttcaaatcatatcaacttaaaactaacgacacagcctaagaagcaaaagcacctcaagtactatttggtgagaaacgctcagggcaccttgacaaaaggacctctgatctgttggaagggtagtgagtttcgttccaggcagatccctgcatcaacttgctcttcttccctgttccctgcgctcgaatcaaccgccgcatttccatccgagccggtccccggaacaaaccccagcattctgatgggcgcacagcaggccggccctgccagtgaccatccaagtctgaacgccgcaatggggcctgcagtgttcaacggtaaggattcaccaaaatgccagcaactggctaaaaacaatctgctggccctgccaagaccctctgccctgggcattctatccaacagtggaccccctaagaagagacacaagggttggtcgccggagagccccagcgcccccgatggtgggtgtccgcaaggcggcggcaatcgggcaaagtacgagtctgcaggaatgagttgtgtcccacaggtggggctcgtcggccctgcaagcgtaacctttcccgtggtggcttcaggtgagccagttagcgtcccggacaacctgctgaagatttgcaaagccaagcctgtaatttttaagggacacgggaactttccctatttgtgtgggaatcttaatgacgtcgttgtgtctcctttactgtacacttgctatcaaaatagccagagtgtctccagggcttatgagcaatacggggcaagcgcgatccagcccatttctgaggaaatgcagctcttgctcaccgtttactacctggtccagctggctgcagatcaggttcctctcatggaggacctggaacagatcttcctcagatcctggagagaaagccatctgactgaaataaggcagtaccagcaggcaccacctcaaccatttccacctgccccttccgccgcagctcccgtcacatcggctcagctcccctggctggccagcctcgccgcttcttcatgcaacgactctgttcacgtaatcgaatgcgcttattctctcgccgagggcctatctgagatgtttcgcctgctggttgagggaaagctggcaaagacgaattacgtagtcatcatttgtgcctgccggtccgctgcaattgatagttgcattgccgtgaccggaaaataccaggccaggatcctcagcgagagccttttaacacctgcagagtatcaaaaagaggtgaactatgagctcgtcaccggtaaggtggattctctcggcgctttcttcagcaccctgtgcccagaaggcgatattgacatcctgctcgataaatttcaccaggagaaccaggggcacatcagtagcagcctagccgcaagcagtgtgacgaaagccgcctctctggatgtgtccggtacccctgtgtgcacttcttacaacctggagccacatagtatccgccctttccaactggctgtggcgcagaagctgctctcccatgtctgttcgatagctgactcaagcacccaaaacctagaccttggttccttcgagaaagttgattttctcatatgcatccctccgagtgaggtgacataccagcagactctcctgcacgtgtggcatagcggcgtgctgctggagctcgggctgaagaaggaacacatgactaagcagcgcgttgagcagtatgtcttgaagctcgataccgaggcacagaccaagttcaaggcatttttgcagaatagctttcagaaccctcacaccttattcgtcttgattcacgatcatgctcattgggatctcgtctctagcactgtgcacaacctgtactcacagagcgatccctcagtcgggctggtagaccggctcctgaactgtcgcgaagttaaagaggcccctaatattgtgaccttgcacgttacgagttttccgtacgccttgcaaacacagcacacactgatttccccttataatgaaattcactggcctgcctcctgtagtaatggtgtggatttgtatcacgagaataaaaagtatttcggcttaagcgagttcattgaatccactctctccggacattcactgcccctgctcaggtacgactcatccttcgaagcaatggtcaccgccttggggaagcgcttcccgcgtctgcactctgccgtgattcgtacctttgtgttggtgcaacattatgccgctgccctcatggcagtctcaggcctcccccagatgaagaattacacgtcagttgagaccctggagatcacccagaatctgctcaactcccctaagcagtgcccctgtggccacggacttatggtattgcttagagtcccctgctcccctttggcagttgtggcatacgagcggctggcccacgttcgcgcgaggttggccctggaggagcatttcgagatcatattgggaagtccctcatctggcgtcaccgtgggtaaacacttcgtgaaacaactcaggatgtggcagaagatagaggatgtggagtggagaccccagacttatcttgaactcgaaggactgccttgcatcctgattttctccggaatggatccacacggcgagtccctgcctcgttcactcaggtattgtgatcttcggctgatcaattcatcttgtttagtgaggaccgctctggagcaagagctcggcctcgcggcgtactttgtgtccaatgaagtgccgctagagaagggggcccgaaatgaagcgctggaaagcgacgccgagaagctgagcagcacggataatgaagatgaagagctgggcaccgaaggcagcactagcgagaaacgttctcccatgaaacgggaacgaagccgcagccatgactctgccagttccagcttgtcatcaaaagcttccggaagtgccttgggcggagagtcctccgcacagcccactgccctgccacagggcgaacacgcccggtctcctcagccacgcgggcctgccgaggaaggcagggccccgggcgagaagcaaagaccacgagcctcccagggccccccttcagcaatcagcagacacagtcctgggcccacgccccaacccgattgctcactgagaaccggccaaagatctgtgcaagtctcagtcaccagctcctgttcacagctcagcagcagctcaggctcttcatctagttctgttgcacccgctgcgggaacctgggtcctgcaggccagtcaatgttcccttacgaaggcctgtcggcaaccaccaattgtgttcctcccaaaattggtgtacgatatggtagtctcaactgacagtagcggcctccccaaggctgcatcactgctccctagtccctccgttatgtgggcctcctccttcaggcccctcctatccaaaaccatgacgtccactgaacagagcctgtattatcggcagtggactgtgccccgccccagccacatggattatggtaaccgtgccgagggccgcgtcgatgggttccacccacggcggctgctactcagtggtcctccacagatcggaaaaacaggggcctacctgcagttcctgagcgtactcagtcggatgctggtgagactaacagaagtcgatgtgtacgatgaagaagagattaacatcaatcttagggaggaatcagattggcactacctccaactctctgacccgtggccagacttggaactttttaaaaaattaccttttgactatatcatccatgaccctaaatatgaggacgcctcgctcatctgttcccattatcagggcattaagtcagaggaccgcggaatgtcgaggaagcctgaagacttgtatgtgcggcgccagaccgctcgaatgagattatccaagtacgctgcgtataacacctaccaccactgtgaacaatgtcaccagtacatgggctttcatccgaggtaccagctgtatgagtccacactgcacgctttcgccttctcttatagcatgctcggggaggagattcagctccatttcattattcccaaatccaaggagcaccatttcgtgttctcacagcctggaggtcagctggagagcatgcggctgccactggtaaccgacaaaagccatgaatatattaaaagccccacattcacgccaaccacaggacgccacgaacatggcttgtttaacttgtatcacgcaatggacggggcctctcacttgcatgtgctagtcgttaaagaatacgaaatggccatctataagaagtactggccaaatcacattatgcttgtcctgccttccatcttcaattcagccggagtgggggctgctcactttctcatcaaagaactatcataccacaacctggagctggagagaaacagacaggaggagctcggaattaaaccacaagatatctggcctttcatcgtaatctctgacgattcctgtgtgatgtggaatgtggtcgatgttaacagtgccggtgagcgctcccgtgagttttcttggagcgaacggaatgtttccctcaaacacattatgcagcacattgaggcagcccccgatattatgcactacgccctcctgggtttacgcaagtggagcagcaagactagggctagtgaagtgcaggagccattcagtaggtgccacgtgcataacttcattattctgaacgtcgaccttacccagaacgtccagtacaaccagaatagattcttgtgtgacgacgtggattttaatctcagagttcactctgccggacttttgctgtgtcggttcaatagattctccgttatgaagaagcagattgtggtgggcggacaccgctcattccacatcaccagtaaggtctctgacaatagcgctgccgtggttcccgcccagtacatctgtgctcctgatagcaaacatacattcctggccgctcctgcccagctgctgctcgaaaaattcttacaacatcattctcacctgtttttccccctgtctttgaaaaaccatgatcaccccgtgctcagcgtggactgctacctgaatctcgggtcacagatctcagtttgctatgtgtcgtctcggccacacagtctgaatatctcttgttccgatttgttgttttcaggtctgctcctgtacttatgcgactcattcgttggcgctagctttctgaagaagttccatttcttaaaaggggccacactgtgtgtaatctgtcaggaccgctccagcctgagacagaccgtggtgaggctggagctcgaggatgaatggcagttccgcttgcgggacgaatttcagaccgcaaacgccagggaggatcggcctctattcttcctgaccggccgccatatctag

SEQ ID NO: 189955 - DNA, 1188 bp, synthetic construct
  misc_feature 1..1188: note = Description of Artificial Sequence: Synthetic coding sequence
  source 1..1188: mol_type = other DNA
atgaccctgcggcggctgcggaagctgcagcagaaggaggaggccgcggcaactcccgaccctgcagcccggactcctgattccgaagttgctcctgccgcacctgtgccaacacccggcccccccgcggcagctgcaacccccggtcccccagccgatgaactgtatgccgctctagaagattatcatcccgcggagctgtaccgagctctggccgtgtccggtggaaccctccctaggagaaaagggagcggatttcgatggaaaaacctctctcagtccccagaacagcagcggaaggtgcttacattagaaaaagaagacaaccagacatttgggttcgaaattcagacttacgggcttcatcacagagaagaacagagggtagagatggtgaccttcgtatgccgcgtgcacgaatccagccctgctcagttggccggcctcacccctggtgacacgatcgccagcgttaatgggctcaatgtggagggtattcggcatagggagattgtcgacatcataaaggctagcggcaatgtcctgcgcctagagacattatacggaacaagcattcgtaaagccgaactggaagcaagattgcagtatctgaaacagactttgtatgaaaaatggggcgagtataggtcgttaatggtgcaggagcagcggttggtacacggtctggtagtcaaggaccctagcatctacgacactttggaaagcgtgcggagttgcctttacggtgcaggcctgctgccaggatcccttccattcggccctctgctagccgtgcccggccggcccagagggggcgcacgccgcgccaggggggacgcagatgacgccgtgtatcatacatgcttcttcggcgacagcgaaccacctgcccttcccccccctccgccgcctgctcgcgcattcggtcccggtccagccgagacaccagccgtgggccctggacctggaccgagggccgccctgtccagaagcgcaagcgtgagatgcgccgggccaggcgggggtgggggtggtggtgccccaggggccttatggaccgaagcgcgtgaacaggctttgtgtggccccggcttgcggaagacaaagtatcgttcttttagaagaagattactcaagtttattcctggtctgaataggtctttggaagaggaagagagtcagctctag

SEQ ID NO: 189956 - DNA, 759 bp, synthetic construct
  misc_feature 1..759: note = Description of Artificial Sequence: Synthetic coding sequence
  source 1..759: mol_type = other DNA
atgaccctgctgcccagcaagggcggcgacaccatcgccagcgtgaacggcctgaacgtggagggcataagacacagggagatagtagatatcattaaagctagcggaaatgttctgaggcttgaaaccctgtatgggacatccatccggaaggccgagctggaggccaggctacagtatcttaaacagaccctgtacgagaaatggggggaatacagatctctgatggtacaggagcagcgcctggtccacggcctcgtcgttaaagatccgtccatttatgatactcttgaatctgtccgctcctgcctgtacggagcagggcttctacccggttcactaccttttggtcctctgttagcagtgcccggccgcccccggggcggggctcgccgcgcccgaggtgatgcggatgacgctgtctatcatacttgcttctttggcgattcagaacctcccgctctcccaccccccccacctccagctagggcttttggaccaggtcctgccgaaacccctgccgtgggtccaggccctggcccacgcgcagccctatctcggtcggccagtgtaagatgcgctggccccggtgggggtgggggagggggcgctccaggagcactttggactgaagctcgcgaacaagctctgtgcggccctggtctacgcaagacgaagtatcggagttttcgccgcaggctgctgaaatttattcccggcctgaacagatcactagaagaagaggagtctcaactctag

SEQ ID NO: 189957 - DNA, 759 bp, synthetic construct
  misc_feature 1..759: note = Description of Artificial Sequence: Synthetic coding sequence
  source 1..759: mol_type = other DNA
atgaccctgctgcccagcaagggcggcgacaccatcgccagcgtgaatggtctgaatgtggaagggattcgtcaccgcgaaatcgttgacatcatcaaggccagcggcaacgtgttgaggttggaaactctgtacggaacttccattaggaaggctgagttggaggctagactgcaatatttgaaacaaactttgtatgagaaatggggagaatatcgctctctcatggtacaggagcagaggctcgtccacgggctggtcgttaaggacccaagtatctatgataccctcgagtcagtccgcagctgcttatatggagccgggcttctccctgggtcactccccttcggccccctgctggctgtgcccggtcgacctagaggcggcgccagacgagccagaggcgacgccgacgatgcggtttatcacacatgcttttttggagattctgaaccccccgcactgcctccacctcctccaccggcgagagcatttggtcctggtcctgccgaaacccccgccgtcggcccggggcccgggcccagggctgccctatctcgctccgccagcgtgaggtgcgccggccccggtgggggtggagggggaggggcaccgggggccctgtggacagaggcccgcgaacaggctctgtgtggacctggtttacgcaagacaaagtatcgttccttccgacggcgcctgctgaagttcataccaggtctcaatcgtagtctggaagaggaggaatcacagctctag

SEQ ID NO: 189958 - DNA, 654 bp, synthetic construct
  misc_feature 1..654: note = Description of Artificial Sequence: Synthetic coding sequence
  source 1..654: mol_type = other DNA
atggccgcccagtgcgtgcggctggcccggcggagcctgcccgccctggctctgtccctccgcccaagcccaagattgctgtgtacggccaccaagcaaaaaaactccggccagaacctggaggaagacatgggccagagcgagcagaaagcggatccccccgccactgaaaagacattactggaggagaaggtgaaactggaggaacaattgaaggagaccgttgagaaatataagcgcgccctggcagatacagagaacctgagacagagaagccagaagctggtagaagaggccaagctatacggtattcaggccttctgtaaggacctgctagaggtcgcggacgttctggaaaaagccacccagtgcgtcccaaaggaagagatcaaagacgacaatccgcacttgaagaacctctatgagggacttgtgatgacggaggttcaaatccagaaagtgtttaccaaacatggactattaaagttgaaccccgtcggggccaagtttgacccttacgagcatgaggccctttttcacacccctgtggaaggcaaagagcccgggaccgttgcacttgtgagcaaagtggggtacaagttgcacggccggactctgcggcccgccttggtgggagtggttaaagaagcttag

SEQ ID NO: 189959 - DNA, 591 bp, synthetic construct
  misc_feature 1..591: note = Description of Artificial Sequence: Synthetic coding sequence
  source 1..591: mol_type = other DNA
atggccgcccagtgcgtgcggctggcccggcggagcctgcccgccctggctctgagtcttcgaccctcgcctcgcctcttatgcaccgccactaaacagaaaaactccgggcagaatctggaagaagatatggggcaaagcgagcagttgaaagagaccgttgagaaatacaaacgggcccttgccgataccgaaaatctcaggcagcgatcacaaaagctggttgaggaagctaaactctacggaattcaggcattctgtaaggacttgctcgaggttgccgatgtactcgaaaaagccacacagtgcgtgcccaaggaagaaattaaagatgacaatccccacctgaaaaacctctatgaggggctggtgatgactgaggtccagattcagaaagtgttcactaagcacggtctactcaagctgaaccctgttggagccaagtttgacccgtacgaacacgaggctctgtttcacacccccgtagaaggcaaggagccaggaacagtcgccctggttagtaaggtgggctataagcttcatgggcgcactctacgcccagccttggtaggggttgtcaaggaggcgtag

SEQ ID NO: 189960 - DNA, 2880 bp, synthetic construct
  misc_feature 1..2880: note = Description of Artificial Sequence: Synthetic coding sequence
  source 1..2880: mol_type = other DNA
atggccctgctgggcaagcggtgcgacgtgcccaccaacggctgcggacctgacaggtggaactccgcattcactcgcaaagacgagataatcacatctctggtgtccgctctggactctatgtgctctgctctgtccaaacttaatgctgaggtggcctgcgttgccgtgcatgacgaatctgcttttgttgtagggaccgagaaaggacggatgtttctaaacgctaggaaggagctccagtcagattttctgcggttctgtcgcggcccaccctggaaagaccccgaagccgagcacccaaagaaggtgcagaggggtgagggaggcgggcgctcactgccaaggtcctcgctggagcatgggtctgatgtttacctgttaagaaagatggttgaggaagtattcgacgtactgtattcggaggccctggggcgggcatccgtggtgcctctcccatatgaaagattgttaagagagcccgggttgttggctgtgcagggcctccccgaagggttagcattcagaaggccagccgagtatgatcccaaagcgctcatggcaatcctggaacactcccacagaatccggttcaaactgaaacgaccacttgaggacggaggcagagactcaaaggcactggtcgagctgaatggcgtgagcctgattccaaagggatcacgtgactgtggactccacggccaggcacctaaggtgcccccccaggatctgcctccaacagcaacaagttctagtatggcaagtttcctctactctactgcgttgccaaatcacgctattcgggagctaaaacaggaagccccatcttgcccacttgcgccgtccgaccttggcctgagcagaccaatgcccgaaccaaaggcgacaggagctcaggattttagcgactgctgcggacaaaaacccacagggcctgggggccccctaatccaaaatgttcatgcctccaagcggattctgttctcaatcgtgcacgacaagagcgagaagtgggatgcctttatcaaggagactgaagatatcaacactctgcgcgaatgcgttcagatactcttcaacagcaggtacgctgaggcactgggcctcgatcacatggtgcctgttccctacagaaaaatcgcttgcgaccctgaagctgtcgagatagtaggaattccggacaaaatcccctttaaacggccctgtacctatggtgtccccaaactgaagaggatactggaagagcgacactccattcatttcattattaaacgaatgtttgatgagagaattttcacaggtaacaagttcacgaaggatacaaccaaactggagcctgcctcgcctcctgaggacaccagcgcagaggtaagtcgcgcaacagttctggacctggccgggaatgcaagatccgataagggttccatgtccgaagactgcggtcccgggactagcggagaactcggcggtctgcggccgatcaagatagaaccggaggatttagatattatccaagtgactgtgcctgatccttctcctacttccgaagagatgaccgactccatgccaggccaccttccgtcagaagactcaggttacggtatggagatgctgactgacaagggactctcggaagatgcaaggcctgaggaacgacctgtcgaagattcacatggggacgtaatacgacccttgcgaaaacaagtagagctcctgttcaataccagatatgctaaggccattgggatctctgaaccagtgaaagtgccttactccaagttcttgatgcatcccgaggaactattcgtggtcgggcttcctgaaggaatttcgctgcggcgaccaaactgttttggtatcgcgaagttgaggaagatccttgaggctagtaattcaatccagttcgtcattaagcggccggagttgcttaccgagggggtgaaagagcccattatggattcccagggcaccgcgtctagcctcggttttagccccccagctctgccgcctgagagggactctggggaccctctggtcgacgaatccttaaaacgccaaggttttcaggagaattacgatgcccggctgtctcggattgacatcgccaacaccctgagagaacaggtacaagatttgttcaacaagaagtacggagaggcgttaggcatcaaataccccgtgcaggtgccctacaagagaataaaatcaaatccaggaagcgtgataattgagggtctccctccaggaatcccattccggaaaccgtgtacatttggctcacaaaatttggagcgcatccttgcagtcgcggacaaaattaagtttactgtcacccggccatttcagggtctgattccgaaacctgatgaagatgacgcaaacagacttggggagaaagtcattctgagggagcaggtcaaagagttattcaatgagaaatacggggaagcgttgggactgaacaggccagtgttggtgccatacaagctgatcagggatagccccgacgcagtcgaggtgacaggacttccagatgacatcccattcagaaacccaaatacatatgatatccaccgccttgaaaaaatcttgaaagcgagggagcacgtccgaatggttatcataaaccaactgcaaccctttgctgaaatctgcaacgacgccaaagttcccgccaaggattcatctataccgaagagaaaaagaaaacgcgtgagtgaagggaactccgtgtcttcgtcctcaagtagctcctccagttcttctagcaaccctgattccgtcgccagcgctaatcagatttctcttgtccagtggccgatgtatatggtagactacgcaggcctgaatgtgcagttgcccggcccactaaactactag

SEQ ID NO: 189961 - DNA, 2835 bp, synthetic construct
  misc_feature 1..2835: note = Description of Artificial Sequence: Synthetic coding sequence
  source 1..2835: mol_type = other DNA
atggccctgctgggcaagcggtgcgacgtgcccaccaacggctgcggaccagacagatggaattccgcctttactcgtaaggacgaaatcatcacctctctagtcagcgctctggattctatgtgctccgccctgtcaaagctgaatgctgaggtcgcctgcgtggccgtgcatgatgaatctgctttcgtggtcggcacagagaaaggtcgaatgttcctgaacgccaggaaggaattgcagtccgattttctaaggttttgtcgtggcccgccctggaaggaccccgaggccgaacaccccaagaaggttcagcgcggagaaggagggggcaggagcctgcctcggagcagcctggaacatggaagtgatgtctaccttttacggaagatggtggaggaggtatttgatgtgctgtacagtgaggccctaggaagggcttctgtggtaccactcccctacgaaaggctgctccgcgaacccggcttgctcgccgtgcagggcctccccgaagggctcgcattccggagaccggctgagtacgatcccaaagccctgatggccatccttgaacattcgcaccgcatccgctttaagctgaagaggcctctggaggatggcggaagggactcaaaagctctggtcgagctgaacggtgtcagcctcatccctaaagggagcagggattgcggactgcacggccaagctcctaaagttccgccgcaggatttgccaccaactgcaactagtagttctatggccagcttcctctattctacagccctacctaatcacgccatccgagagcttaagcaggaagccccctcatgcccactggccccatctgatcttggtctttctcgaccgatgcctgaaccaaaagccactggtgctcaggatttctcagattgctgtggccagaagcctaccggccctgggggaccgctgatacaaaacgtacatgccagcaagaggatcctttttagcatcgtgcacgataagtccgaaaaatgggacgcatttattaaggagacggaggatattaacacgttacgcgaatgtgtgcagatcctgttcaattcgcgatatgccgaagctctggggctcgatcacatggtgccagtcccttaccgaaaaatcgcatgtgaccctgaagcagtggagatcgtcgggatccccgataaaattcccttcaagagaccctgcacctatggtgtgcccaaactgaaacggatattagaggagaggcattccatacatttcatcattaagcgtatgttcgacgagcggattttcactggaaacaaattcaccaaagataccaccaagctggagccagctagcccgcccgaggacacaagtgctgaggtatcaagggcgacagtgctcgacttagccggaaacgcgcggtcggataagggctctatgtctgaagattgcggacccggtactagcggggagctcgggggtctacggccgatcaagatagaacccgaagacctggatatcattcaggtcaccgtgccagatccatcccccacctctgaggagatgacagattcaatgcccgggcatctgccgtcagaggattccggatacgggatggagatgctgacagataaaggcctcagcgaggacgctcggcccgaggagaggcccgtggaagattcccacggcgacgtcattcgtcctctccggaaacaggtcgagctgttatttaatacccggtacgccaaagcaatcgggatctcagagccagtaaaagtgccatatagcaaattcttgatgcaccccgaagagctctttgtcgtaggtctgccagagggaatcagtctgagaaggcctaactgcttcgggatcgcaaaactgcgcaaaattctggaggccagcaacagcatccagtttgtaattaagagacctgagcttctaacagagggtgtcaaggaacccattatggattctcaggagcgagacagtggcgaccccctggtggatgaatcactgaaacgccagggatttcaagagaactatgacgcccgccttagccggatagacatcgccaataccctgagggagcaggtccaggacctctttaataaaaagtatggagaagcattgggcataaagtacccagtgcaggttccctataaaaggatcaagagcaatccggggtccgtcatcattgagggcctgcctccaggcatccccttccggaagccgtgcacctttggatcccagaacctagagcggatcttagcagtagccgacaagatcaaatttacagtgaccaggccgtttcaggggttgatcccaaaacccgacgaagacgatgcaaaccggttaggtgaaaaggtgatccttcgcgagcaggtcaaagagttgtttaacgagaagtacggtgaggcactggggcttaatcgcccagtcctcgtgccttacaagctgatccgcgattctcccgacgccgttgaggtaaccggtctccctgatgacatcccattcagaaacccaaatacatacgatattcatcggctggagaagattctgaaggcccgggagcacgtgaggatggttattatcaaccaactgcagccattcgcagaaatctgtaacgacgccaaagtccctgccaaggattcctccataccaaagcggaaaaggaagcgcgtttcagaaggcaattccgtgagtagttcctcttccagctctagtagcagctcgagcaaccctgattccgttgcgtcagctaatcagatcagtctagtccagtggcccatgtatatggtagattacgcaggactgaacgttcaactccccggaccacttaattactag

SEQ ID NO: 189962 - DNA, 2931 bp, synthetic construct
  misc_feature 1..2931: note = Description of Artificial Sequence: Synthetic coding sequence
  source 1..2931: mol_type = other DNA
atggccctgctgggcaagcggtgcgacgtgcccaccaacggctgcggacctgatagatggaactcagcttttactaggaaggacgaaatcatcacaagcctggtctcggccttggactcgatgtgctcagcactcagtaagctgaacgcagaggtggcctgcgtggccgtccatgacgagtcagccttcgtggtgggcacagaaaaggggcgcatgtttcttaacgcccggaaagagttgcaatctgacttcctgaggttttgcctttcggcggcccagcacagggccgccacctctcagctggaaggaagagtcgtccggagagttctgacagtggcatccagagccctctgccctaccggcgggcccccttggaaggacccggaggctgaacaccccaaaaaggtgcagagaggcgaagggggtggcaggtcgcttccacgctctagcttggaacatggaagcgatgtgtaccttctgagaaaaatggtagaggaagttttcgacgtactgtatagcgaggccctcggaagggcgagtgttgtgcctttgccctatgaacggcttctccgcgaacccgggttactggcggtccagggcctgccggagggtttagccttccgccgccccgctgaatacgatccaaaggcactcatggccatcctggagcatagtcaccgtattcggttcaagcttaagaggcccctcgaagatggcggccgcgatagcaaagccctcgtggaattgaacggcgtttctctgattcctaaaggcagcagggactgtggacttcatggtcaggcgccaaaagtgccaccgcaggacctccctccaactgccactagtagctcaatggcgtcatttctatattccaccgcattgcctaaccacgctattcgcgagctgaagcaggaagctccatcatgcccactggccccttccgatctgggtctgtcccggccaatgccagagcctaaagccacaggcgcacaagatttttctgattgctgcggtcagaagccaacgggtcctggcggccccctcattcagaacgtgcatgcatccaagagaatcttgttctctatagtccatgacaaatccgagaagtgggatgcctttatcaaggagactgaagatatcaacacactccgggagtgtgttcagattctgttcaacagtaggtatgccgaagccctgggcttggatcatatggtgcctgtcccctatcggaaaattgcttgtgacccggaagccgtggaaatcgtagggattccagacaaaattccatttaaacgtccctgtacatacggtgtgccaaaactaaaaagaatcctggaggagcgccattctattcattttattatcaagcgcatgttcgatgaaaggatatttactggcaataagttcacaaaagatacaaccaaactggagcctgcatcaccccctgaggatacctctgccgaagtctctcgggctacagtcttggacctcgccggcaatgctaggtcagataaggggtctatgtccgaagattgtgggccgggaacaagcggagaactcggcggcctgaggccaataaagatcgaacctgaggacttagacattatccaggttaccgttcccgaccccagcccgacttccgaggaaatgacagactccatgcctgggcacctgcctagtgaggatagtggctacggaatggagatgctgacagataaaggactttctgaggacgcaagacctgaggagcgccccgtcgaagactcccatggcgacgtcataaggcctctcagaaagcaggttgaactcctgttcaacactcggtacgctaaagcgatcggaataagcgaacctgtcaaagtgccctatagcaaatttttgatgcatcccgaagaattgttcgttgtgggtctgcctgaaggcattagtctcaggcgtccaaattgttttggcatagctaagttgagaaagatactggaagcgagtaatagtatccagtttgtcatcaagaggcccgagctcctgactgagggtgttaaggagccgattatggattcccaagaaagggactccggagatcccctagtggacgagtcactgaaacgtcagggcttccaggagaactatgacgcacggttgagcaggatagatattgccaacactctccgagaacaggttcaggacctattcaacaaaaaatatggggaggccttggggatcaagtatccagtgcaggtcccttacaagcggatcaaatctaaccccggatcagtgattatagaaggattgcccccaggcatcccgtttcggaagccttgcacattcggttctcaaaacttagaacgcattctcgctgtcgcagacaaaatcaaatttaccgttacgcgtccattccagggtcttattccaaaacccgatgaagacgatgccaaccgtttgggagagaaagtcattttgagggagcaggtgaaggaactgtttaatgaaaagtacggtgaggccctgggcctgaataggcctgtcctagtcccatacaaacttatcagggacagccccgacgccgtggaggttacagggctgccagatgatatccctttccggaatcctaatacctacgatatacacaggcttgagaagatactgaaggcccgcgaacacgtgagaatggtgatcattaaccagcttcaaccattcgcagagatctgcaatgatgccaaagtaccagcgaaagattcctccatccccaaacgtaagcggaaaagggttagcgaaggcaattcagtgtcttcctcttctagttccagcagctcatcaagctcaaacccggattcagttgccagcgccaatcagatttcgctggtgcaatggcctatgtacatggtcgactacgctggcttgaatgtgcagctacctggacctctcaactactag

SEQ ID NO: 189963 - DNA, 609 bp, synthetic construct
  misc_feature 1..609: note = Description of Artificial Sequence: Synthetic coding sequence
  source 1..609: mol_type = other DNA
atgagctgcgtgccctggaagggcgacaaggccaagagcgagagcctggagctcccacaggccgcccctcctcagatctaccacgaaaaacagagacgcgagctgtgtgcactccacgccttgaataacgtgttccaggactccaatgccttcacccgcgataccctgcaggaaatctttcagagattgtcgcctaacaccatggttactccacacaaaaagagcatgttgggaaatggtaattatgacgtgaatgtgatcatggccgctctgcaaaccaaaggatacgaagccgtctggtgggataagaggagggacgtaggcgtgattgctttaacgaatgttatgggcttcatcatgaacctgcctagctcattgtgctggggtccacttaagctaccactgaagagacaacattggatatgcgtgcgggaggtggggggtgcatattacaatttggactcaaaactaaaaatgcccgagtggatcggaggcgagagtgagcttcggaagttccttaagcatcatcttcggggtaaaaactgcgaattgctgttggtcgtgcccgaagaggtggaggcccatcagagctggcgaactgacgtttag

SEQ ID NO: 189964 - DNA, 1545 bp, synthetic construct
  misc_feature 1..1545: note = Description of Artificial Sequence: Synthetic coding sequence
  source 1..1545: mol_type = other DNA
atgaagtggcggctgcaggagggccggggcgaggccgtgtaccagatcggagtcgaggacaacggacttttggtgggtctggccgaggaggagatgcgcgctagtctgaagaccctgcaccggatggccgagaaagttggcgccgacatcaccgtcctgcgcgaacgtgaggtagactacgacagcgacatgccccggaaaatcacagaggtccttgtgaggaaagttccagacaaccagcagtttctggatctccgcgtcgccgtcttaggtaacgtagactctgggaaatcaacattgctgggcgtactaacacaaggggagctggacaatgggcgcggacgggccagactcaacctattcaggcacctgcatgagattcagtccggccggacatcatccatctctttcgaaatcctcggctttaattccaaaggagaggtggtcaattactctgattcacggacagctgaggaaatttgcgaatcttccagcaagatgatcacctttatcgacctcgccggccaccacaaatacctgcacaccactatttttggtctgactagttattgccccgactgtgctttgctactagtgtcggctaatacaggcatcgccggaaccactagggagcacctgggcttggccctcgctttaaaagtgcccttctttattgtggtttcaaaaattgacctctgcgcaaaaaccacggtcgagaggacggtgaggcagcttgaaagagttctgaaacagcccgggtgtcacaaggttccaatgttggtcacttcggaagatgacgctgtaactgctgcacagcagtttgcccagtcaccgaacgtgactcccattttcacactctcctcagttagcggcgagtcactcgacctactgaaagtgttcttaaacattttgccacctttgaccaacagcaaggagcaggaagagctcatgcagcagttaaccgaattccaggtcgatgaaatttacacagtgcccgaagtgggcaccgtagtcggcggaacactgagctccggcatctgtcgggagggcgaccagcttgtggtgggtcccacggacgatggatgctttctcgagctccgcgtctgctccattcagaggaatcgttcggcatgccgtgtactgagagcagggcaggccgcgacccttgcccttggagatttcgatcgggccctgttgagaaaaggtatggtgatggtaagtcccgagatgaatccgacaatttgttctgtcttcgaagcagaaatcgtcctgctctttcatgccaccacattccggcgcggcttccaggtgacggttcatgtcggcaatgttaggcagactgccgttgttgagaagatccatgctaaagataagttaaggacaggagagaaagccgtggtgaggttccggttcctgaagcacccagaatatctcaaggtgggcgctaagctcctattccgggaaggggtcacgaagggtataggtcacgtaacagatgtgcaagccataactgccggcgaggcgcaggctaacatgggattctag

SEQ ID NO: 189965 - DNA, 1809 bp, synthetic construct
  misc_feature 1..1809: note = Description of Artificial Sequence: Synthetic coding sequence
  source 1..1809: mol_type = other DNA
atggacagccgggtgagcgagctgttcggcggctgctgccggcccgggggtgggcctgccgtgggcggaacactgaaggcgagaggagctggaagttcttcggggtgtgggggacccaagggcaagaagaaaaacggccggaatcgtggcggcaaagccaataatccaccctacttgcctcccgaggcggaggacggcaatatcgagtacaagcttaagctagttaatccttcacagtatcgattcgaacacctcgtgacccagatgaaatggaggctgcaggaaggcaggggagaggctgtctatcagattggggttgaggataacggccttcttgtgggcttagctgaggaggagatgcgcgcctctctgaaaacccttcaccgaatggctgaaaaggtgggggcagatatcaccgttctccgagaacgcgaggtagattacgatagcgatatgcccagaaaaatcacagaagtgctagtgcgtaaggtgccagataatcagcaatttctggatctgcgcgtagcggtgctaggcaacgtcgattccgggaaatccactctgttaggcgtgcttacgcagggcgaacttgacaacggacggggcagagctagactgaacctattcagacatctacacgaaattcagagtggtagaaccagctctatctccttcgaaatattgggcttcaacagtaaaggcgaagtcgtgaattatagtgatagcagaacagcagaagagatttgcgaatcatcgagcaaaatgatcacgttcatcgatctggctggccaccataagtacctgcacacaaccatttttggcctaacgtcctattgtccggactgcgcactcctcctggtttctgcgaatacaggaatcgccggaaccactagggagcacctgggcctggctctggcactgaaggttcccttcttcattgtcgtctccaagatcgatctctgcgctaaaactacagttgagaggactgtgagacagctcgagcgcgtcctcaaacaaccagggtgccataaggtgccgatgttagttacatccgaggatgacgccgtcactgccgcacagcagttcgcacagagccccaacgtgacccccatctttaccttgagtagcgtttccggagaaagcttggacctgttgaaggtttttttgaatatcctcccccctctgactaacagcaaagagcaggaagagctcatgcagcagcttacagagtttcaggttgacgagatctacaccgtccccgaagtcggaacggtggtgggtggaaccctgagttcaggtatctgtcgagagggtgaccagctggtcgtgggacccaccgacgacggctgcttcctcgagctcagggtttgctccatccagcgaaaccggtctgcctgccgagttttacgggccgggcaggccgcaaccctcgcacttggggatttcgacagggccctcttgagaaaggggatggtcatggtgtcacccgaaatgaatccgacaatctgcagcgttttcgaagcggaaatagtcttactatttcatgcaaccactttccgccggggttttcaggtgacagtgcacgtgggaaatgttcgtcagaccgccgttgttgagaaaattcacgccaaggataagctgcgcacaggggaaaaagccgtggtccggtttcggttcctgaagcatcccgaatacttgaaggtcggtgccaaattgctctttagagagggcgtcacaaagggtatcggacatgtgacggatgttcaggcaattacagctggggaggcccaggcgaatatgggcttttag

SEQ ID NO: 189966 - DNA, 735 bp, synthetic construct
  misc_feature 1..735: note = Description of Artificial Sequence: Synthetic coding sequence
  source 1..735: mol_type = other DNA
atgaagtggcggctgcaggagggccggggcgaggccatcttcaccctgagctctgtgtccggagaatcattagacctactgaaagtgtttctgaacatactgcctcctctgacgaattctaaggagcaagaggagcttatgcagcagcttaccgagtttcaggtcgatgagatatataccgtgcctgaagttggaacggtggtgggagggaccctcagttccggcatatgtcgagagggagaccagttggtagtgggccctaccgacgacggctgcttcctggagctccgtgtttgctcaattcaaagaaacagatccgcttgtcgggtcttgcgcgccggccaagcggccaccctggcactgggcgatttcgacagggccttgctgcggaaaggcatggtaatggtttcccctgagatgaaccctaccatctgcagcgtgttcgaagctgagatagtattgctgttccacgcaaccaccttccgccgcggctttcaagtgaccgtgcacgttggtaacgtccgccagacagccgttgtggagaaaattcacgccaaagataagcttcgtacaggtgagaaagctgtggttcggtttcgatttcttaagcaccccgagtatttaaaggtgggtgccaaacttctcttcagagagggagtgaccaaaggaatcggacacgtcacagacgtgcaggcaattactgccggggaagctcaggccaacatggggttttag

SEQ ID NO: 189967 - DNA, 462 bp, synthetic construct
  misc_feature 1..462: note = Description of Artificial Sequence: Synthetic coding sequence
  source 1..462: mol_type = other DNA
tgaggcatctgccgggagggcgaccagctggtggtgggccccaccgacgatgggtgctttctggaactgcgggtgtgcagcatacagcgcaaccggtccgcctgccgcgtactgcgggcagggcaggcagccacccttgccctgggagatttcgaccgcgccctgctgcggaaaggcatggtgatggtgagcccggagatgaaccccacaatctgttctgtgtttgaggcagagattgtcctgcttttccacgccacaaccttccggagggggttccaggtaacagttcacgtgggaaatgtccgccaaaccgccgtggtggaaaagatccacgctaaggacaaacttaggaccggggagaaggccgtggcaagagaacgcggagtcctttcggcaacctgcagtcttcctacgttctggagaggagcaaagctgggggtggccagaaaaggtcagtcttag

SEQ ID NO: 189968 - DNA, 465 bp, synthetic construct
  misc_feature 1..465: note = Description of Artificial Sequence: Synthetic coding sequence
  source 1..465: mol_type = other DNA
tgaggcatctgccgggagggcgaccagctggtggtgggccccaccgacgacggttgctttctcgagctgagagtgtgttccatacagaggaatagatccgcctgtcgagtgcttcgggccggacaggccgccacgctcgccctcggtgattttgatagggcccttctgagaaaaggaatggtcatggtaagccctgaaatgaatcctaccatctgttcagtctttgaagccgaaatcgttctgctatttcacgccaccacattcaggcgaggctttcaggtgacagtgcacgtcggcaacgtgcgacagacggccgtggtggaaaagatacacgccaaagttaggggcacctggccaagcatttctcctgaggtccgcaaggagggaggcctgccgcagaccggtagggaactgctggacccaacaatgggcattaagccccacctgggttgggtcgccgcatag

SEQ ID NO: 189969 - DNA, 543 bp, synthetic construct
  misc_feature 1..543: note = Description of Artificial Sequence: Synthetic coding sequence
  source 1..543: mol_type = other DNA
atgcagcagctgaccgagttccaggtggacgagatctacaccgtgcccgaggtcggcacagttgtgggcggcaccttgagctccggaatctgtagagagggagatcagcttgtggtgggccccactgacgacggatgcttcctagaactcagagtctgttccattcagaggaatcgctctgcttgtcgggtgctaagggctgggcaggcagccactctggcccttggtgatttcgaccgcgcactcttaaggaagggcatggtaatggtgtctcccgaaatgaatcctaccatctgttctgtgtttgaggctgaaatcgttctcctgttccacgcaacaactttccggcggggattccaggtaacagtccacgtaggcaacgtccgccagaccgcggtggttgagaagatccatgccaaggataagctgcgtaccggcgagaaggccgtggcccgcgaaagaggcgtccttagcgccacatgcagcctgccgaccttctggagaggagcgaagctgggcgtggccaggaaaggacaatcttag

SEQ ID NO: 189970 - DNA, 951 bp, synthetic construct
  misc_feature 1..951: note = Description of Artificial Sequence: Synthetic coding sequence
  source 1..951: mol_type = other DNA
tgacagggcggcggcgcccgggaggagaacaccagcttccggagccgggacccaagggaggaaggacagcgcctagacagccaagctgaagacgggaacattgaatataaattgaaactcgtaaatccgtctcagtaccggtttgaacacctggtgacccagatgaaatggcgccttcaggaaggccgaggagaggcagtgtatcagataggtgtagaagataatgggttgctggtggggctggccgaagaagaaatgcgcgcatctctgaaaactctgcacagaatggccgagaaagtcggggcggacataaccgttctgcgcgagagagaggtggactatgatagcgacatgccaagaaagattaccgaggtgctcgtgaggaaggtccctgataaccagcagttcctggatttacgtgtcgcagtgttgggaaacgtcgattccggtaagagtaccctgcttggggtgctgactcagggagaactggataacggtcgcggaagagcgcggcttaacctctttagacacctccacgagatccaaagcggtcgtaccagcagcatttccttcgagatcctcggattcaactccaagggggaggttgtgaactactccgatagccgtaccgccgaggagatttgtgaatcgtctagtaagatgatcacttttattgacctcgcaggtcaccacaagtacctgcacacaactatcttcggactgacaagctactgtccagattgtgcattgctgctggtcagtgcgaataccggcatcgctggaacaacacgagagcacctgggcctggccctcgcactcaaagtgcccttttttatagttgtcagcaaaatcgacctgtgtgcgaaaacgacagtggagcggaccgtccgacaactggagagagttctgaaacagccgggctgccacaaagtgccaatgctggtcacttag

SEQ ID NO: 189971 - DNA, 684 bp, synthetic construct
  misc_feature 1..684: note = Description of Artificial Sequence: Synthetic coding sequence
  source 1..684: mol_type = other DNA
atggacagccgggtgagcgagctgttcggcggctgctgccggcccggcggagggcctgcagtaggtggcactctgaaagcacgtggtgcaggatcctcttccggttgtggaggtcccaaaggcaaaaaaaagaatgggcggaaccgcggaggtaaagctaacaatccaccttacctgcctccggaggccgaggacggcaatattgagtacaaatacaggttcgagcacctggtgacacaaatgaaatggagattgcaagaaggtcgcggtgaagcggtgtaccagattggcgtggaggacaatggcctgctggttggactggccgaagaagagatgcgcgcaagcctgaagaccctccacaggatggcagaaaaggtcggggccgatattaccgtccttcgggagcgtgaggttgactacgatagcgatatgccacggaaaattacagaagttttggtacggaaggtgcccgacaaccagcagttcctcgaccttagggtggccgtattgggtaacgtcgatagcgggaagtcaactctcctgggagttctcacccagggagagctggacaatggaagaggaagagctagattaaacctttttcgccatctccacgaaatacagtccgggcggacctcttccatctccttcgagatcctcggttttaactccaagggcgaatag

SEQ ID NO: 189972 - DNA, 1221 bp, synthetic construct
  misc_feature 1..1221: note = Description of Artificial Sequence: Synthetic coding sequence
  source 1..1221: mol_type = other DNA
atggcccccgcccggtgcttcagcgcccggctgcggaccgtgttccagggggtcgggcattgggcactgagcacctgggcagggcttaagccttctcgtcttctcccccaaagggccagccctaggctgttatccgtcggccgggccgaccttgccaagcatcaggaactgcccgggaagaagctgctatccgagaaaaaattaaagagatactttgtggattatcgccgggttctggtctgcggtggcaatgggggggctggcgcctcttgtttccattcagagccgcgtaaagagtttggaggccccgacggaggcgatggcggtaatgggggccacgtgatcttacgtgtggatcagcaggtcaagtccttgagttcggtgttgtcccggtaccagggattttcgggtgaagacggcggcagtaaaaactgtttcgggcggtctggagctgtattgtatattcgagtccccgtggggaccttggtgaaggaagggggcagagtggtggctgacctaagttgcgttggcgatgaatacatcgccgcgctggggggcgccggcggcaaggggaataggttctttctggccaataacaatcgcgcccctgtgacttgcacccccgggcagcccggacagcagcgagtgctgcatctggagcttaaaactgtggctcacgcgggtatggtcgggtttcctaacgccggcaaaagctccctgttaagagctattagcaacgcccgccctgcggttgcctcatacccatttaccacacttaagccacatgtcggaattgttcattatgagggccacctgcagatcgctgtggcagatattcccggtataatacgaggcgcccatcagaaccgggggctcgggtctgctttcctgcgtcatattgaacgctgcaggtttttgctgttcgtggtagacctctcccagccagagccttggacccaggtggacgacctgaagtacgagctggagatgtacgagaagggcctcagcgcccggccccatgctatcgtggctaataaaatcgatctcccagaggcccaggcaaacctgagtcaactgcgcgatcatctgggacaagaagtgattgtcctgtcggctctaacaggagaaaatctggagcagcttttactgcacctgaaggttctctacgatgcttacgcagaagcagagctcgggcagggcaggcagccactgcgctggtag

SEQ ID NO: 189973 - DNA, 747 bp, synthetic construct
  misc_feature 1..747: note = Description of Artificial Sequence: Synthetic coding sequence
  source 1..747: mol_type = other DNA
atggcccccgcccggtgcttcagcgcccggctgcggaccgtgttccagggcgtggggcactgggccctgtccacctgggcaggactaaagcctagccggctactgccgcagcgggcttcgcctagattgctgagcgtgggcagagccgacctggcaaaacatcaggagctgcctgggaagaaattactgtccgaaaaaaaactaaagcgctatttcgtggattaccggagagtactggtgtgtggcgggaatggcggggcaggcgcttcctgctttcatagcgagccaagaaaggaattcggtggccctgatggcggggatggaggaaatgggggacatgtgatcttgcgggttgcagacatccccggtataatcagaggtgctcatcaaaatagagggttaggcagtgcctttctgcgacacattgaaagatgtcgcttcctgctttttgtggtagacctttctcagcccgagccctggactcaggtcgatgatttgaaatacgagctggagatgtatgaaaaagggctcagcgcaaggccccacgccatcgttgccaacaaaatagatctgcccgaggcgcaggcaaacttgtcccaactgcgcgatcacctcggtcaggaggtcatcgtcctctcggccctgactggagagaatttggagcagctgctgcttcacttgaaggtactctacgacgcgtacgccgaagcggagctgggacaaggcagacagcctctgaggtggtag

SEQ ID NO: 189974 - DNA, 702 bp, synthetic construct
  misc_feature 1..702: note = Description of Artificial Sequence: Synthetic coding sequence
  source 1..702: mol_type = other DNA
atggcccccgcccggtgcttcagcgcccggctgcggaccgtgttccagggagttgggcactgggcgctgagcacatgggccggcctgaaacccagtcgactgttgcctcagcgggcaagcccaaggctgctcagtgtagggcgggccgatctggctaagcaccaggagctgcctgggaaaaaactgctgagcgaaaaaaaacttaaacgctatttcgtggactatcgccgcgtgctggtgtgcggaggcaatgggggtgcgggcgcgtcttgcttccacagcgagcccagaaaggagttcggcggcccggatggtggagacgggggaaacggcggccacgtgatcctgagagtcgaccagcaagtgaaatccctatcttccgtcctgtccagatatcaaggtttttctggagaggacggcggcagcaagaactgctttggccggagcggagccgtgctgtacataagagtgcctgtcggcactcttgtgaaggaaggcggccgagtagtcgccgatctttcgtgcgtcggtgacgagtacattgccgctctcgggggagctggcgggaaaggaaataggttcttcctggctaacaacaatcgagccccagtgacatgtacccctgggcaacctggtcagcaacgcgttctccacctcgagcttaaaactgtggctcatgccgggatggttgggtttccatag

SEQ ID NO: 189975 - DNA, 537 bp, synthetic construct
  misc_feature 1..537: note = Description of Artificial Sequence: Synthetic coding sequence
  source 1..537: mol_type = other DNA
atggtgggcttccccaacgccggcaagagcagcctgctgcgggccatatctaacgcccgccccgccgtcgcctcttatcccttcaccacactcaagccccatgtcggcattgtccattacgagggccatttgcagatagcggttgctgacattcctggtataatccgtggagctcatcagaaccgtgggctgggctcagcatttctgcgccacatagagagatgtcggtttctgctgttcgttgttgatttgtcgcaacccgaaccctggacccaggtggacgacctaaagtacgaacttgagatgtatgaaaaaggtctgtcagctcggcctcacgccatcgtagcaaataagatcgatttacccgaggcccaggccaacttgtcacaattgcgcgatcacctcggacaagaggtgattgttctatccgcattgactggagagaacctcgaacagcttcttctgcatctgaaggttctttacgacgcttacgccgaggctgagctggggcaggggaggcaacctctgcgatggtag

SEQ ID NO: 189976 - DNA, 864 bp, synthetic construct
  misc_feature 1..864: note = Description of Artificial Sequence: Synthetic coding sequence
  source 1..864: mol_type = other DNA
cggagcaacctgaagcgggacgtggcccacctgtaccggggcgtgggtagtagatacatcatgggaagcggagaaagttttatgcagctacagcagcgtcttctaagggagaaggaggccaagatccggaaggcactggatcgtctgcgaaaaaaacggcacttactgagaagacagaggacccgtcgagaattccctgtgatatctgtggttggatacacaaactgcggaaagacaaccctgattaaagccttgactggggatgccgcgattcagcctcgcgaccagttgtttgcgacattagatgtgacagcacatgcaggaacactgccttctcgtatgaccgtcctgtatgttgataccataggctttctgtctcagctgcctcatggacttattgaaagcttttctgccaccctggaggacgttgcccatagcgacctcatcctgcacgtcagagacgtgtctcacccagaagccgaactgcagaagtgttcggtgctgagcaccctcagaggcctgcagctcccggctcccctcctggatagtatggttgaggtccacaacaaagttgacctcgttcctggttatagtcctacagaaccaaatgtggttcccgtgtcggccctcaggggtcatggcctccaggagctgaaggccgagctggacgccgcagtcctcaaagccaccgggcgtcagatccttaccctgcgagtgagattggcgggagcgcagctttcctggctgtacaaagaagcgacggtgcaagaggtggatgtcatcccggaggatggagccgctgatgttagagtcattatctccaacagcgcctacggaaaattccgcaagctgttcccagggtag

SEQ ID NO: 189977 - DNA, 864 bp, synthetic construct
  misc_feature 1..864: note = Description of Artificial Sequence: Synthetic coding sequence
  source 1..864: mol_type = other DNA
tgaagcaacctgaagcgggacgtggcccacctgtaccggggcgtgggatcaagatacattatgggcagcggagagtcttttatgcagttacagcagagacttctgagggagaaggaagctaaaatccgaaaagccctggaccgcctgagaaagaagagacacctgttgagaaggcagcggactcggagagagttccctgtcatctccgttgtgggctacacaaactgtggcaagactactttgatcaaagctctgaccggtgacgccgctatacagccccgcgaccagctattcgcaaccctggacgtgactgcccatgcaggtactctgccctcgaggatgaccgtattgtacgtggacacaatcggtttcctttcccaactccctcacggcctgattgaaagtttttccgcaaccctggaggatgttgcacactccgaccttattctccatgtgagggatgtgagtcaccctgaagctgagctgcagaaatgctccgttctcagcactctaagaggccttcagctgccagccccactcctggactctatggtggaagtgcacaacaaggtagatctagtgcctgggtacagtcctacggagcccaatgtggtgcccgtctcagctctacggggccacggcctgcaggagttaaaggctgagctggacgctgccgttctgaaggccacagggcggcagatcctgactctccgtgttcgtctggccggcgctcagctgagctggctttataaggaggccactgtacaggaggtggatgtcataccggaagatggggccgccgacgttagagtgataatttcaaacagcgcttatggtaaattccggaaactgtttccaggctag

SEQ ID NO: 189978 - DNA, 891 bp, synthetic construct
  misc_feature 1..891: note = Description of Artificial Sequence: Synthetic coding sequence
  source 1..891: mol_type = other DNA
atgaccctgaacaacgtgaccatgcggcagggcaccgtgggcatgcagccccagcagcagaggtggagcattcccgctgatggtcgccacttaatggtgcaaaaagagcctcaccagtattctcatcgcaatagacactccgctactccggaggaccactgtcgacgaagctggtcatccgacagcacagattcagtgataagctccgaatccggaaacacttattaccgagtcgtgctgatcggcgaacagggcgtggggaaatccactctcgctaatatattcgccggcgtgcatgattccatggactctgactgtgaggtcctgggcgaagacacatacgaacggactctgatggtcgatggcgaatcggccacaataatcttactggacatgtgggagaataagggcgagaatgaatggcttcacgatcattgcatgcaagtgggtgatgcatatcttattgtttatagtatcaccgaccgtgcatctttcgagaaagcttccgaactaaggatccagctcaggagggcacgccagacagaggacattccgatcattctggtgggtaacaagtctgatctggtccgatgtcgggaggtctccgtgtccgagggtcgagcatgtgccgttgtgtttgactgcaagtttatcgagaccagcgctgcagtgcagcacaacgttaaggaactatttgaggggatcgttcgccaggtcaggctacgcagggacagcaaagagaaaaacgaacgcaggctggcctatcagaaaagaaaagagagtatgccgcgcaaggccaggcgtttttggggcaagatagtagccaaaaataacaaaaacatggccttcaaactcaagagcaaatcctgtcatgatctttcagtgctctag

SEQ ID NO: 189979 - DNA, 891 bp, synthetic construct
  misc_feature 1..891: note = Description of Artificial Sequence: Synthetic coding sequence
  source 1..891: mol_type = other DNA
atgaccctgaacaacgtgaccatgcggcagggcaccgtgggcatgcagccacagcaacagcggtggtccattcctgcagacggccggcatctcatggtccagaaagaaccacatcaatactctcaccgaaatcgacattccgccactcccgaagatcactgtagacgcagctggtcatctgactcaaccgactcagtcatttcatcggaaagcgggaacacatattacagggtggtccttatcggcgagcagggcgtgggcaaatctactctggccaatatcttcgccggtgtccacgatagcatggatagtgattgcgaggtgttgggggaggatacttacgagcgcactttgatggtggacggggagtctgccaccatcattctcctcgacatgtgggagaacaaaggcgaaaacgagtggctgcatgatcactgtatgcaggtgggcgatgcctacctaatagtgtactcaattaccgatcgggccagctttgaaaaggcttccgaactgcgtatccagctgagacgcgcgcgacagacagaagatatccccattatcctagtgggtaacaagtctgacctggtgcgctgtagagaagtctctgtttctgaggggcgggcttgcgctgtcgtcttcgactgcaagtttatcgaaacatctgccgccgttcagcacaacgtcaaggaattgttcgagggtattgtcagacaggtgaggttaaggcgggacagtaaagagaaaaatgagagacgtcttgcctaccaaaagcgcaaagaaagtatgccccgtaaagccaggagattttgggggaaaatcgtggctaaaaataataaaaacatggcatttaagctcaagtctaaatcttgccatgacctctcagtgctttag

SEQ ID NO: 189980 - DNA, 282 bp, synthetic construct
  misc_feature 1..282: note = Description of Artificial Sequence: Synthetic coding sequence
  source 1..282: mol_type = other DNA
atgaccctgaacaacgtgaccatgcggcagggcaccgtgggcatgcagccccaacagcagaggtggtccatccctgccgatgggcgacaccttatggttcagaaggaacctcaccagtactcccatcgaaatcgtcatagcgcaactcccgaagaccactgccgacgatcctggagctctgattccacagactctgtgattagctcggagtctgggaatacatactacagagtcgtgctgattggcgagcaaggcgtgggcaagagcacattagcgaattag

SEQ ID NO: 189981 - DNA, 927 bp, synthetic construct
  misc_feature 1..927: note = Description of Artificial Sequence: Synthetic coding sequence
  source 1..927: mol_type = other DNA
atggtgatggagaagcccagccccctgctggtgggccgggagttcgtccgacaatactacacactgctcaaccaagcccccgacatgctgcaccgattctatggaaagaattcatcttacgttcatgggggactggacagtaatggcaagcctgcggacgcggtatatggtcagaaagaggtggaggaacctgaggaaaggcagcagacacctgaggtcgtgccggacgattccggcaccttttacgatcaagccgttgtttctaacgacatggaggagcaccttgaggaaccagtcgcagagccagaaccagaccctgaaccggagccggagcaggaaccagtcagcgagattcaagaggaaaagccccccagacccgaatccaaacccgagtcccagatacctccacagcgaccccagcgggaccaaagggtgcgcgaacagagaatcaatatccccccacaacggggccccagacctataagggaggcaggggaacaaggagatattgagccccggcgaatggtcaggcacccagactctcatcagttgtttattgggaacctgccgcatgaggtggataaatccgaactgaaggacttctttcaatcttacggcaacgtggtggaactccgcattaattccggtggcaaactgccgaactttggcttcgttgtttttgacgactccgaaccagtgcagaaagtactcagcaatcgaccaattatgttccggggtgaggttcgcttgaacgttgaggagaagaaaaccagagccgcacgcgagggcgacaggcgtgataaccgactgaggggacccggaggaccacggggtggactcggagggggcatgagggggccaccacgagggggcatggtacagaagccagggtttggcgttggaagaggactcgcccctcgtcagtag

SEQ ID NO: 189982 - DNA, 1401 bp, synthetic construct
  misc_feature 1..1401: note = Description of Artificial Sequence: Synthetic coding sequence
  source 1..1401: mol_type = other DNA
atggtgatggagaagcccagccccctgctggtgggccgggagttcgtgcgtcaatactatactctgctgaatcaggctccagacatgctgcatagattttatggcaagaactcctcttacgtgcacggaggactggattctaatggcaagccggcagatgcagtgtacggccagaaagaaatacacaggaaggtaatgtcccagaattttactaactgccataccaagattcgacatgtagatgctcatgctacactgaacgatggggtggtagtacaagtcatgggcctgctatcaaacaacaatcaggccctgagaagattcatgcagacatttgtacttgcacctgaaggttccgtggcgaataaattttatgttcacaatgacatctttaggtatcaggatgaagtgttcgggggcttcgtgacagagccccaagaggaaagtgaggaagaagtcgaagagcccgaagagagacaacagaccccagaggtggtacctgatgattcaggaacattctacgatcaagccgtggtgtctaacgatatggaggagcacctggaagagccagtggccgagccggaaccagaccccgagcctgagccggagcaggaacctgtatctgaaatacaagaagaaaaacccgagccagtgctggaagaaaccgcaccagaagacgctcagaagtcaagcagtcccgcgccagccgatattgctcagacagtgcaggaggatctgcgcactttttcttgggcgtctgtgacctcaaagaacctgcctccatccggcgcagtgcctgtaaccggcattcctcctcatgtggtcaaagtgcctgcttcacagccacggcccgaatcgaaaccggagtcccagattccaccacagcgtccgcagagagaccagcgggtgagagaacagagaatcaatattccaccccaacgtgggccgcgacccattcgggaggccggggagcagggcgacatagagccacggcgcatggtgcgccaccccgactcccaccagctgttcatcggtaatctgcctcacgaggtggataagtcggaattgaaggatttcttccagtcctatggaaatgtggtggagctccgcatcaacagtggaggaaaacttcctaatttcggtttcgttgtgttcgatgactcagaaccagtgcagaaggtgctatcaaatagacctatcatgttccgcggagaagtgcgcctgaatgtggaggaaaaaaagacaagggcagcccgggagggtgaccgtcgtgacaataggctccgtggcccaggcggtccccgcgggggtttgggagggggaatgcggggccccccgagaggaggtatggtgcagaaacctggtttcggggtgggacggggcttggctccaaggcaatag

SEQ ID NO: 189983 - DNA, 1401 bp, synthetic construct
  misc_feature 1..1401: note = Description of Artificial Sequence: Synthetic coding sequence
  source 1..1401: mol_type = other DNA
atggtgatggagaagcccagccccctgctggtgggccgggagttcgtgcgccagtactacacactgctgaaccaggctccggacatgctgcatcgtttctatggtaagaatagtagctatgttcacggggggctggactccaacggcaagccagcagatgcagtttacggccagaaagaaattcaccgaaaggtcatgagtcaaaattttacgaattgtcatactaaaatcagacatgtggacgcccacgcgactcttaacgacggcgtggtcgttcaggtcatgggactgctctcgaacaacaaccaggctctgcgtagatttatgcagacctttgtgctcgcgcctgaaggttccgtggctaacaagttctacgtccataatgatatctttcgatatcaagatgaagtgttcggcgggtttgtcaccgagcctcaggaagagagtgaggaggaagtcgaagagccagaggaacggcagcaaacccccgaggtagtacccgacgacagcgggacattctatgatcaggcggtggtcagcaacgacatggaggagcacctcgaagaacccgtggctgaacccgagccagacccggagccggaaccggagcaggaacccgttagcgagatccaggaagagaaacccgagcctgtactggaggaaactgcacctgaagacgcccagaaaagctcgagcccagccccggcggacattgctcaaaccgtacaagaagacctaaggactttttcttgggctagcgtgaccagcaagaacctgcctcccagcggggcggtccccgtgaccggcattcccccccacgttgtgaaggtcccagcatcgcagcctcggcccgagagcaagcccgagtcacagattccccctcaacgtccccaaagggatcagcgcgtgagggaacagcggattaacatccctcctcagcgtggccctcgtcctattagagaggcgggagagcagggcgacatcgagccaagaaggatggttaggcatcctgacagccaccagctgtttatcggcaatctgccgcacgaggtagataagagcgaacttaaggatttcttccagtcttatggtaatgtcgtggagctacgcatcaactcgggcggcaaattgcctaattttgggtttgtggtcttcgatgattctgagcctgtgcagaaggtgctgtctaacaggccgatcatgtttcgaggagaggtccgactgaacgtggaggaaaagaaaacccgcgcagctcgcgagggagacagaagagataataggctacgtgggcctggggggccacggggcggactcggcggtgggatgcgagggccaccccggggcggaatggtccagaaacccggcttcggggttgggaggggactagctccacggcagtag

SEQ ID NO: 189984 - DNA, 318 bp, synthetic construct
  misc_feature 1..318: note = Description of Artificial Sequence: Synthetic coding sequence
  source 1..318: mol_type = other DNA
atggtgatggagaagcccagccccctgctggtgggccgggagttcgttagacagtattatacattgctcaaccaggcacctgacatgctgcacagattttacgggaaaaattcatcctatgtacatgggggtctggacagtaatgggaaaccagctgatgcagtgtatggccagaaagagattcataggaaggtgatgtcccagaattttacaaattgccacacaaagattcgacacgttgatgcacatgccaccctaaacgacggtgtggtggtccaggttatggggctcctttccaacaataaccaggctctctag

SEQ ID NO: 189985 - DNA, 369 bp, synthetic construct
  misc_feature 1..369: note = Description of Artificial Sequence: Synthetic coding sequence
  source 1..369: mol_type = other DNA
atggtgatggagaagcccagccccctgctggtgggccgggagttcgtcagacagtattatactttactgaatcaagcccccgatatgctgcaccggttttacgggaagaatagtagttacgtgcacgggggcctagactcgaacggcaagccagcagatgctgtttacgggcagaaggaaattcacaggaaagtgatgtcccaaaatttcactaattgtcatacgaagatccgacacgtggatgcccacgcaactctgaatgatggagtggtggtccaggtgatgggattgctgtctaataataatcaggcgcttagacgattcatgcaaacttttgttcttgcccctgagtcccttaagaaaaaatag

SEQ ID NO: 189986 - DNA, 354 bp, synthetic construct
  misc_feature 1..354: note = Description of Artificial Sequence: Synthetic coding sequence
  source 1..354: mol_type = other DNA
atggtgatggagaagcccagccccctgctggtgggccgggagttcgtgcggcagtattataccttgcttaatcaggccccggacatgctccaccggttctacggaaagaatagttcttacgtgcacggcggtctggatagtaatggaaagccggcagatgccgtctacggacaaaaagaaatccacaggaaggtgatgtcgcaaaattttaccaattgtcatacaaagatcagacacgtggacgcacacgccaccctgaatgacggcgttgtggttcaagtgatggggcttctgagcaacaacaaccaggctctgagacgattcatgcaaacttttgtgcttgctcccgagtag

SEQ ID NO: 189987 - DNA, 369 bp, synthetic construct
  misc_feature 1..369: note = Description of Artificial Sequence: Synthetic coding sequence
  source 1..369: mol_type = other DNA
atggtgatggagaagcccagccccctgctggtgggccgggagttcgtcaggcaatattataccctcctgaaccaagctcctgacatgctacaccgcttctatggaaaaaatagctcctatgtgcatggaggcctcgactccaatggcaagcctgccgatgcggtgtacgggcagaaagaaattcacagaaaagtaatgtcccaaaactttaccaactgtcacaccaaaatacggcatgtggacgcccacgccacattgaatgacggcgtggtggtgcaggttatgggcctgctctccaacaacaatcaggcactgaggcgcttcatgcagaccttcgtcctcgcacctgaaagtctgaaaaaaaagtag

SEQ ID NO: 189988 - DNA, 321 bp, synthetic construct
  misc_feature 1..321: note = Description of Artificial Sequence: Synthetic coding sequence
  source 1..321: mol_type = other DNA
atggtgatggagaagcccagccccctgctggtgggccgggagttcgtaaggcagtactacaccttactgaaccaggcacccgacatgttgcatcggttttacggtaaaaatagcagttatgttcatggtggcctcgactccaacggcaaacctgctgatgctgtgtatggccagaaggagatccaccggaaggtgatgagccagaactttacgaactgccacactaagatcaggcatgtggatgcccacgccactctcaacgatggggtggtcgtgcaggtgatgggtctgctgtcaaacaacaaccaagcacttcgatag

SEQ ID NO: 189989 - DNA, 855 bp, synthetic construct
  misc_feature 1..855: note = Description of Artificial Sequence: Synthetic coding sequence
  source 1..855: mol_type = other DNA
atggaggagcacctggaggagcccgtggccgagcccgagcccgacccagagccagaaccagagcaagaaccggtcagcgagattcaggaagagaagccagagcctgtgcttgaagaaacagcgccagaggacgcccagaagtcctcctccccggcgcccgctgatatcgcccagacggtgcaggaggacctgaggacgtttagttgggcctccgttacatccaagaaccttccacctagcggagcagtgcctgttaccgggattcctccgcacgtggtgaaggttcccgccagccagccacgtcctgagtctaaaccagagagccagatcccacctcagcgcccccagcgagaccagcgggtcagagagcaaagaattaatattcccccccaaagaggcccccggcccatccgtgaagccggcgaacagggcgacattgagccaagacgaatggtcaggcaccccgactcacatcagcttttcatcggcaatctgcctcacgaagtcgataaatctgagcttaaagacttctttcaatcttacggtaatgttgtggaattaagaattaacagtggggggaagctcccgaacttcggatttgtggtgtttgacgattccgagccggttcagaaggtgctgtctaaccgccccataatgttcagaggtgaagtccggctgaatgtagaagaaaagaagaccagggctgcaagagagggagaccgacgggacaacagactgcgggggccgggcggcccacgaggtgggctgggcggcggcatgcgtggccccccgagaggcggtatggtccagaagccgggctttggcgtgggcaggggacttgcccctcgtcagtag

SEQ ID NO: 189990 - DNA, 4359 bp, synthetic construct
  misc_feature 1..4359: note = Description of Artificial Sequence: Synthetic coding sequence
  source 1..4359: mol_type = other DNA
atggtgaagctggacatccacaccctggcccaccacctgaagcaggagagactgtatgtgaacagtgagaagcagcttatccaaagactgaatgctgatgtcctcaaaacagccgaaaagttataccgaaccgcgtggattgcaaagcaacagcgcatcaaccttgatcgactgatcataaccagcgccgaagccagccctgcggaatgttgtcagcatgccaaaatcctcgaggatacgcagttcgtcgacggatataagcaactcggtttccaagagaccgcatatggtgagtttctgtcaaggctgcgggagaatcctcggctgattgcctcaagcctggtagctggtgagaagcttaaccaagagaacacgcagagtgtcatttatactgtgttcacctccctctatggaaattgtattatgcaagaggacgaaagttatttattgcaggtccttaggtatctgattgagttcgagcttaaggaaagcgacaacccgaggagactgctgcggagaggtacctgtgccttttccatcctgttcaagttgttttccgaggggctgttcagcgctaagctgttccttaccgctacactccacgaacccataatgcagctcctagtagaggatgaagaccaccttgagaccgaccccaacaaattgattgagcggttttctcccagccagcaggagaaactttttggcgagaaggggtcagaccgttttagacagaaggtacaggaaatggttgaaagcaatgaagccaagttagttgcactggttaataaattcattggctacctcaaacaaaacacctattgtttcccccactccttgagatggattgtgtcccagatgtacaagacactgagctgcgtggatagactggaggtcggggaagtgcgggcgatgtgcacagatctgctgcttgcctgcttcatttgtccagccgtcgtgaatcctgagcaatatggaattatatccgatgcacccattaacgaagtggctaggtttaacctaatgcaggttgggcgactgctgcagcaactagccatgaccggctccgaagagggggacccacgaacaaaatcttccctgggtaagttcgacaaaagttgtgtagccgcctttcttgacgtcgtaattggtgggagggccgtggaaactccacctctgagcagcgtaaatcttctagagggattatctcgcaccgtggtctatattacctacagccagctcatcaccctggtgaattttatgaaatctgtaatgtcaggcgaccagctgcgagaggacaggatggcattagataacctactcgcaaatctgcctccagcaaaacccggcaagtctagtagtttggagatgacaccctacaacactccccagctaagtcccgctacgacgcctgccaacaagaagaatcgactgccaatagcaacacggtccagatctcggacaaatatgttgatggacctccacatggaccacgaaggcagcagccaggaaaccatccaggaagtccagccagaggaggtactggtcatctctctgggaaccggcccccagctcacacctggcatgatgagcgagaacgaggtgttaaatatgcaactcagcgacggcgggcagggcgacgtgccggtggacgagaataagttgcatgggaagcccgacaagaccttgagattttctctgtgctcagacaacctcgaaggtatttctgaagggcccagcaatcgtagtaacagtgtgtcatctctcgacctagaaggtgagagcgtttctgagctgggtgctggaccttccggcagcaatggggtggaggccctacagctgctggagcatgagcaggcaaccactcaggataatcttgacgacaagttgcgaaagttcgagatcagggatatgatgggactcacggacgaccgggatatatcggagacagtgagtgagacttggtcgacagacgtcctgggaagcgacttcgatcccaacattgatgaagaccggctgcaagaaatcgccggggctgccgcggaaaacatgcttggcagcctcctctgtcttcccggttcaggcagcgttttgctggacccctgtacaggatctacgatctccgaaaccacaagtgaagcctggtccgttgaggtcctgccctcggatagcgaggcccctgacctgaaacaggaagaaagattgcaagaattagaaagctgctctggactgggcagcaccagcgatgacacggacgtgcgagaggtctctagcagacctagtacccctggcctgtccgtggtgagcggtatctccgcgacctctgaggacatccctaataagattgaagatttgcgaagcgagtgtagcagcgattttgggggcaaggattccgtgactagtcccgatatggatgaaataactcatggagcctcagccgtcgtacgccctaaggtccattatgctcggccaagtcaccctcctccggatccgccgatacttgagggggccgtcgggggcaatgaagcaagactgcctaattttggcagtcatgtcctgacccctgcggaaatggaggcctttaagcagagacattcatatccagagagactggtgcgcagtaggtcatcggatatcgtgagctcagttaggaggcctatgtctgatccctcatggaacagaagaccggggaatgaggaacgcgagctaccacctgcagcagcaatcggtgctacctccctcgtggcggcccctcacagttcgtcaagcagccccagcaaagacagttctcgcggagaaacggaagagcgcaaggactcagacgacgagaagtctgaccggaataggccgtggtggagaaagaggttcgtgagcgctatgcctaaggcccctatcccttttcgaaagaaagaaaagcaggaaaaagataaagatgatctcgggcccgaccgtttcagtacactgaccgacgatccctccccccgcctgtctgcccaagcacaggttgccgaggatatcttagataagtatcgtaatgctatcaagaggactagcccgtctgatggagcaatggctaattacgagtcaacaggtgacaaccatgatcgcgacttgagcagcaaacttctctatcattctgataaagaggtaatgggggatggagagtctgctcatgacagccctcgggatgaagccctccagaacatctctgcggatgatctccctgactcagcgtcccaagctgcccacccccaggacagcgctttttcttaccgagatgcgaagaaaaagctcagactcgccctgtgcagtgctgacagtgtggcctttcccgttttaacccacagcactcggaatggtcttcctgatcataccgatcctgaggataacgagattgtgtgttttctgaaagtgcaaatcgctgaggccattaatctccaagataaaaaccttatggcacaactccaggagacaatgcgctgcgtctgcaggtttgacaacagaacatgcaggaagctactggcatccattgctgaggattaccgaaagcgcgccccatacatagcctatctgacgagatgccggcaggggttacagaccactcaggcacatctcgagcgcttactccaacgggtgctgcgtgacaaagaggtggccaatagatactttaccactgtatgtgtgcggctcctgctggaatccaaagagaagaaaattagggaatttattcaggattttcaaaagctcaccgctgccgatgacaaaacggctcaggtcgaggacttcttgcagtttctgtatggcgccatggcacaggacgtcatttggcagaatgcgtccgaggaacagctgcaggatgcacaactagccatagagagatctgtcatgaaccggattttcaaattggccttttatcctaaccaggatggtgacatcctgcgcgaccaggtgctccatgaacacattcaaagactgagtaaggttgtcaccgccaaccacagagccctgcaaattcccgaagtgtacctgagagaagctccctggccctccgctcagagcgaaatccgtaccatctcagcctataaaacccctagagataaagtgcagtgtatcctgcgcatgtgtagcactattatgaatctcttgtcgctagctaatgaagacagtgtcccaggcgctgatgactttgtgccagtgctggtgttcgttctcattaaggccaatccgccctgcttactgagcactgtgcaatacatctcctcattctatgcttcatgtctatccggcgaagagagttattggtggatgcagttcaccgctgcggtagaattcataaagacaatcgacgatcgtaagtag

SEQ ID NO: 189991 - DNA, 1494 bp, synthetic construct
  misc_feature 1..1494: note = Description of Artificial Sequence: Synthetic coding sequence
  source 1..1494: mol_type = other DNA
atggtgaagctggacatccacaccctggcccaccacctgaagcaggaacggttgtacgtcaactctgaaaaacagctgatccaaagactcaatgccgatgtgcttaaaacagcagaaaagctgtataggaccgcatggattgccaaacagcaaaggatcaaccttgatcggctgatcataactagtgccgaagcgtccccagcggagtgttgccagcacgccaaaattttggaggatactcagtttgtggacggatacaagcagctagggttccaggagacagcctacggagagtttctgagtcggctgcgcgaaaacccaagattaatcgctagtagcctggtcgcaggggagaagctgaatcaagagaatactcagtctgtgatctataccgtgttcacctccctttacggaaattgcatcatgcaagaagacgagagttacctgcttcaggtgttaagatatctcatagagttcgagcttaaggaatcagacaacccacgccgcctactccgccgcggcacgtgtgcttttagtatcctcttcaaactattcagcgaaggcctgttctcagcaaaactatttctcacagccaccttacatgagccgattatgcaactgttggtcgaagacgaagaccacctcgaaaccgatcctaataaactgatcgagcggtttagtccaagccagcaggaaaaactgttcggcgaaaaaggctctgatcggtttcgccaaaaggtgcaggaaatggtcgaaagcaacgaagccaagctggttgcactggtgaacaagtttatcggctacctcaaacaaaatacctattgctttccacacagcctccgctggatcgtgagccagatgtacaagacactctcctgtgttgaccggctggaagtgggggaggtccgagccatgtgtacggacctcctgctggcctgcttcatttgtccagccgtagttaaccccgaacagtacggaattatctcagacgcgcctattaatgaggtcgcgcggttcaacctgatgcaagtgggcagactgcttcagcagttggcaatgaccggctccgaggaaggagatcccagaacaaagagttctcttggaaaattcgataaaagttgcgtggctgcgtttctggacgtcgtgattggtggcagagcggtcgagacccctccactgtcttctgtaaacctgctcgagggactcagccgcaccgtggtgtatataacttacagccagctgataactcttgttaactttatgaagtccgtgatgagtggcgaccagctccgggaggatcgcatggccttggacaatttgctagccaatctgccaccagcgaaacctggcaaatcatcgagcttggaaatgacgccttacaataccccccagctatcaccagctacaacccccgccaacaagaagaaccgactgcccatcggcaaggagaattttagctactggtcatttctccttaacctcattttccactag

SEQ ID NO: 189992 - DNA, 4437 bp, synthetic construct
  misc_feature 1..4437: note = Description of Artificial Sequence: Synthetic coding sequence
  source 1..4437: mol_type = other DNA
atggtgaagctggacatccacaccctggcccaccacctgaagcaggagagactctacgtgaattccgaaaaacaactgatacagcgactaaatgccgacgtcctgaagaccgccgaaaagctctatagaaccgcatggatagcaaagcagcagaggatcaacctcgacaggttgatcatcacatcggcagaggccagcccagccgaatgttgtcaacatgccaaaatcttggaggacacacaattcgttgacgggtacaaacaactgggctttcaggaaacagcatatggcgagttccttagccgcctgcgggaaaatccacgactgattgccagcagtcttgttgcgggggagaagcttaaccaggagaatacccaatcagtgatttataccgtttttacatccctctacggcaattgtatcatgcaagaagacgaaagctacctgttgcaggtacttcggtatctaattgagtttgagttgaaggaatctgacaatcccaggaggctgctgcgccgtgggacctgcgcattcagtatactgtttaagctcttttcagaggggctgttcagcgcaaaactttttctgacagctacactacacgagcccatcatgcaactccttgtcgaagacgaggatcacctggaaacggaccccaataagctaattgaaagattttcaccttcacaacaagagaaattgtttggcgaaaagggttctgaccgcttccgccaaaaagttcaggagatggtcgaatccaacgaagccaagctggtggctctcgtgaataagtttattggctacctgaaacagaatacttattgtttcccacatagcctgaggtggattgtttcccagatgtacaagacattgagctgtgttgataggttggaagtcggggaggtgagagctatgtgtactgatctcctgctggcctgtttcatctgcccagctgtggtgaaccccgagcagtacggaattattagtgacgctccgatcaacgaagttgcacgttttaacctgatgcaagtcggaagactgctgcagcagttagcaatgactggcagcgaagagggggaccctcggacaaaatcctcactgggaaaattcgacaagagttgcgttgccgcctttctggatgtggtcattggtggaagggccgtcgagacccctcctctctcatctgtaaatttgctcgaaggtttgtctagaaccgtcgtctatatcacttactcccagcttatcaccctggttaatttcatgaagagcgtgatgtctggagaccagctccgggaggatcgcatggctttggacaatttgctcgcaaatctgccccctgccaagccggggaagtctagctcactagagatgactccatacaacacaccccagctgtctcctgctacaaccccagccaataaaaaaaaccgcctcccaattgcaacacgctcacgaagccgcacaaacatgcttatggacctccatatggatcacgaggggtcttctcaggaaactattcaggaggtgcagccagaggaggtgctggtgatcagtctcggcactgggccccaactcactcccgggatgatgagcgagaacgaggtcctcaacatgcagttatccgatggaggccagggagatgttcctgtggacgaaaacaaattacacggcaaaccagacaagactttgagattcagcctgtgctctgacaatcttgaggggatctccgagggacccagcaatcgctctaattccgttagctctctggacttggaaggtgagagcgtgtccgagctgggagccgggcccagcggaagtaatggggtggaagcgctgcagttacttgagcatgaacaggctaccacccaggacaatcttgatgacaagctgcggaaattcgagattagagacatgatgggtctcaccgatgacagggatatttctgaaaccgtgagtgaaacctggtctactgacgtattggggagcgacttcgatccaaacatcgacgaagataggctgcaagagatcgctggcgcagcagccgagaatatgcttggcagtctcctttgcttgcccggctccggttctgttctgttagacccctgcaccggcagtacaatcagcgaaactacatccgaggcctggtcagtggaagtacttccatcagactccgaggcccccgatttgaagcaagaggaacggcttcaagagttggaaagttgctccggcttagggagcaccagtgatgacacagacgttcgcgaggtcagctccagacccagtacgcccggacttagcgtggtttctggcatctccgctaccagtgaggatatccctaacaaaatcgaggatctccgttcagagtgctcttccgatttcggagggaaggactctgtgacttctccagatatggacgaaatcacacacggagcccaccagctgacttctccaccttcccagtcagaaagtttactggctatgttcgaccccctttcatcgcacgaaggagcctcagcagtggtccggcccaaggttcactatgcaagacccagccacccacctccggatcctccaatcctcgaaggggctgtaggaggcaacgaagcccgcctgcccaactttggatcacatgtgctgactcctgcggagatggaggcctttaagcagaggcacagttaccccgaaaggttggtacgctccagatcttctgatatcgtatcttctgtgcgccgccctatgtctgacccttcctggaacaggaggccaggtaatgaagaacgtgagctcccccccgctgctgccatcggtgccacctctctcgtggctgccccccactcctccagctcatcacctagtaaggactcatcacgcggcgagaccgaggaaaggaaagattccgatgatgaaaaaagtgatcgcaaccgtccatggtggagaaagcgttttgtgagcgccatgcccaaggccccaattccgtttaggaagaaggaaaagcaagagaaggacaaggatgatcttggaccagataggttttcaaccctgactgacgatccatctccccgcctgtccgcccaggcccaggtagctgaggatatcctggacaaatacagaaacgctatcaagaggactagccctagcgatggcgctatggcaaactatgagtctacgggcgataatcacgatagggacctgagtagtaagctcctgtaccactctgacaaagaagtgatgggagacggcgagtctgcccatgactcccctagggacgaagcactacagaatatttctgccgacgaccttcctgattcagccagtcaggctgcccacccacaggactctgccttcagttaccgtgacgccaagaagaagttacgactcgccctgtgttcggcagattccgtggcattccctgtgcttacccattcaactcggaacggcctgccggaccatacagacccagaagacaatgaaatcgtttgctttctgaaagtacaaattgccgaggccatcaacctccaggacaagaaccttatggcacaactacaagagacaatgaggtgtgtttgcaggttcgacaatcgtacttgcaggaagcttctagcctccatagcagaggattaccgaaaaagggccccttacatcgcttatcttactcgttgtcggcaaggattacagaccacccaagcgcatctggagaggctgttgcagcgagtcctccgcgacaaagaagtggccaatcggtacttcactaccgtatgtgtgaggctacttctggagtcgaaagaaaaaaagattcgggagttcatacaggacttccagaagcttaccgccgccgacgacaagaccgcgcaggttgaagacttcctccagtttctttacggagccatggctcaggacgtcatctggcagaatgcaagtgaagagcagttacaggatgctcaacttgctattgagcggagtgtgatgaatcggatcttcaaactggccttctaccccaatcaagatggggacatcctaagagaccaggttctgcatgagcatatccagcgcctgtcaaaagtggtcacggcaaatcatcgcgccctccaaatccctgaggtttatctcagagaggctccctggcccagcgcccagtccgagatccgaacgatcagtgcctacaaaaccccccgggataaggtccagtgtatactgaggatgtgctccactattatgaatcttctaagtctggccaatgaagatagtgtgcctggggcagacgactttgtgcccgtcttggtgtttgtcctgataaaggccaaccccccctgcctgctgagtaccgtgcaatacatatcgtccttttatgcatcatgcttgtcaggggaagagtcctactggtggatgcagttcaccgccgccgtggagtttatcaagacaattgacgacaggaagtag

SEQ ID NO: 189993 - DNA, 4464 bp, synthetic construct
  misc_feature 1..4464: note = Description of Artificial Sequence: Synthetic coding sequence
  source 1..4464: mol_type = other DNA
atggtgaagctggacatccacaccctggcccaccacctgaagcaggaacgcttgtacgtaaatagcgagaagcagttaatccagcgattgaatgccgacgtattgaaaaccgctgagaaactctacaggaccgcttggatcgctaaacaacagagaataaacttggatcggttaatcattacgtcagcagaagcatcaccagccgagtgttgccagcacgccaaaatcctcgaagacacccagtttgtggatggttataaacaattaggattccaggagactgcctatggggagtttctctcacgactacgggagaaccctcgcttaattgcaagttcacttgttgccggcgaaaagttgaatcaggaaaacacgcagtcagttatttacacggtgtttacatcactttacgggaactgcataatgcaggaagacgaatcttatctgcttcaggtgctcaggtacctgattgagtttgaattgaaggaaagtgacaacccgcgccgcctgcttcggagagggacttgtgccttctctatactgttcaagttgttcagcgaggggctgtttagcgccaagctgtttcttacagccaccttgcatgaaccaattatgcaactgttggtcgaggacgaggaccatctggagaccgaccctaataaattgattgaacgcttctccccctctcagcaggagaagctgtttggcgagaagggctcagaccgttttagacagaaggtccaggagatggtagagagcaacgaggccaagttggtcgctctggtaaataaattcatcggatacctgaagcaaaacacttactgtttcccacacagcctgcgttggattgtgtctcagatgtacaagaccctttcctgtgtcgacagactcgaggttggagaggtccgggctatgtgcaccgacctgctgctggcttgtttcatttgcccagcggtggtgaaccctgaacagtatggtatcatcagcgatgcacctattaacgaggtagcaaggtttaatctgatgcaggtagggaggctactccagcagctggcaatgactggatccgaagaaggggaccctcgtaccaagtcgtcactcggaaaattcgacaagtcttgtgtggctgctttcctggacgtggtcattggtgggcgtgccgtggagacgccacctctctctagcgtcaacttgctcgaaggcttatcaagaactgtagtgtatattacatattcccagctaataactctggtcaacttcatgaagtcggtgatgtcaggagatcagctccgcgaggatcggatggccctagataatctcttagccaatctgcctcccgccaaacctggaaagagctcctcactagagatgaccccttacaatactccccagctgtcgcccgcgacaactcctgctaacaagaaaaaccgtctgcccattgccacccgcagccggtccagaaccaatatgcttatggatctgcatatggatcacgagggaagcagccaggagacgattcaagaagtgcaacctgaggaagtgttggtgatctccttagggacagggccgcagctgacccctggcatgatgtcagagaacgaagttctgaacatgcagctgtctgatggcggacagggcgacgtgccggtggacgaaaacaaattacatggtaaaccggataaaacgctgagatttagcttatgcagtgacaatttggagggcattagcgagggtccttccaacagaagcaattccgtgtctagcctggacctcgaaggagaatcagtgtctgaactcggcgctggcccgtccggttctaatggcgtcgaggcattgcagctccttgagcatgagcaggctacgacccaggacaatttggatgataagttacgtaaatttgaaatacgcgatatgatgggcctcaccgatgatagagatatatccgaaacagtgagtgaaacctggtccacggacgtgctaggatcagattttgatcccaacatagacgaggacaggctacaggaaatcgcaggggcagccgccgagaatatgctaggctcacttctctgcctgcccggaagtggcagtgtgctgctcgatccatgtactgggtctaccatttccgagactactagtgaggcctggtccgtggaggtcctgccatccgacagcgaagctccggatctgaagcaggaggaacggttgcaggaattggaatcatgttcgggcctgggaagcacgtccgacgacacagacgtgagggaagtctcaagtaggccctcaacgcctggtctgtctgtagtgagcggcattagtgccacaagtgaagacattcctaataaaatcgaagatctgcggtccgagtgctccagtgactttggcgggaaggattcagttaccagtcccgacatggacgaaattactcatgattttctgtatatcttacagccaaaacagcattttcaacacatcgaagctgaggccgacatgcgaattcagctctccagctccgcgcatcagctcactagcccgccgtcccagtccgaatccctcctagccatgttcgatccactgagcagtcacgaaggagcaagcgcggtcgtcagacccaaggttcactatgcgcgaccctctcatccaccgccagaccccccgattctggaaggagcagtgggcggcaacgaggcccgtctccccaacttcggaagtcacgttctcactccagccgaaatggaggccttcaaacaaaggcactcatacccggagaggctggtgcgcagtcggagtagtgacattgtgtcttccgtgagacggcccatgtctgacccatcctggaatcggaggcccggtaacgaagaaagggagctacccccagctgctgctattggggcaacaagcctggtggcagctccccatagttcgtcatcctcacctagcaaagattctagtcggggtgagacagaagaaaggaaagattccgatgatgagaaatccgacagaaacagaccgtggtggcgaaaacgcttcgtgagtgccatgccaaaagcccccatcccttttagaaagaaagagaagcaagagaaggataaagacgacctgggtccagataggtttagtacactgaccgatgacccttcacctaggctttcagcccaggcccaagtcgccgaggatattctggacaagtatagaaatgccatcaagaggacctctccaagtgatggggccatggccaactatgaatcaaccgaagtcatgggggacggcgagtccgcacacgactctccccgcgacgaggcgcttcaaaacatcagtgcagacgacttacccgactcagcgtcccaagccgctcacccccaggactctgcgttcagttatagagacgccaaaaagaagttgcgcctcgccttatgttccgcagattccgtggcattccccgtgttgacccatagcactaggaacggtctccccgaccacacagacccagaagacaacgagatagtctgctttctgaaagtgcagattgcagaagctatcaatttacaggataaaaacctcatggcgcagcttcaggagaccatgaggtgtgtttgtcggtttgacaatcgtacctgccgaaagctgcttgccagtatcgctgaagactaccgtaaaagggcgccatatattgcttatctcactcgttgccgacagggcctgcaaactactcaggcacatctggaacggctcctccaaagagtattacgcgataaagaggtcgccaataggtatttcaccacagtgtgcgtgcgcctgttgctcgagagcaaggagaagaagatcagggagttcattcaggattttcagaagctgacagcagcggacgataagacagcacaggtggaggacttcctgcagtttttgtacggtgccatggcccaagacgtcatttggcagaatgcatccgaagagcagcttcaggacgcccagttggctatagagaggagcgtcatgaatcgtatattcaaactggccttttaccctaatcaggatggagacatcctccgtgaccaggtactccacgaacatatccagcgcctgagcaaggttgtgaccgctaaccaccgagccctgcagatccccgaggtgtatttgagagaggcaccttggccctcggcccaatccgaaatccggactatctctgcctacaagacaccccgagataaggtgcagtgtatcctgcgaatgtgttcaacgattatgaatttgctcagcctggccaacgaggattccgtgccgggtgctgatgactttgtgccagtacttgtttttgtcctgatcaaagctaatccaccgtgtctactttccactgtacagtatatttcttccttctacgcgagctgtctgagcggcgaagaatcctactggtggatgcaatttacggccgcagtggagttcataaagacgatagatgaccggaagtag

SEQ ID NO: 189994 - DNA, 2514 bp, synthetic construct
  misc_feature 1..2514: note = Description of Artificial Sequence: Synthetic coding sequence
  source 1..2514: mol_type = other DNA
tgaaactgcatcatgcaggaggacgagagctacctgctgcaggtgctgcggtacctgatcgaattcgaattgaaagagtctgacaatccccgaaggctcttgcgaaggggcacctgtgcgttttcaatccttttcaagctcttttctgagggcctgttcagcgcaaaactttttctgaccgccaccctgcatgagcctatcatgcagctgctggttgaggatgaagatcatctcgagacagatccaaacaaactgatcgagagattcagcccatcccagcaggaaaagttattcggagaaaaggggtccgacaggttccgtcagaaggtacaggaaatggtggagtcaaacgaggccaaactcgtcgcactggtgaacaagtttattgggtacctaaagcagaacacctattgtttcccccattccttgcgctggattgtgtcacaaatgtacaagacgctgtcatgtgtggaccgtctggaggtcggcgaagttagggcgatgtgtaccgacctgctcctcgcatgtttcatttgtcctgcggtcgtcaacccagagcagtatggaatcatctccgatgcgcccataaatgaagtggccaggttcaatctgatgcaggttgggaggctgttgcagcaactggccatgacgggcagcgaggagggcgacccccgtaccaaaagttcgcttgggaagttcgacaaatcctgcgtggccgctttccttgatgtggtgataggaggtcgcgccgtggaaaccccacccctttcttctgttaacttgttagaggggctgtccagaactgtagtgtacatcacttatagccagttgatcactctggtaaatttcatgaaatcagtgatgtctggggaccagcttcgagaagaccgaatggccctggacaacttgctcgccaacctcccgccagctaagccaggcaagtcctcttcccttgagatgaccccatataacacacctcagctctccccggcaactacgcctgctaataagaagaaccggctgcctattgctacacgatcacgctctcggaccaacatgctgatggacctacatatggatcacgaaggtagttcacaggagactatccaggaggttcaaccagaagaggtgttggttattagtctgggcaccggcccccagcttacaccggggatgatgtccgaaaacgaggtcctcaacatgcagttaagcgatggtggtcagggagatgttcccgttgatgagaacaagctccatgggaagcccgacaagacccttcgctttagtctgtgctctgataacttagagggcatctcagagggaccctccaataggagcaacagtgtctccagcctggatttagagggcgagagcgtcagtgaactcggggctgggcccagcggttccaacggcgtggaggcactgcagttactagagcacgagcaggccactactcaagataatctggacgataagctgcgaaaattcgagataagggacatgatgggcctcacagacgatagggacatatctgagactgtgtctgagacgtggtccactgatgtgctggggtctgacttcgatcccaatatcgatgaggaccgacttcaggagatcgctggagcggcagctgagaacatgctaggttctctgctctgtttgccgggatccggatcggttctgcttgacccctgtaccggttcaacaatttctgaaaccacctccgaagcctggagcgtcgaagttctcccaagcgattcagaagcccccgacctgaaacaggaggaacgcttacaagagctggagagttgtagcggcctcggcagtacaagcgatgacactgatgtgcgcgaggtgtctagccgcccgagtacccctgggttgtccgtagtgagtggcatttctgctacctctgaagatatcccaaacaaaatagaggacctacgttcagagtgtagctcggacttcggtggaaaagacagtgtcacgagcccggacatggatgaaatcacccatggcgctagcgctgtggtccgccctaaggtccactacgccaggccatcccaccctccaccagatccacccatcttagaaggcgccgtaggtggtaacgaggcccgactcccgaactttggctcccacgtactgacccctgccgagatggaagcatttaagcagcgacacagttacccagaacggctggtgcggtcgaggtctagtgacatagtgtcgagcgtgagaagacccatgtctgaccctagctggaaccggagacccggaaatgaggagagagagttaccacctgcggcagctataggagcaactagccttgtggcagcccctcactcctcctctagcagtccatcaaaggattcctctaggggcgagaccgaagaacgcaaggactcggatgacgagaaaagcgacagaaacaggccttggtggcggaagagattcgtgagtgcaatgccaaaggctccaatacccttcaggaaaaaggaaaagcaagagtag

SEQ ID NO: 189995 - DNA, 2493 bp, synthetic construct
  misc_feature 1..2493: note = Description of Artificial Sequence: Synthetic coding sequence
  source 1..2493: mol_type = other DNA
tgactgcggcggggcacctgcgccttcagcatcctgttcaagctgttcagcgaaggcttgttctccgcaaaactgttcttgaccgcgactctgcacgagcccatcatgcagcttctggtggaagatgaggaccaccttgaaactgacccgaataagcttatcgagcggttctccccaagtcagcaggagaagctttttggcgaaaaaggatccgacagatttcgtcaaaaagttcaggagatggttgagtccaatgaggcgaaactcgtggcattggttaataagttcatcggttatctcaaacagaatacctactgtttcccccatagcctcagatggatcgtgtctcagatgtacaagactctatcttgcgtggaccgcctcgaagttggcgaggtgcgtgccatgtgcaccgacctgctgctggcgtgttttatttgtccggccgtggtgaaccccgagcagtacgggataatttcggacgctccgattaatgaggtggcaaggtttaatttgatgcaggtgggacggctgctccagcagcttgccatgaccggtagtgaagaaggagatccacgaaccaagtcaagtctcggaaaattcgacaagagttgcgtggcggctttcctggacgtggtgattggcggaagggccgtcgaaactcctcccctttcctcagtgaacctgctagaagggctgtcaagaacagtggtttacatcacttactcccagttgattacgttagttaacttcatgaagagcgtcatgtccggggaccaacttcgagaggacagaatggctctggataacctcctcgccaatcttccgcctgcgaagccaggcaaaagcagtagcctcgagatgacaccctacaatacccctcagctctctcccgccacaacccctgctaacaaaaaaaaccggctgcccatcggacagcagctcgcggctatcacagcatgggacagttcagccaccaatatcactagccacattacagtcgtgacaccattcgcaacgagaagccgatctagaaccaacatgctgatggacctgcatatggatcatgaaggatcatcacaggagaccatccaggaagtccaacctgaggaggtcctggttatctcccttgggaccgggccgcagctcacgccaggaatgatgtccgaaaatgaagtcttgaatatgcagctgtcagatggcggccagggagatgtgccggtcgacgagaataagctacatggaccttctaatcgaagcaacagtgttagcagtctggatctggagggcgaatccgtgtccgagctcggcgcgggaccctcaggcagcaacggagtggaggctctccagctcctggaacatgaacaggccaccacgcaggataatctggacgataagctccgcaaattcgaaataagagacatgatgggtcttactgatgatagagatatctctgagactgttagtgagacgtggtctacggatgtgctgggttcagactttgaccctaatatcgatgaagataggctccaggagatcgccggggctgctgccgagaacatgttgggcagtttgctctgtctccccggttccgggtccgtattgctggacccatgtactggaagcacaatttctgaaacgactagcgaagcctggtctgtggaggtcctgccttcggatagcgaggccccagacttaaagcaggaagaaaggctacaagaactggaatcttgttccgggctgggaagtacttcagatgatacggacgtcagagaggtgagcagcagaccttctaccccgggtttatcagttgtgagtgggatctctgccacgagcgaggacataccaaataagatcgaagacttgaggagtgaatgttcttccgacttcggagggaaagattctgtgacttctccagacatggacgaaatcacccacggtgcccatcaactaacgagccctccatcccagtccgaatctctgctggccatgttcgacccactttcctcgcacgaaggcgccagcgctgtggtcaggcctaaagtccattatgctcggccctcacatcctccaccagatccccctatactggaaggagcagttggcggcaatgaagctaggttacccaactttgggagtcatgtgctgaccccggctgaaatggaggctttcaaacaacggcactcttaccctgagagacttgtccgcagccggagttccgatatagtgagctctgtccgccgcccaatgagcgacccctcgtggaacagacggccgggaaatgaggagcgagagctaccccccgctgcagctatcggggccactagtctcgtggctgccccgcactcttccagctcaagcccttcaaaagacagtagcaggggagaaaccgaagaacggaaggactccgatgatgaaaagagcgacaggaatagaccatggtggcgtaagaggtttgttagtgccatgcccaaagcgccaatcccattttag

SEQ ID NO: 189996 - DNA, 516 bp, synthetic construct
  misc_feature 1..516: note = Description of Artificial Sequence: Synthetic coding sequence
  source 1..516: mol_type = other DNA
atggtgcagtggccccggatgagctacggcaagacccgggtgatgaaccgcatattcaaactggccttttaccccaatcaggatggcgatattctgcgagaccaggttctccacgagcatatccaacgactaagcaaggtcgtgacagcaaaccacagggcgttgcagatacccgaggtgtatctgagggaagccccatggccctccgcacagtcagagattagaactataagcgcatataagacaccacgcgataaggtgcagtgcatactcagaatgtgctctacgataatgaacctcctttctctcgccaatgaagactccgtcccaggagccgacgatttcgtaccggtacttgtgttcgtcctgatcaaagccaaccctccatgtcttttaagcactgtgcagtatatatcgtctttctacgcgtcctgcctctctggcgaagagtcctactggtggatgcaatttacagcagccgtcgaatttatcaaaacgatcgatgatagaaagtag

SEQ ID NO: 189997 - DNA, 354 bp, synthetic construct
  misc_feature 1..354: note = Description of Artificial Sequence: Synthetic coding sequence
  source 1..354: mol_type = other DNA
atggtgaagctggacatccacaccctggcccaccacctgaagcaggagaggctttacgtcaattctgagaagcagctgatccaaagactgaacgcagacgttctgaagactgctgagaagttgtaccgaactgcttggatcgcaaaacagcagcgcatcaaccttgacaggctcatcattacatccgctgaggctagtcccgcagaatgctgccagcacgctaagatcctggaggatactcagttcgttgacggctacaaacaactgggttttcaggaaacggcctatggtgaatttctgtcccgcctgagggaaaacccccggttaattgcctcttctctggtcgccggctag

SEQ ID NO: 189998 - DNA, 2967 bp, synthetic construct
  misc_feature 1..2967: note = Description of Artificial Sequence: Synthetic coding sequence
  source 1..2967: mol_type = other DNA
atggtgaagctggacatccacaccctggcccaccacctgaagcaggagcgtctctatgttaattcggagaagcagctcatccagaggttaaatgccgacgttttgaaaaccgctgagaagctgtacaggacggcttggattgctaaacaacagcgcatcaacttagatcgcctgattatcacctccgctgaggctagtcccgctgaatgttgccaacatgctaagattctggaagacacccagtttgtcgacggttacaaacagctgggatttcaggaaactgcttacggggagttcctcagccggcttagagagaatccccgcttgattgcttcctcattggtagcaggagagaagttgaaccaagagaacacacaatcggtgatttacaccgtattcacatccctgtacggcaattgtatcatgcaggaagatgaaagttatctgttgcaggttttgcgctaccttattgagtttgagctgaaagagtccgacaacccccggaggttactgagacggggcacatgtgctttcagcatcctgttcaagctcttttccgaaggcctcttttctgctaaactgttcttgacagccactctgcatgagccaatcatgcagctgctggttgaagacgaagaccaccttgagaccgatcccaataaactaatcgagcggtttagtcctagccagcaggagaagctgtttggcgagaaggggtctgaccgctttaggcagaaggtacaggaaatggtcgaatcaaacgaggccaagttggtggcactggtcaacaagttcattggttacctcaaacagaatacctattgtttcccccacagcctcagatggatcgtctctcagatgtataagacgctgagttgcgtggaccgcttggaagtaggggaagtgagggccatgtgtactgacttacttttagcctgctttatttgccctgctgttgtgaaccccgagcagtatgggattatttctgacgctcctatcaatgaagtcgccagatttaacctgatgcaggtggggcgactgctgcagcagttggctatgacagggtctgaggaaggcgacccccgaactaaatctagcctcggaaagttcgataagtcctgcgtagcagccttcctggacgtggttataggggggagagctgtcgagacgccccccctctcgtccgttaatcttttggagggtctgtcacggacggtcgtgtacattacctattcccaattaattaccctggtaaactttatgaaatctgtgatgtccggggaccagctgcgagaggaccgtatggctctggataatttgcttgctaatttaccccctgccaagcccggtaagtcctcctccctggagatgacaccatacaataccccccaactgagcccggccactacccctgccaataaaaagaaccgcctgcctatcgcaaccaggtctcgctctaggaccaacatgctgatggacctacacatggaccacgaaggctctagccaggagacaatacaggaagtccagcccgaggaagttctcgtaattagtcttggcactggcccacagctgacccctgggatgatgtcagagaatgaagtgctcaacatgcagctcagcgacggcggacagggagacgtgcctgtggacgaaaacaagcttcacggtaagcctgacaaaacattgagattcagcctatgttccgacaaccttgagggcatctctgaaggtccatcaaatcgctccaactccgtgtcaagcctcgacctggaaggcgagagcgtatccgaactcggcgctggtccatcaggctccaacggcgttgaggcgctgcagttattggagcatgagcaggctacgacacaggataacctggatgacaaactcaggaagtttgaaatccgggacatgatggggctgacagacgaccgggacatttctgagacagtgtccgaaacatggagcacagatgtgctgggctcagactttgacccgaacatagacgaagatcggctgcaggagattgccggcgcagcagctgagaacatgttaggctcgttactctgtctaccaggtagcgggagcgtcctcctggacccttgcaccgggagtaccatcagtgagacaacttccgaggcgtggtctgtggaagtactaccttcggattcagaggcccctgacctaaaacaggaggagcgcttacaggaattggaatcgtgtagcggactgggcagtacctccgatgataccgacgtgagagaggtctcctcacggccctcgacgcctgggttgtctgtggtctctggaatttccgcaacaagcgaagacatcccaaataaaattgaagatctacggtccgagtgttcctcagacttcggcggcaaggattcagtgacgtcccccgatatggatgaaatcactcacggcgctcatcagctcacctcacctccatctcagtctgagagcctattggccatgtttgaccctctgagctctcacgagggagcctccgccgttgttcgccccaaggtgcattatgcccgtccgtcccatccccccccggaccccccaatcctcgaaggagccgttggggggaacgaagccaggttgccaaattttgggtctcacgttctgacaccagccgagatggaggccttcaaacaacgccacagctaccccgagagactcgtgcgatcacgcagctctgacatcgtctcctccgtgcggagacctatgagtgacccctcctggaaccgacgccctgggaacgaggagcgggagcttcccccagccgctgcgataggggccacctcgttagtagcggctccccacagcagctcatccagccccagcaaagacagtagcagaggagaaaccgaagagcgcaaggacagtgacgatgagaagtccgacagaaaccgcccttggtggagaaaacgattcgtgagtgcaatgcccaagtag

SEQ ID NO: 189999 - DNA, 4437 bp, synthetic construct
  misc_feature 1..4437: note = Description of Artificial Sequence: Synthetic coding sequence
  source 1..4437: mol_type = other DNA
atggtgaagctggacatccacaccctggcccaccacctgaagcaggagagactgtatgtgaattctgaaaagcagctgatccagcggctgaatgccgatgtccttaagacagcagagaagctctacaggacagcctggatcgccaagcagcagaggatcaatctggacaggttaataatcacctcggcagaagcatcaccggctgaatgttgccagcacgccaagatcttagaagacacccagtttgtcgacgggtataagcagcttggctttcaggagacggcttacggtgaattcttatctcgacttcgagagaatccaagacttatagcttcttcactggtagcgggcgaaaaattgaaccaggaaaatacccaatccgtcatctatacggtgttcacgtcgctgtatggcaattgcattatgcaagaagacgaatcgtatttattgcaggtgcttcggtatttaatagagttcgagctgaaagagagtgacaatccacggcgactgcttcgacggggcacttgtgccttttctattctgtttaagctgttcagcgagggactgttttcggccaagctcttcctgaccgcaacattacatgagccaattatgcagctgctcgtggaagacgaggatcatcttgagaccgatcccaacaaactgattgagaggtttagccctagccagcaggagaaattatttggagagaaggggtcagacagatttcggcagaaagtccaggagatggtggagtccaatgaggccaaattagttgcattagtcaacaaattcattggctacttaaagcagaacacatactgtttcccacactcattaagatggatcgtttctcagatgtacaagactctttcttgcgttgatcgccttgaggtgggggaggttcgcgccatgtgtaccgatcttctcctcgcctgctttatttgtcctgccgtggtgaatccagaacagtatgggatcatctccgacgcacccatcaacgaggtggcacgtttcaatcttatgcaggtaggcaggcttctgcagcagctcgcaatgactggttctgaagagggagaccctcgcactaaaagcagtttgggaaagttcgacaagtcctgtgtggccgctttcctcgacgttgttattgggggaagagcggtggagactccccccctttcctccgtgaacctgctcgaaggccttagccgaaccgtagtttacatcacgtacagtcagcttatcacactcgtgaatttcatgaagtccgtgatgagcggtgatcagctgagagaagatcgtatggccctcgacaacctcctggctaatctgcctcccgcaaagccaggcaaaagctcttctcttgagatgacgccttataatacgcctcaattatcgcctgctactacaccagctaacaaaaaaaaccgtctgcccattgccactagaagcaggtctcggactaatatgctcatggacctccacatggatcacgaggggagctctcaggaaacgattcaagaggtgcaacccgaagaggtgcttgtgatctctcttggcacagggccacagctgactcctggaatgatgtctgaaaacgaggtgctcaatatgcagctctccgatggaggccagggagatgttcccgtcgacgagaacaagctgcatgggaaaccagataaaaccctccgattttccctgtgctccgataatctcgaaggcatcagtgagggacccagcaaccgtagcaacagtgtaagcagcctcgacctagagggcgaaagcgtaagcgagttgggcgccgggcctagcggcagcaacggggtcgaagccctccagctactcgagcacgaacaagccacgacccaggacaatctggatgataaactgaggaagttcgagattagagatatgatgggcctcacggatgaccgggatatttcggagacggttagcgaaacttggagcactgatgtgctaggatccgacttcgacccaaacattgatgaagataggttacaggagatcgccggagccgctgccgaaaacatgttaggctcgctgctgtgcctgcccggcagtgggagcgttctcctggacccttgcactggctcgacgattagtgagacgaccagcgaagcttggagtgttgaggtattacccagtgattccgaagcccctgatctgaagcaggaagagcggttacaagagttggagagttgctccggactcggctccaccagtgacgacaccgatgttagagaggttagctctaggccctcaactcccggcctcagcgtggtgtcagggattagtgccacatctgaggacattccaaataaaatagaagacctgcggtccgagtgttccagtgattttggtggcaaagactccgtgacctccccggacatggatgagattacccacggggctcaccagctcacctcgccaccaagtcaatctgaaagccttttggccatgttcgaccctctgtctagccacgagggagctagtgctgtagtcagaccaaaagtccattacgcaagaccttcccatcctccaccagaccctccaatcctggaaggcgccgtgggaggcaacgaagctcgtcttcctaattttgggtcccacgttctgacccctgcggaaatggaagccttcaagcagcgccattcttaccctgagaggctcgtgcggagccgcagctccgatattgtttcatccgtgcgaaggcctatgagtgacccatcctggaatcgtcgccccggtaacgaggaaagggagctgcccccggcagccgccatcggggctacttccctggtggcagcaccccattctagcagctctagcccttccaaggatagctctagaggggagactgaggagcgcaaagatagcgacgacgagaagtcagaccgcaatcgaccctggtggcggaaacggtttgtgtctgccatgcccaaggctcctataccgttccggaagaaggaaaagcaggagaaagacaaggatgatctggggcccgataggttctcgacccttaccgacgatccttcgccaaggttatccgctcaggcccaggtcgccgaggacatactggataaatacagaaatgcgatcaaacgcacttcaccctcggatggagcgatggccaattatgagagcaccggcgataaccacgatcgcgatctttccagtaaactcctgtatcactcagacaaggaggtgatgggggatggggagtccgcccacgattcacctcgtgacgaggctctgcagaatatctcagctgatgacctgccagactccgctagccaggccgcccatcctcaggattccgccttctcttaccgcgatgccaagaaaaagctcagactcgccctgtgcagcgccgactcggtcgccttcccagttcttacccacagcacccgcaacggactgcccgatcacaccgatcctgaggacaacgaaatcgtgtgcttcctcaaagtgcagatcgctgaagccattaacctgcaggataagaatttaatggcacaactgcaagagactatgagatgtgtgtgccgcttcgataacagaacctgccgtaaactgttggctagtattgctgaagattatcgcaagagagccccttacattgcttatctgactcgttgcaggcagggattacagacaacgcaggcccatctggaacggttgctgcaaagagtccttagagacaaagaggtggccaacagatattttacaactgtttgcgttaggctcctcctggaatctaaggaaaagaaaattagagaatttattcaggatttccaaaagctcaccgccgctgatgacaagacagcccaggtggaggatttcctacagttcctctatggggctatggcccaggacgtcatatggcaaaatgccagcgaagaacagcttcaggatgcacaattggctattgagagatccgtgatgaaccggatctttaaactggcgttttacccaaaccaggacggagacatccttcgggatcaggtactgcatgaacacattcaacggctgtctaaggtggtgacagcaaaccaccgcgcgctccaaatccctgaagtataccttcgtgaggccccatggccctccgcccaatctgagatcagaacaatctcagcttataagacaccccgagataaagtccagtgtatcttacggatgtgcagcaccattatgaatctgttgtccttagcaaatgaagactccgtgcccggggctgatgacttcgtgccagtgctggtgtttgtcctgatcaaggctaaccccccctgtctgctgtcaactgtgcaatatatcagcagtttctatgcgagctgcctgtcaggcgaagagagctactggtggatgcagttcaccgcagcagtagaatttatcaagacgatcgacgataggaagtag

SEQ ID NO: 190000 - DNA, 2271 bp, synthetic construct
  misc_feature 1..2271: note = Description of Artificial Sequence: Synthetic coding sequence
  source 1..2271: mol_type = other DNA
atggtgaagctggacatccacaccctggcccaccacctgaagcaggaaagattgtatgtgaattccgagaaacagctcatccagcggcttaatgcagacgtgttaaagactgcggagaagctgtacagaaccgcttggatcgctaaacagcagcggatcaacctggatcgcctgattattaccagtgctgaagcctcacccgcagagtgctgccagcacgcaaagatcctcgaggatactcagtttgtcgatggttacaagcagctggggttccaagagaccgcatacggcgaattcctgagtagactgcgagagaatccacgcttgattgccagcagcctggtcgctggcgaaaaactcaatcaggaaaacactcagtcagtgatatacacggtgttcacatccctctatggaaattgcattatgcaggaagacgagagctacctacttcaagtccttaggtacttgattgagttcgagctgaaggagtcagacaatccaaggaggctgctacggagaggcacttgcgccttctccattctgttcaaactcttctccgaaggcttgtttagcgccaaattgttcctaacggccacattgcacgagcctattatgcagctgctcgtagaggatgaggaccacctcgagacagatcctaataaacttatcgagcggttcagtccgagccagcaagagaagcttttcggtgagaaggggtcagatcgctttcgccagaaagtgcaagaaatggtggaaagcaatgaggctaagctggtcgccctggtgaacaagttcattgggtatctgaagcaaaatacctactgttttccacacagcctccgctggattgtaagccaaatgtacaaaacactgagttgtgtggacagactcgaggtcggtgaggtgagggctatgtgtactgacctgctgctcgcatgcttcatctgccccgctgttgtgaatcccgagcagtatgggataataagcgacgctcccattaatgaggtggctcgctttaatttgatgcaggtaggcaggctactccagcagctagcaatgacaggctcagaggaaggcgacccccgcacaaagtcctccttagggaagtttgataagtcttgcgtggctgcattcctcgatgtcgtaattggcggtagagcagtcgagacccctcccctgagttctgtgaatctcctcgagggcctctcacgcacagtggtgtatatcacgtacagccagttgataacactcgtaaactttatgaaaagcgtcatgagcggggaccaattacgggaggatcgcatggcattagataacttactggccaatcttcccccggcaaaaccagggaaatcttccagcttagagatgacaccatacaatactccgcagttatcacctgccaccacccccgcgaacaaaaagaataggcttccaatcgcaacgcgctctcggagccggacgaacatgttgatggaccttcatatggatcacgaaggctcgagtcaggaaactatccaagaagtgcagccagaagaagtgctggtcattagcttaggtaccggacctcaactgactccaggtatgatgtccgagaatgaggtgctgaatatgcaactctcagacggaggtcaaggcgacgttcccgtggatgaaaataaattgcatggaaagcccgacaaaacattgaggttctctctttgctccgacaatcttgaaggcatatccgaggggccctccaaccgctccaatagcgtgtcaagcctggatctggagggcgaatctgtaagtgagcttggggcaggtccaagcgggtctaacggcgtggaagccttgcagctgctggaacacgaacaggcaacaacacaagataatctggacgataaactacgaaagtttgaaatcagggatatgatggggctaaccgatgacagggatatctccgagacagtttcggagacgtggtcgacagacgtgctcgggtcggactttgaccccaatatcgatgaggaccgcctacaggaaattgcaggcgcagccgcagagaatatgctgggatccctgctttgtctcccgggctctgggtcggtgttgctcgacccgtgcaccggctctaccattagtgagaccacctcagaagcctggtcagtcgaggttctcccttctgactctgaagctcccgacctgaagcaggaagaacggctgcaagagctcgagagctgctccgggctggggtccacgtccgatgacacagatgtgcgcgaggcttag

SEQ ID NO: 190001 - DNA, 921 bp, synthetic construct
  misc_feature 1..921: note = Description of Artificial Sequence: Synthetic coding sequence
  source 1..921: mol_type = other DNA
atgggcggccggaagatggccaccgacgaggagaacgtgtacggccttgaggagaacgctcagtcacggcaggagtctacacgtagactcattctggtcggcagaactggtgccggaaaatcagcgactggcaactccatcttgggacagaggcggttcttcagtcgattaggcgccacctccgtcacgcgggcctgtactacagggtctcgacgttgggacaaatgccatgtggaggtggtcgatacccctgacatcttttccagccaggtcagtaaaactgaccctggctgtgaggagagaggacattgctacctgcttagcgcacccggccctcacgcactgcttctggtgacccagctcggaagatttaccgcacaggatcagcaggccgttcgccaggtacgtgatatgtttggtgaggacgtgctcaaatggatggtcattgttttcacaagaaaggaggatctcgcgggggggtcactgcacgattacgtatctaatacagaaaatagagctctgagagagttagtggctgaatgtggcgggcgagtatgcgcatttgataatcgcgcgactggaagagagcaagaagcccaggtggagcagcttctgggcatggtggaagggctggtgctagaacataagggggcacactacagtaatgaggtttatgaattagcacaagtgctgaggtgggccggcccagaagaaagactgcggcgggtcgctgaacgggtggcagctagggtgcagcggagaccatggggcgcctggttgtcagcaagactgtggaaatggttgaagtcgcctcgaagctggcgtctcggcctggctctcctgctggggggcgctctccttttctgggtgctgctgcaccgtagatggagtgaggctgtagccgaagtgggccctgattag

SEQ ID NO: 190002 - DNA, 681 bp, synthetic construct
  misc_feature 1..681: note = Description of Artificial Sequence: Synthetic coding sequence
  source 1..681: mol_type = other DNA
atgagctgggtgcaggccgccagcctgatccagggccccggcgacaagggggacgtgtttgatgaagaggcagacgagagcctgttagcccaaagagaatggcagagcaacatgcaacgcagagtcaaggagggctatcgggacggtatcgatgctggaaaggctgtgacccttcaacaaggatttaaccagggctataagaagggagctgaagtaatcttgaactacgggcggctcagaggaaccctgagtgcgctgctctcttggtgccatctgcacaacaacaactcgacactcatcaataaaatcaataacctgttggatgcagtgggtcagtgcgaagagtatgtacttaagcatctcaaatctataacccctccttctcacgtcgtggaccttctggacagtatcgaggacatggacctgtgccatgtcgtgccagccgaaaagaaaattgatgaggcaaaggacgagcgcctttgtgagaacaatgccgaatttaataagaactgctcaaaatctcattccggcattgattgctcctatgtggaatgttgtcgcacacaggagcatgcccattccgaaaacccttcccccacttggattttggaacagacagcctccctggtgaagcagctggggctcagcgtggatgtcctgcaacatttaaagcaactgtag

SEQ ID NO: 190003 - DNA, 990 bp, synthetic construct
  misc_feature 1..990: note = Description of Artificial Sequence: Synthetic coding sequence
  source 1..990: mol_type = other DNA
atggccgcccagtacggcagcatgagcttcaaccccagcacccccggggcgagctatggtccaggtcggcaggagccccggaatagccagctgaggattgttctggtggggaaaaccggggcgggaaagtccgccactgggaatagtatattggggcggaaagtcttccacagcggaacggccgcgaagtcaataaccaaaaagtgcgagaaacgctctagttcttggaaggagacggagctggtcgtggtggatactcccggcatcttcgatacagaagtgcccaatgccgagacttcaaaagagattattcggtgtatacttctgacatcaccaggcccacacgcattgctgctggtggtgcccctcggacgttatacggaggaggaacataaggccaccgaaaaaattttaaaaatgttcggagagagagctcgtagcttcatgatcttgatttttacgcggaaggatgatctgggggacactaacctacacgactacctccgggaggccccagaggacatccaggatctgatggacatctttggggatcgctattgcgccctcaataacaaggccaccggggccgaacaggaagcacagcgcgcacagctcttaggcctgatacagagagtagtgcgggaaaacaaagagggatgttacacaaatcggatgtatcagcgtgccgaagaggaaatccagaagcaaacccaggctatgcaagagttacaccgagtcgagctggaaagggagaaggcccggatcagagaagagtatgaagagaagatccggaagcttgaagacaaagttgaacaggaaaagcgcaaaaagcagatggagaagaagctagccgagcaggaggcccactacgccgtcagacagcagcgggcaagaacagaagtcgagtcgaaagacggaatcctcgagctcataatgacggccttacagatcgcctcattcattctcctgcgtctctttgctgaagactag

SEQ ID NO: 190004 - DNA, 786 bp, synthetic construct
  misc_feature 1..786: note = Description of Artificial Sequence: Synthetic coding sequence
  source 1..786: mol_type = other DNA
atggccgcccagtacggcagcatgagcttcaaccccagcacccccggggcaagttacgggcccggccgccaggagccgcggaatagtcaacttaggatcgttctcgtcggtaagaccggtgcaggcaaaagcgctaccggcaacagcatcttaggacgcaaagtgtttcactccggcacagccgcgaagtcgataaccaagaagattctgaagatgttcggagaacgcgccagatccttcatgatacttatctttacacggaaggacgacctcggagataccaatcttcatgactatctgcgtgaggcacccgaggacatccaggatttaatggacatctttggcgacaggtactgtgcccttaacaataaagccacaggggcagaacaagaagcccaaagagcacagctcctcggcttaatccagcgagtggtacgagagaataaagagggctgttataccaatcggatgtatcagagggccgaggaggaaatacagaaacagacacaagccatgcaagagctacatagagtggaattggagcgggagaaagccaggatacgagaggaatacgaggaaaaaatccgtaaactcgaggataaagtcgaacaggaaaagaggaagaaacagatggaaaagaaactcgccgaacaggaggcccattacgccgtgcggcagcagcgggcgaggacagaggtcgagtctaaagatgggattctcgagctgataatgaccgccctgcagatcgcctcttttattctgctccgtctctttgcagaggactag

SEQ ID NO: 190005 - DNA, 456 bp, synthetic construct
  misc_feature 1..456: note = Description of Artificial Sequence: Synthetic coding sequence
  source 1..456: mol_type = other DNA
atggccgcccagtacggcagcatgagcttcaaccccagcacccccggagcctcatacggcgaacgggcattctcagctccccagactaggctgcagggcggccccggtcggcaggaacccaggaattctcagctcaggattgtcctggtgggaaaaactggcgctggcaagagcgctacgggcaacagtatcttggggcggaaggtcttccatagtgggaccgccgctaagagcatcactaagaaatgcgaaaagcgaagctccagttggaaggagaccgagttagtggtcgtggacacgcccggcatttttgacactgaagtaccaaatgctgagacctctaaggagattatccgatgtatactcctgacgagccctggaccgcatgctcttctgctggtggtgccgctgggcaggtacaccgaagaagaacataaagctaccgagaaaatctag

SEQ ID NO: 190006 - DNA, 924 bp, synthetic construct
  misc_feature 1..924: note = Description of Artificial Sequence: Synthetic coding sequence
  source 1..924: mol_type = other DNA
atgggcggcttccagcggggcaagtacggcaccatggccgagggcagatccgaagataacctctccgctaccccccccgccctgcggatcatactggtaggcaaaacgggatgtggcaaatctgccacgggaaattcgattctgggccagcccgtttttgagtcaaagctcagagcccagagcgtgacccgtacatgtcaggtgaaaactgggacctggaacggcaggaaggtgctggtggtcgatacaccctccatcttcgaaagccaagcagatacacaggaactgtataagaatattggcgactgctatttgctgagcgcccccgggccccacgtgttgctcctggtgatccagttaggtcgcttcactgcccaggacaccgtggccatcagaaaggtcaaagaagtgttcggaactggcgccatgagacatgtcgtgatcctctttacacacaaggaggatcttggtggccaggcgctggacgactacgttgccaacacagacaactgttctctgaaggatttggtgcgggagtgtgaaaggagatattgtgctttcaataattggggctcagtcgaagagcagaggcaacagcaagctgaacttctcgccgttatcgagagactcggcagggaaagggaggggtcgtttcactccaatgacctcttcctggacgcccaactgctgcagcgtacaggcgcaggggcatgccaggaagactaccgtcagtatcaggcaaaggttgagtggcaggtcgagaagcacaagcaggagctgagagagaacgagtctaactgggcttataaggctttactgcgcgttaagcacctaatgctcttacattacgagatctttgtgttcctgctgctgtgctctatcctgttttttattatatttctctttatcttccactacatttag

SEQ ID NO: 190007 - DNA, 1032 bp, synthetic construct
  misc_feature 1..1032: note = Description of Artificial Sequence: Synthetic coding sequence
  source 1..1032: mol_type = other DNA
atggagctgagcgcccccgcccacggcagcagcctgaccgccagcgctcagccaccttcagtgacggctaccctggaggatcgggcccagcaaccgtttctggagaggatgggtggtttccaaaggggcaagtacgggactatggccgaggggagatctgaggacaatctaagcgcaacccccccagcgcttaggatcattctagtagggaagacggggtgtggcaagtctgccactgggaactctatcctcggccagcccgtgttcgagtctaaactgagagctcagagcgtgaccagaacctgccaggtaaagactggcacatggaatggtcgcaaggtgttggtggtagataccccatcaattttcgagtcacaggccgatactcaggaattatataaaaacatcggagactgctacttgctaagtgctcctgggccccacgttctgttgctcgtgatacaactggggcggtttactgcacaggacaccgtagctatccgaaaagtaaaagaagtctttggcacaggcgctatgcgacacgtggtaatcctgtttactcacaaagaggaccttggcgggcaggctctagacgattatgtggcgaacactgacaactgctctctgaaggatctcgtcagagaatgcgagagacggtattgtgctttcaacaactggggatccgtggaggaacaacgacaacaacaggccgaactactggcagtcattgagcggcttggacgtgagcgcgaaggctcttttcacagcaacgatcttttcctggatgcacagttactccaaagaactggtgctggcgcttgtcaggaggactaccgccaataccaagctaaggtggaatggcaggtagaaaaacacaaacaggagctgagggagaatgagagcaattgggcttacaaggccctcctgcgcgtcaagcacttaatgctccttcattacgagattttcgtgttccttctgctttgtagcatactcttttttattatattcctgttcatcttccattacatatag

SEQ ID NO: 190008 - DNA, 879 bp, synthetic construct
  misc_feature 1..879: note = Description of Artificial Sequence: Synthetic coding sequence
  source 1..879: mol_type = other DNA
atggaggaggaggagtacgagcagatcccccaggagaacccccccgaggaacttagtcaggatccagtactggagttgagcgggggcctgcgcgaaaaggaacaaaaaactcccaggaggctgaggttgatactcatgggaaagacaggaagcggtaaaagcgctaccgggaattctattctcggtcgcgatgtgtttgaatcaaaattgagcaccaggcctgtgactaagacctcccagagaagatcccgcgaatgggccggaaaagagctagaagtgatcgatacacctaatatcctgagtcctcaggtttcacccgaagtggccgatgccatttgccaggcaattgtgctctccgctcctggacctcacgccgtgctcttggtaacccagctcgggagatttaccgacgaagatcagcaagtggtccggcggctgcaggaggtattcggagtgggtgtcctcgggcacacaatactggtgttcacgcgcaaagaggacctggctggcgggagcctcgaggattatgtaagggaaacgaataaccaggcgctcgcctggttggacgtaaccctcgcgcggcggcactgcggttttaataaccgtgcgcaaggcgaggaacaggaggcccagttgagagaactgatggagaaggtggaagccatcatgtgggaaaatgagggggattattattccaataaggcatatcagtacacgcagcagaacttccgactcaaagagctgcaggagcgccaggttagtcaaggccaaggttccgaggacgtgcccggggaggagtcctggctcgagggtctaagccagattcagaaggagtcagaagaagcccatagatgcctcctgggcaaagccgatctttag

SEQ ID NO: 190009 - DNA, 1062 bp, synthetic construct
  misc_feature 1..1062: note = Description of Artificial Sequence: Synthetic coding sequence
  source 1..1062: mol_type = other DNA
aagccctggtactgggtgagctggtgcagcatcggccaggtgagcctgttcttcttgggcagcgcacttgcactcggagaaaacgtgcaaccccatctgcaaggctgtgggcccagaatggtggcccaacggtggtttcaggggagatgttggtcctttacaatctgcccatgttccctgggagtgcacccagaggcgcccggtgacgacaagatgggctacatggggccctaccccagcagtctgtgcttcctgtggattttcctggggctcagggagaaagaacagaagacgccacgccggctccgactgatattaatgggcaagaccggcagcggcaaaagtgccactggaaacagtatcttgggcagggatgtatttgagtcaaagctgtcaaccaggcctgtcaccaaaacatcacagaggcgatcaagggagtgggccggaaaggagctggaggtaatcgatacccccaacattttgtccccacaagtgtccccagaggtagccgatgccatttgccaagccatcgttctaagtgcacctggacctcatgccgtcctgctcgtcactcagttgggacgattcaccgatgaggaccagcaggttgtacgcagactacaggaagtatttggggtcggggtgctcggtcataccattttagtattcacccggaaggaggacctggctggcggcagcctcgaagactatgtgcgcgagacaaacaaccaggccctggcctggctcgatgtgaccctggccagacggcattgtgggtttaataatcgggctcagggcgaggaacaagaagcacagctgcgcgaactcatggaaaaagtcgaagcaatcatgtgggagaatgaaggagattactactctaataaggcttatcaatacactcaacagaactttaggctcaaagagctgcaagagcgccaagtgtctcagggacaggggagtgaagatgttcccggcgaggagagctggctggaaggcttgtctcaaattcaaaaagagtcagaagaagctcacaggtgtctcctgggaaaagccgatctctag

SEQ ID NO: 190010 - DNA, 189 bp, synthetic construct
  misc_feature 1..189: note = Description of Artificial Sequence: Synthetic coding sequence
  source 1..189: mol_type = other DNA
atggaggaggaggagtacgagcagatcccccaggagaacccccccgaagagctgtcacaggatccggtcctagaactctcgggaggccttgcaagaggggggcggaggtacttgcctagtcatcggcttataagaccacgcgcacctaggagggccccaggcgacaccaccggaccggttcacggctag

SEQ ID NO: 190011 - DNA, 1266 bp, synthetic construct
  misc_feature 1..1266: note = Description of Artificial Sequence: Synthetic coding sequence
  source 1..1266: mol_type = other DNA
atgcggtggatcctgttcatcggcgccctgatcggcagcagcatctgtggacaagaaaaattcttcggagatcaggtcttgaggataaacgtcagaaacggcgatgaaatcagtaagctgtcgcagttagtgaactcgaacaatctgaagttgaatttctggaagtctccgagcagttttaacagacctgttgatgtgcttgttccttccgtgtcgctgcaggcattcaagtcttttctcaggtcacaggggttggaatacgccgtgaccatcgaggatttacaggccctgcttgataatgaggacgatgagatgcagcacaacgagggccaagagaggtcctctaataacttcaattacggagcttatcatagtctggaggctatctaccatgagatggataacatagcagctgattttcccgatttagcgcgaagggtgaaaattgggcacagctttgagaatagacccatgtacgtgttgaagttctcgaccgggaagggcgtcaggcgtcccgccgtgtggctgaacgcgggcattcattctagagagtggatttcacaagcaacagccatctggactgctaggaagattgtgtcagattaccagagggacccagcaatcactagcattctggagaagatggacatttttctcctgcctgtcgccaacccagacggttatgtgtacactcagacacagaaccggctttggcgcaaaacgaggagccggaatcccgggagttcctgcataggcgctgacccaaaccgaaattggaatgcctcattcgcgggtaagggggccagcgacaatccctgctctgaagtgtaccacggtcctcacgccaactccgaagtggaggtcaagtccgtggtggactttattcagaaacatggcaacttcaagggattcatcgacttacactcttactcccagctgctgatgtacccctatggatactcagtaaagaaagccccggatgcagaagaactcgataaagtcgcaagactagcagcgaaagcactggccagcgtttccggtacagaatatcaggtgggccctacttgtaccacagtgtaccctgcatcaggatcaagtatcgattgggcgtacgacaacggaatcaagtttgcgttcacttttgagttaagggacactggtacgtatggattcctgcttcctgccaatcagataatccctaccgccgaggaaacctggttgggattgaaaacaattatggaacacgtgcgcgacaatctctactag

SEQ ID NO: 190012 - DNA, 927 bp, synthetic construct
  misc_feature 1..927: note = Description of Artificial Sequence: Synthetic coding sequence
  source 1..927: mol_type = other DNA
atggtgcactgcagctgcgtgctgttccggaagtacggcaacttcatagataagctgagactctttaccaggggcgggtctggtggcatggggtatccccgactgggaggagagggcggaaagggcggtgatgtgtgggtggttgcccagaacaggatgaccttaaagcagcttaaagaccgctacccgagaaagagatttgtggcaggagtcggggcgaactccaagttccccaacgctggcaaatcatcgctcctaagttgtgttagccacgctaagcctgctattgcggattatgcctttactactctgaagccggagctggggaaaatcatgtactccgacttcaagcagatcagcgttgccgacctgccaggcctgatcgaaggtgcccacatgaacaaagggatgggccataagttcctgaaacatatcgaaagaacaagacagttgctgtttgttgtagacatttccggttttcagttgagctctcacacacagtaccgaaccgctttcgagactattatactcttaactaaggagttagagttgtacaaagaggagcttcagaccaaaccggcgttactggcagttaataagatggatctgcctgacgctcaggataaatttcacgaattgatgtctcaacttcagaaccctaaagacttcttgcatctgttcgaaaaaaatatgatccccgagcgaaccgtggaattccagcacatcattccaattagcgccgtgaccggtgagggaatagaggagctgaagaactgcatcagaaagagccttgatgaacaggccaatcaggaaaatgacgcccttcacaagaagcagctgctgaatctgtggattagcgataccatgtcttctactgaaccaccaagcaaacatgccgttaccacctcgaagatggacattatctag

SEQ ID NO: 190013 - DNA, 711 bp, synthetic construct
  misc_feature 1..711: note = Description of Artificial Sequence: Synthetic coding sequence
  source 1..711: mol_type = other DNA
atgagcgcccccagcgccacccccatcttcgcccccggcgagaactgttcccccgcctggggcgcggccccggcagcctacgatgctgccgacacgcacttgcgcattctgggcaagcccgttatggagaggtgggagactccatatatgcatgccttagccgctgctgcgagtagtaagggaggaagagtgttggaggttgggtttggcatggcgatcgctgcgagcaaggtgcaagaggcccccatagacgaacattggattatcgaatgtaacgacggcgtattccagagactgcgggattgggcacccaggcaaacgcacaaagtaatacctcttaaaggactctgggaggacgtggcgccaaccctgcccgatggccattttgacggtatactctacgatacatatcctttgtccgaagaaacctggcacacgcaccagttcaatttcataaaaaatcacgcctttaggctgttgaagccagggggggtgctaacttactgtaatctgacttcttggggggagctgatgaaatccaagtactctgacatcacaatcatgttcgaagagacccaggtcccagcactcttggaagccggtttccgtagggaaaatattcgcacagaagtgatggccttggtgccgccagcagattgccggtattacgcatttcctcagatgataacgcctctggtgacaaaaggttag

SEQ ID NO: 190014 - DNA, 810 bp, synthetic construct
  misc_feature 1..810: note = Description of Artificial Sequence: Synthetic coding sequence
  source 1..810: mol_type = other DNA
atgagcgcccccagcgccacccccatcttcgcccccggcgagaactgcagccccgcatggggggcagctcccgccgcctacgacgccgccgacacacacctaaggatactcgggaaacctgtaatggagagatgggaaaccccttatatgcacgcattggctgctgccgcttcatcaaaggggggtcgggtgttggaagtggggttcggaatggctatcgccgcctccaaggtccaggaggcccccatcgacgagcattggattatcgaatgtaacgacggtgtgtttcagaggctcagggattgggcgccacgccaaacccataaagtcatacccctgaaaggactctgggaggacgttgcgcctaccctacccgatggacatttcgatggcattctctacgacacttatccactgtccgaggaaacctggcatacacaccaattcaacttcattaagaaccacgccttcagactattaaagccgggcggtgttttgacttattgcaatctgaccagctggggggaactgatgaagtccaaatatagcgacatcacaatcatgtttgaagttcggccccccgaagtcccacacgggtcacccggttcagatctgggatggggctgggagggtgctgccggcgccaccctgctgcctggggaagggccgttcctcacaccgtgggtgggctggacagtgttggtgcatcttgaaattaaggtgctatgtcttgcacagtggttacccggcgccgttgctcaagtttacaacccctctactgtcgaggggaggggtggacagatcgcctag

SEQ ID NO: 190015 - DNA, 1416 bp, synthetic construct
  misc_feature 1..1416: note = Description of Artificial Sequence: Synthetic coding sequence
  source 1..1416: mol_type = other DNA
atgtgcgccgcccagatgccccccctggcccacatcttccggggcacatttgttcactcaacgtggacctgtcctatggaggtgctaagagaccacctgctcggggttagtgactcaggcaaaattgtattcttggaagaggcttctcagcaggaaaagctcgccaaggaatggtgctttaaaccatgcgagatccgggaactgtcccaccatgaattcttcatgcctggactagtggacacccacatccacgcatcacagtattccttcgccgggtcctctattgacctgccattgctggagtggctcaccaagtataccttcccggcagagcataggttccaaaatatcgactttgcagaggaggtctacacgcgcgtcgtcagacgcaccctcaagaatgggacaacaaccgcctgttactttgctaccatccacacagatagttccctcctattggccgacattaccgataagtttgggcaacgagcctttgtgggcaaagtgtgtatggacctcaacgatacgtttcccgaatacaaagaaacaaccgaggagagcataaaggaaacggagaggtttgtgtctgagatgctccagaagaactacagccgggtgaagccaatcgtcacgccccgtttctccctatcttgtagcgagaccctcatgggggagttaggcaacatcgcgaagacacgtgacctgcatattcagagccacatcagtgaaaatagggatgaagtcgaggccgtcaaaaatttatatccctcctacaaaaattatacaagtgtctacgacaaaaataacctgctgactaacaaaacagtgatggctcacggctgctacttatcagccgaagaactgaatgtgttccatgagcgaggggcgtccatcgcccactgtccgaatagtaacctgtctctttctagtggatttctgaatgtcctggaagtacttaagcatgaggtgaagatcggtcttgggacggatgtggcaggagggtatagctactcgatgcttgatgcgatcagacgcgccgttatggtgtctaacattctactcattaacaaggtgaacgaaaagtctctcactctgaaagaagtcttccggctggctacactgggcggttcccaggccctgggactcgacggagagatcggaaattttgaggttggaaaagaatttgacgccatccttattaatcccaaagcttccgattccccaatcgatctgttttatggagacttcttcggggacatatcggaagccgttattcagaaattcctgtatctgggagatgacagaaacatagaggaagtgtatgtgggcgggaaacaggtggtgcccttctcctcttcagtgaaagagacaatacatctgcccgcctcatcaccacacccgcctcctttcccctag

SEQ ID NO: 190016 - DNA, 1365 bp, synthetic construct
  misc_feature 1..1365: note = Description of Artificial Sequence: Synthetic coding sequence
  source 1..1365: mol_type = other DNA
atgtgcgccgcccagatgccccccctggcccacatcttccggggcacgttcgttcatagcacatggacttgtcctatggaagtgcttcgagatcacttgctcggcgtgtccgatagcggcaaaattgtgttccttgaggaggcatctcagcaagagaagctggctaaggaatggtgcttcaaaccctgtgaaatccgggagctgtctcaccacgaattctttatgcccggcctcgttgacacccacatccatgcctcccaatactcttttgccggtagctcgattgatctgccactgctcgagtggctgaccaagtataccttcccagcagagcatcgatttcagaatatcgattttgctgaagaggtttacacacgagtggtgaggagaaccctgaaaaacggaacgactactgcctgctatttcgctacaatccataccgacagctcactgctgctggctgatatcaccgataagtttggtcagagggcttttgtggggaaggtgtgtatggacctaaacgacaccttccctgagtacaaagagacaactgaggagtcaattaaggagactgaacgctttgtcagcgagatgctccagaagaactactcccgagtgaaacccattgttactccgcgtttctcactgagctgttccgagaccctcatgggcgaattggggaacatcgcaaagacacgggaccttcacatccaatcccatatcagcgagaatcgtgacgaagtggaagctgtgaagaacctgtaccccagctacaagaactacacatctgtttacgacaagaataacctgctgacaaacaagactgtgatggcccacggatgttacctcagcgccgaggaactgaatgttttccacgagcggggtgcttcgatcgctcattgccctaactccaacctcagcctgtcatctggcttcctgaacgtcctagaggtgcttaaacacgaggttaaaattggcctcggtacagacgtggccggcggatactcctacagcatgttggatgcgatccgacgagccgtgatggttagtaacatcttgctgattaacaaagttaacgagaaatcccttaccctgaaagaggtatttaggctggccaccctggggggatcccaagctctgggtttagatggtgaaattggaaactttgaggtgggcaaggagtttgacgccattctgataaaccccaaggcttccgattcaccaatagatctcttctatggcgatttcttcggtgacatcagtgaagctgtgattcaaaagttcctgtatctcggtgatgatcggaatattgaggaagtgtatgtgggcggtaaacaggtcgtgcccttctcttcttccgtgtag

SEQ ID NO: 190017 - DNA, 1182 bp, synthetic construct
  misc_feature 1..1182: note = Description of Artificial Sequence: Synthetic coding sequence
  source 1..1182: mol_type = other DNA
atgttcctggaggaggccagccagcaggagaagctggccaaggagtggtgttttaagccatgcgagatacgggagctttctcaccacgagttttttatgcccggactggtggatacacacatccatgcttctcagtactcgttcgctggctcatccattgaccttccattactggaatggttgacgaaatacacttttcctgccgagcaccggttccagaacatcgacttcgcagaggaggtttatacaagggtggtgcggaggacattgaaaaacggaactactacggcctgttacttcgccaccattcacaccgatagctccctgctcttggccgatattacagataagttcggacagagggccttcgttggcaaggtgtgtatggatctcaatgataccttccccgaatacaaagagacaacggaggagtcaattaaggagacagaaagatttgtaagcgagatgctgcagaaaaatagtcatatctctgaaaatagagacgaggtggaagctgtcaaaaacttatatccttcatataaaaactatacctctgtatacgataaaaacaatctgctgaccaataaaacagtgatggcccatggctgctacctctccgctgaagaattgaacgtgttccacgagagaggagcgtcgatagctcactgccctaactcgaacttgtctctatcatcgggcttcttaaacgtgctagaggtgctcaaacacgaggtcaaaatcggtcttggaacggacgtcgctggtgggtattcttatagcatgcttgatgcaatccggcgcgcggtgatggtctctaacatcctgctgatcaacaaagtgaacgaaaaaagcctcaccttgaaagaggtgtttagattagccacactcggtggctcacaggctttgggactcgacggggagattgggaatttcgaggtgggtaaagagtttgatgcgatcttgataaatcccaaggcaagcgacagtcccatcgatctattttacggcgatttttttggggacatctccgaggccgtgatacagaagttcctgtatctgggcgatgatcgcaatatcgaagaagtgtacgtcggaggaaagcaggttgtccctttttccagttcagtcaaggagaccatccaccttcccgcaagcagccctcatcccccgccttttccttag

SEQ ID NO: 190018 - DNA, 1233 bp, synthetic construct
  misc_feature 1..1233: note = Description of Artificial Sequence: Synthetic coding sequence
  source 1..1233: mol_type = other DNA
atggaggtgctgcgggaccacctgctgggcgtgagcgacagcggcaaaatcgttttcctggaagaggcttcgcagcaggagaaattggccaaagagtggtgtttcaagccttgcgagattcgagaactcagccaccacgaattcttcatgccaggccttgtcgatacacacattcatgcctcacagtattccttcgctggttcctccatcgaccttcccctgctggagtggcttacgaagtacaccttcccggcagaacatcgtttccaaaacattgactttgccgaagaggtctacacacgcgtggtgcgcagaactctgaaaaacggtacaacaaccgcctgttatttcgccactattcacaccgactctagcctcttgctggccgacattacagacaagttcggtcagcgcgccttcgttggaaaagtctgtatggatctcaatgacactttccctgagtataaagagaccactgaggagtccataaaggagacagagcgctttgtgtctgaaatgctccaaaagaattctcatatctcggaaaaccgcgacgaggtggaggcagtgaaaaacctctaccctagttataagaactacacctctgtgtatgataagaacaacctgctgacaaacaagactgtcatggcacacggttgctatctgagtgccgaagaacttaatgtgtttcatgagcgtggcgcctccatcgcacactgccccaattctaacttatccctaagtagcggcttcttgaacgttctggaggtgctgaaacacgaggtaaagataggactgggaacagacgtggccggcggctactcttactcgatgctggatgctatacgtagagccgtgatggtaagcaacattttgctcattaacaaggtgaatgaaaagagcctcacgcttaaggaggtcttcaggttggccactctggggggatcacaggccctcggactggatggtgagattggaaactttgaggtgggtaaggaatttgatgctatcctcattaacccgaaagcttccgatagtccaatcgacctgttttatggtgatttcttcggcgacatcagcgaggccgttatccagaagttcttgtatctgggcgatgaccggaacattgaggaagtttacgtgggggggaagcaggtcgtccctttctcaagcagtgtgaaggaaacaattcacttgcccgcctccagcccccaccccccgccctttccatag

SEQ ID NO: 190019 - DNA, 588 bp, synthetic construct
  misc_feature 1..588: note = Description of Artificial Sequence: Synthetic coding sequence
  source 1..588: mol_type = other DNA
atgaccctgttccagaacacccggcggcccctgcggaaccggagcaggaagctgcgggactgtcatagcgtgactcaagctggagtgcaatggagagatttatccagtttgaagcctcccccccctgtctttaaaagatttagctgcctcagtctgccatcctcttgggactatcgattcgtgtccgagatgttgcaaaaaaactactctagggtcaaacctattgtcacaccaagattctctctctcttgttccgaaactcttatgggtgagctggggaacatcgctaagacccgcgatctacatattcagtcgcatatcagcgagaaccgggatgaggttgaggccgtgaagaatttgtacccctcttacaagaactacacaagcgtgtacgataagaacaacctgttaaccaataagactgttatggcgcacggatgttacctatctgctgaggaactgaacgtgttccatgagcgcggcgcttccatcgcccattgtccaaactccaatttgagtctatcctcaggatttctgaacgtgctggaagttctgaagcatgaggtgaaaataggactcggcacatag

SEQ ID NO: 190020 - DNA, 540 bp, synthetic construct
  misc_feature 1..540: note = Description of Artificial Sequence: Synthetic coding sequence
  source 1..540: mol_type = other DNA
gagcggggcgccagcatcgcccactgccccaacagcaacctgagcctctccagtggcttcctgaatgtgttggaggtgctgaaacatgaagtgaagattggtttagggacagatgtggcaggtgggtactcctacagcatgctggatgcgatcaggagggccgtaatggtgtctaacatcctgctcataaataaggttaatgaaaaaagcctgactctcaaggaggtgtttagactagccaccctcggggggagtcaagcactcggtcttgacggcgaaataggcaacttcgaggtcggcaaggagtttgacgcgatacttattaatcctaaagcttctgacagcccgatagacctcttctacggagacttctttggcgacataagtgaagctgtcattcagaaatttctgtacctgggagatgatcgcaatatagaggaggtgtatgtgggcggaaagcaggttgtgccattttcctccagcgtgaaggagacaatacacctgcccgcaagttccccacacccccccccatttccatag

SEQ ID NO: 190021 - DNA, 1365 bp, synthetic construct
  misc_feature 1..1365: note = Description of Artificial Sequence: Synthetic coding sequence
  source 1..1365: mol_type = other DNA
atgtgcgccgcccagatgccccccctggcccacatcttccggggcacttttgtccactccacatggacttgtcccatggaagtgctgagggaccatctactgggcgtgagtgacagcggaaagatcgtgttcctggaagaggcatcccaacaggagaaattggctaaggagtggtgtttcaagccgtgcgaaattagggagctgtcacatcatgaattctttatgcccggtttagtagacacgcacattcacgcgtcgcagtacagttttgctggatctagtatcgatctgccccttttggagtggcttactaaatatactttccccgcggaacacaggtttcagaatatcgactttgcagaagaggtgtatacccgagtggttaggcggaccctgaaaaatggcactaccaccgcctgttacttcgcaactattcacaccgattctagcctgctgctggccgatataactgacaaattcggccagcgcgcctttgtcggtaaagtgtgcatggacctgaacgatacatttccggaatacaaggagacgaccgaggagtccatcaaggaaactgaacggttcgtgtctgagatgctgcagaagaattatagccgtgtgaaacccatcgtgacaccacgattctccctaagctgctcggaaaccctcatgggtgagctgggcaatatcgctaaaactcgagacctgcatattcagtcccacattagcgaaaaccgcgatgaagtcgaagccgttaaaaatctttaccccagctacaagaattacactagcgtgtacgataagaataatcttctaacaaacaaaaccgtaatggcccatggctgttatctctcagcagaagaactgaacgtgttccacgagcgtggagcatccatcgctcactgtcctaactctaacctctcccttagctctggctttctcaatgttctggaggtactcaagcacgaagtgaagatcggtctgggaaccgatgtcgccggcgggtactcttatagtatgctagacgcaataagacgtgccgtaatggtgtccaatatcttgctgataaacaaggtaaacgagaagagcctgacgctgaaagaggtgttcaggctggctaccctaggaggaagccaggccctagggctggacggcgaaattggcaatttcgaagtggggaaagaatttgatgccattttaattaaccctaaagcctctgactcccccatagacctcttttatggagacttttttggggatattagcgaggcagtgattcaaaaattcctgtacctaggtgatgaccgaaacatcgaggaggtttacgttgggggcaaacaggtggtccccttctcaagcagcgtgtag

SEQ ID NO: 190022 - DNA, 1143 bp, synthetic construct
  misc_feature 1..1143: note = Description of Artificial Sequence: Synthetic coding sequence
  source 1..1143: mol_type = other DNA
atgcccggcctggtggacacccacatccacgccagccagtacagctttgcaggcagcagcatcgacttgcccctattagagtggctgacaaagtatacttttcctgcggaacatcggttccagaacattgatttcgctgaagaggtctacacacgggttgtgcgccgcaccctgaaaaatggaacaaccactgcatgttactttgccaccattcacacggattccagcctgctgctggccgacattaccgataagtttggtcagagagctttcgtcggcaaagtctgtatggatctgaacgataccttcccggagtataaggagacaactgaggaaagcataaaggagaccgaaagattcgtgtccgaaatgttgcagaagaactactcacgtgtgaaacctatcgtgactccccgattttccctgtcatgttccgaaaccctgatgggagaactgggtaacatcgcgaagactcgcgacctgcacattcagtctcatatttccgagaatagagacgaggtggaagccgtgaagaatctatatccctcttacaagaactacacctcagtatatgataagaacaacctcttaaccaataagacagtgatggctcacggctgctacctctcggccgaggagctcaacgtgttccatgagcggggggcgtcaattgcccattgccccaactccaacctgtctctgtcctctgggtttttaaatgtgctggaggtgctgaagcacgaagtcaaaatagggctcgggacagatgtggctggcggctattcttactccatgctcgatgcgattagacgggccgtgatggtttctaacatcctgctcatcaacaaggttaacgagaaatctttgactttgaaggaggtgtttaggcttgctactttaggggggagccaggccctcgggcttgatggggaaattggaaattttgaggtggggaaggagtttgatgctatcttgatcaaccccaaagcttctgattcaccaatcgacctgttttacggggacttctttggggacatttcggaggctgttattcagaaattcctgtatctcggtgatgacagaaatatagaagaagtctacgtcgggggaaagcaggttgtgcccttcagttcctctgtttag

SEQ ID NO: 190023 - DNA, 2082 bp, synthetic construct
  misc_feature 1..2082: note = Description of Artificial Sequence: Synthetic coding sequence
  source 1..2082: mol_type = other DNA
atggccctgtgcaacggcgacagcaagctggagaacgccggcggcgatctgaaagatggccaccaccactacgaaggcgctgttgttatcctggacgccggcgctcagtacggtaaagtgatcgataggcgggtgagagaactgtttgtgcaaagcgaaatttttccgttggagaccccagcctttgccatcaaggagcagggcttccgtgccatcatcatttccggcggtcctaactccgtctatgcagaggacgcgccctggttcgacccggccatttttactattggtaagcccgtgttgggcatctgttacggaatgcagatgatgaataaggtttttggaggcacagtccataagaagtctgtccgagaagatggcgtgtttaatatcagcgtcgacaacacttgctcactcttcagagggctgcaaaaagaagaggtggtgctgctgacgcatggcgatagtgtggacaaggtagcagacggatttaaggtggtcgcacgctctgggaacatagtggctggtatagcaaatgagtcaaaaaaattatacggagctcagtttcacccagaagtgggtctcaccgaaaacggtaaagtgatattaaagaactttctctacgatattgccgggtgctctggaaccttcaccgtgcagaaccgagagctcgagtgtattcgcgaaattaaggagagggtgggaactagcaaggtgctagtgctcttgtctgggggggtggattctactgtctgtacagccctactgaaccgggcccttaatcaagaacaggttattgctgttcacattgacaatggctttatgcgtaaacgggagtcccagagcgtggaggaggctctaaagaaactgggcattcaggtgaaggtcattaatgccgcacacagcttctataacggcaccacaactctgcctatctccgacgaggaccgtacccccagaaagcggatctctaagactctgaatatgaccacttctcctgaggaaaagagaaagatcatcggagatacctttgtgaaaattgccaatgaagtgattggcgaaatgaatttaaagcctgaggaggtctttctggctcagggaacattgcggcctgacctgattgagagcgccagcttagtcgcctccggaaaagcagagctaattaagacacaccataacgatacagaactgatacgaaaactccgagaagagggtaaggttatcgagcccctcaaggactttcataaagatgaggttaggattctcggaagggagctgggcctcccagaagagttggtatcccggcatcccttccccggcccaggactcgctataagagttatttgtgctgaagaaccttacatatgcaaggacttccccgagaccaataatatcctaaagattgtcgcagattttagcgcctccgtgaagaagcctcatactttattacaacgcgttaaggcttgcactaccgaggaagatcaggaaaaacttatgcagatcactagcttgcattccctgaacgctttcctcctgccaataaaaactgtgggcgtgcagggagactgcagatcctacagctacgtatgcggaatctctagcaaagatgagcccgattgggagagcctcatctttctcgctcggctgataccacgtatgtgccacaatgtgaacagggtggtgtatattttcggtccccccgtgaaagaaccccctaccgatgttaccccgacttttctgaccacaggtgtgttatcgacactgcggcaggcagactttgaagcccacaatattctgcgtgaaagcggttacgccggtaagatctcccagatgcccgtgatattaaccccactgcacttcgaccgggatccattgcagaagcagccgagctgccaacgctctgtggtaatacggaccttcatcacttccgactttatgaccggtattccagctaccccgggaaatgaaattcctgtagaggtcgtacttaaaatggtgaccgaaatcaagaagatcccaggcatcagccgcataatgtatgacctcacctctaaacctcccggcactactgagtgggaatag

SEQ ID NO: 190024 - DNA, 1929 bp, synthetic construct
  misc_feature 1..1929: note = Description of Artificial Sequence: Synthetic coding sequence
  source 1..1929: mol_type = other DNA
atgctggaggagaccctgcggatggccaccaccaccatcaaggagcagggattccgtgccatcataatttctggaggcccaaatagcgtgtatgcggaggacgccccttggtttgaccctgctatcttcaccatagggaaaccagtgctgggcatctgctacggcatgcagatgatgaacaaggtgttcggtggtacagtacataagaagagcgttcgcgaggatggagttttcaacattagcgtggacaatacatgcagtctgtttaggggactacagaaagaggaagtggtcctgctgacacatggtgacagcgtcgacaaggtggctgacggtttcaaagttgtcgcccgtagtggaaacatcgtcgctggaatcgcaaatgaaagtaagaagctgtacggagcccagtttcacccggaagtgggacttactgagaacggaaaggtaatcctcaaaaattttctctacgacattgccgggtgctccggcacctttaccgtccagaatagagagttggagtgcatcagggagatcaaggaacgggttggcacctctaaggttctggtgctgcttagtggaggcgtggacagcaccgtgtgtacagccttacttaatcgggccctcaatcaggagcaagtcattgcagttcacatagacaatggctttatgagaaaaagggaatcgcagtctgtcgaggaagcactgaaaaaactgggaattcaggttaaagtcatcaatgctgcccatagcttctataacggaactaccactcttcccattagtgacgaggatagaacccctcggaagcggatctctaaaaccctcaatatgaccacttcaccggaggaaaaacgcaagatcatcggcgacacatttgtgaagattgcaaacgaagtcataggcgagatgaatctgaagccagaggaagtcttccttgcacagggtaccctccgacctgacctcatcgaatcagcctccctggttgcgtctggcaaagccgaactgattaaaactcatcacaacgacactgagctgatacgcaaactgcgggaggaaggcaaagttatcgagcctctgaaagattttcataaggatgaagttcggatactgggccgcgaactgggcctgccagaggaactagtatcaagacaccccttcccgggcccaggattggcaatacgtgtgatctgcgctgaggagccttacatctgcaaagacttcccagagacaaataatattctgaaaattgtggcagattttagcgctagtgtgaaaaagccgcacactctgctacagcgggtgaaggcatgcaccaccgaggaagatcaggagaaactgatgcagattacatccctgcactcgctcaacgccttcctactgcccataaaaactgtgggtgtgcagggtgattgtcgaagctactcctacgtgtgcggcatttcatctaaagatgagcccgactgggagagtctaatctttctggccagactgatccctagaatgtgtcataatgtaaaccgcgtcgtgtacatcttcgggccacccgtaaaggagccacctaccgacgttactcctactttcctcactacaggcgttctgagcacgctacggcaggctgactttgaagcccacaacatactcagggagagcggctacgccggcaagatcagtcaaatgcccgtaattctgacgcctcttcacttcgatcgggatcccttacaaaagcaaccatcttgccagcgctcagtggtgatccggacattcataacatccgactttatgaccggaatccctgccacccctggcaacgagatcccggtcgaggtggttctgaagatggtgactgaaattaagaaaattccaggtatctctagaatcatgtatgatctgacatctaagccaccagggaccactgagtgggagtag

SEQ ID NO: 190025 - DNA, 2082 bp, synthetic construct
  misc_feature 1..2082: note = Description of Artificial Sequence: Synthetic coding sequence
  source 1..2082: mol_type = other DNA
atggccctgtgcaacggcgacagcaagctggagaacgccggcggcgatctcaaggatggacaccatcattacgaaggcgccgtggtcatactagatgcgggggcccagtacggcaaggtgattgaccggcgggttagggagctgttcgtccaatccgagatttttcctctggagacaccagcgtttgcgatcaaggagcagggatttcgcgccatcataatctctggaggacccaatagtgtctacgctgaagatgccccatggttcgacccagctatctttaccatcgggaagcctgtgctaggtatctgttatggtatgcagatgatgaacaaggtgtttggcggcaccgttcataagaagtctgtacgcgaggacggtgtttttaacatcagcgtcgataacacctgcagcttatttaggggcttacagaaagaagaggtagtgttactgacacacggcgattccgttgacaaagttgcagacggctttaaggtggtggcccgttctggtaacattgtggccgggatcgccaatgagagtaaaaaattatacggcgcccaattccatcctgaagtaggtttgaccgagaatggcaaagtcattttgaagaactttttatatgacatcgcaggatgttcaggtaccttcaccgtgcagaatagagagctggagtgcattagggagattaaagaacgagtaggcacttccaaagtattggtgttgctctcaggcggagttgatagcactgtatgtactgccctgttgaatcgggcccttaaccaggaacaggtcatagcggtgcacatcgataacggtttcatgaggaagcgggaaagtcaaagtgtagaggaggccttaaaaaagctgggcatccaggtcaaggtcatcaacgcggcacactctttttataacgggaccacaacgttacctatatctgacgaggacagaactccaagaaagcgtatctccaaaaccctgaacatgactacctccccagaagagaaaaggaagatcatcggcgacaccttcgtgaagatcgccaacgaggtgattggtgagatgaacttaaaacccgaagaggtctttttggcccagggcaccttgagacccgacctcatcgaatccgcttctctggtcgcttccggaaaggcggagctgataaaaacgcaccacaatgatactgaactgatccggaagctgagagaggaaggaaaagtgattgagcccctgaaagatttccacaaggacgaggttcgcattttgggccgggagttaggactgcccgaagagctagtctcgagacacccctttcccggccctgggttggctatccgcgtgatatgtgccgaggaaccttatatctgcaaagacttcccagagaccaataacattctgaaaatcgtggctgacttttccgccagtgtgaaaaaacctcacactctcctccagagggttaaagcctgcacaaccgaggaggaccaggagaagctcatgcagattacctctctgcactccctcaacgccttcctattgcccataaagaccgtgggagttcagggggactgtagaagttattcttatgtctgtggcatatcttccaaggatgagcccgactgggaaagtctcatctttctggcaagactcatacccagaatgtgtcataatgttaaccgcgtggtctatatctttggcccccccgttaaggaaccgcctaccgacgttacacctactttcctgaccactggcgtactgagtactctgcgtcaggcagactttgaagcccataatattctgagagagtcaggatacgctggtaagatatctcaaatgccggttatcctgacgccactgcacttcgatcgagatccgttacagaaacaaccttcctgtcagagatccgtggtgattagaacattcataacaagtgatttcatgacaggcattccagctacccctggaaacgaaatccctgtcgaggtggtgttgaaaatggtgaccgagattaagaagataccaggtatcagtaggataatgtacgatttaacctctaaaccacccggtaccaccgagtgggaatag

SEQ ID NO: 190026 - DNA, 1146 bp, synthetic construct
  misc_feature 1..1146: note = Description of Artificial Sequence: Synthetic coding sequence
  source 1..1146: mol_type = other DNA
atgagcggcgtggtgcggaccctgagccggtgcctgctgcccgccgaggctgggggagcccgggagcgaagggcaggatccggagccagagacgccgagcgcgaagctcgacggcgcagtagagacattgatgcacttctggcccgtgaaaggagggctgtgcgcagacttgtgaagattctcctccttggagcgggcgagtccggcaaaagtaccttcctcaaacagatgcggataatccatggcagggagtttgaccagaaagctctcttggaattccgggacaccatctttgataatattctgaagggctcacgggtgttggtagacgcacgagacaaactgggtattccgtggcaatacagcgaaaacgagaagcacggcatgttccttatggccttcgagaacaaagctggcctgccggttgagccagccacttttcagctatacgtacctgccctttctgctctatggagggattccggtataagggaggccttttcaaggagaagtgaatttcagttaggtgagagtgtcaaatacttcttagacaatctggataggatagggcagctgaactacttccctagcaagcaggacatcctgctcgcccggaaagccacaaaagggatcgtagaacatgactttgtgataaagaaaatacctttcaagatggttgatgtaggtggacagagaagtcagaggcaaaaatggtttcagtgtttcgacggtatcacctccatcctgtttatggtgtcgagctccgagtacgaccaggtgcttatggaggaccggcgcacgaatagattggttgagtccatgaacatatttgaaaccatcgtgaacaacaaattattttttaacgtctccattatcctgttcttaaacaaaatggacctcttagtcgagaaggtgaagaccgtctcaataaagaaacacttcccagatttcaggggcgacccacatagactcgaagatgttcaaaggtatctggttcagtgctttgacagaaaaaggagaaatcgtagcaaaccgctgtttcaccacttcaccacggctattgacactgagaacgtgcgcttcgttttccacgctgtgaaggacaccatactgcaggagaacctgaaggacatcatgctccagtag

SEQ ID NO: 190027 - DNA, 702 bp, synthetic construct
  misc_feature 1..702: note = Description of Artificial Sequence: Synthetic coding sequence
  source 1..702: mol_type = other DNA
atgatctaccccctgatcgtgctgcccctgtgcgccagctggcactgggggctgattcgcaaaggcatcgtgcttttctggggcgagtctgtgaaatattttctggataatctagacaggatcggccaacttaattactttcccagtaagcaggatatattgctcgcgagaaaggctacaaagggaattgtagagcatgattttgtgataaagaaaataccctttaaaatggttgatgtcgggggtcaaaggtcccagaggcaaaaatggtttcagtgcttcgacggaatcactagtatcctctttatggtctccagctccgaatacgaccaagtcctgatggaggaccgtcgcaccaatagactggttgagtccatgaatattttcgagacaatcgtcaataataagctgttcttcaacgtgtccatcattctctttctgaacaagatggacctgctcgtggaaaaggtaaagaccgtcagtatcaagaagcacttccccgactttcggggggatccacacaggttagaagatgtgcagcggtatttggtccagtgcttcgaccgcaaacgtcggaacaggagtaaacctttgttccaccatttcaccactgccatcgatactgaaaatgttcgcttcgtgttccacgctgtcaaagatacaatcctgcaggagaatcttaaagacattatgcttcaatag

SEQ ID NO: 190028 - DNA, 867 bp, synthetic construct
  misc_feature 1..867: note = Description of Artificial Sequence: Synthetic coding sequence
  source 1..867: mol_type = other DNA
atgcggatcatccacggccgggagttcgaccagaaggccctgctggagttccgagataccatttttgataacatcctcaagggctcccgcgtgcttgtagatgcgcgagacaagctgggcatcccttggcaatacagcgagaatgaaaaacacggaatgtttctgatggcctttgagaacaaggcgggactccctgtggaacccgcaacatttcagttgtacgtgccagccctatcggcattgtggagagatagcggtatcagagaagcattttccaggaggagtgaattccagttgaattattttcctagtaaacaggacattctgctagctaggaaggctaccaaaggtattgtcgagcacgactttgtgatcaaaaagatcccatttaaaatggtggacgttgggggccaaaggtcccagaggcaaaagtggttccagtgctttgatggaatcacctccatcttattcatggtgagttctagtgagtacgaccaggtccttatggaggatcgccgcaccaacaggcttgtcgagtcgatgaacatctttgagaccatcgttaacaacaaactgttcttcaacgtcagcattattctgtttttgaataagatggatcttctggtggagaaggttaaaacagttagcattaaaaaacatttcccagattttcgcggcgacccgcacaggcttgaggatgttcagcgctatctggtccagtgttttgatcggaaaagacgtaaccgatccaagccactcttccatcactttacaacagccattgacactgagaatgtgcgcttcgtgtttcatgcagtaaaggatactatactgcaggagaaccttaaagatatcatgctccaatag

SEQ ID NO: 190029 - DNA, 1080 bp, synthetic construct
  misc_feature 1..1080: note = Description of Artificial Sequence: Synthetic coding sequence
  source 1..1080: mol_type = other DNA
atgaccctggagagcatgatggcctgctgcctgagcgacgaggtgaaggagagcaaacggatcaacgcagagatcgaaaaacagttaagacgggacaaaagagatgcccgtcgggaactgaagctgctcctcctggggactggtgaatctggtaagtctacttttattaagcagatgagaattatccatggagccggatacagcgaggaggataagaggggcttcacaaaactggtttatcagaacattttcacagctatgcaagcaatgattagggcaatggagaccttgaagatattatataaatatgagcagaataaagccaacgctctgcttatcagggaagtggacgtagaaaaagtgaccacattcgagcaccagtatgtatcggcaattaagaccctttgggaagaccccggtattcaagaatgttatgacaggaggcgagagtaccagttgtccgattctgcgaagtattacctaaccgatgtggacagaattgctactttagggtatctgccaacacaacaggacgtgctcagggtgagagtccccacgaccggcataattgaataccctttcgatttggagaacattatattcaggatggtcgacgtcggtggccaaagaagtgagcgtaggaagtggatccattgctttgaaaacgtcacgtctataatgttccttgtggctttatccgaatacgatcaagttttggtcgagagcgataatgaaaataggatggaagaaagtaaagcacttttcaggaccattattacctatccttggtttcagaactccagtgtaattctctttcttaataagaaagaccttttggaggataagatcctgtacagtcacctcgttgactactttcccgaattcgacggaccccaacgtgatgctcaggcagcaagggaatttatcctgaaaatgttcgttgatctgaatcccgattccgacaagataatctactcccacttcacatgtgccactgacacagagaatatccggtttgtattcgcggctgtgaaggacacgatcctgcagctcaatctgaaggaatataatctggtctag

SEQ ID NO: 190030 - DNA, 1059 bp, synthetic construct
  misc_feature 1..1059: note = Description of Artificial Sequence: Synthetic coding sequence
  source 1..1059: mol_type = other DNA
atggccgacttcctgcccagccggagcgtgctgagcgtgtgcttcccggggtgtctcctgacgtctggcgaagccgaacagcagaggaagtcaaaagaaattgataagtgtctgtcaagagaaaagacctacgtgaaacgactggtgaagattcttctcctgggcgcaggcgaatccgggaaatcgacgtactccaacgtcattaaagggatgagagtactcgtcgatgcaagggagaaactgcatatcccttggggggataacagtaatcagcagcatggggacaagatgatgtccttcgacacgagagctcctatggccgcgcagggaatggtggaaacacgggtatttttgcagtatctgcccgcgataagggccttatgggctgacagcggaattcaaaatgcgtatgatcgccgtcgcgaattccaattaggcgaatcagtgaaatattttttggacaatctggacaagctgggcgagcccgattatattccttcgcagcaggatatcctcttagcacgccgacctacgaaagggattcatgaatacgactttgaaattaaaaacgttcccttcaaaatggttgacgtgggcggacagcggagcgagcgaaagcgatggttcgaatgtttcgattcggtcacaagtatcttgtttctggtgtccagttccgagttcgatcaggttcttatggaagatagactgacaaataggctgacagaatccctaaacatctttgagactatagtcaacaatcgagttttcagcaatgtgagcatcatcctatttctcaacaaaactgacttgctggaggagaaggtacaaatagtatccataaaggattatttccttgagtttgagggtgaccctcactgcttgagggatgtccagaaattcctggttgaatgcttccggaataagaggcgagaccaacagcagaagcctctgtaccaccactttaccacagcaataaatactgagaatatacgactagtgtttcgggacgtgaaggataccatactgcatgataatctgaaacagttgatgctccagtag

SEQ ID NO: 190031 - DNA, 1134 bp, synthetic construct
  misc_feature 1..1134: note = Description of Artificial Sequence: Synthetic coding sequence
  source 1..1134: mol_type = other DNA
atggccgacttcctgcccagccggagcgtgctgagcgtgtgcttccccggttgcctgctgacctccggagaggctgaacaacaacggaaatcgaaagaaatcgataagtgtctttcacgagaaaagacctatgtgaaacgcctggtaaagatactgttgctcggggccggagagtctggtaaatctacgtttctcaaacagatgcgaatcattcacgggcaagactttgatcagagagctagggaggaattccgccccaccatttattccaatgtcattaagggcatgagagtgctggttgacgcgcgcgagaagttgcacatcccttggggggacaactctaaccagcagcacggtgacaaaatgatgtcttttgataccagagcaccgatggcggcccagggaatggtcgagacgcgtgtatttctccagtacttaccagccattcgggcactgtgggccgattccgggattcaaaacgcctacgaccgaaggcgggaattccagctaggggagagcgtgaaatactttctggacaacctcgataagctgggagagccggattacattccatcacaacaggatatactcttggcaaggagaccaacaaaaggtatacatgagtacgactttgaaatcaagaatgtgccattcaaaatggtagatgttggcgggcagagaagcgaacggaagcggtggttcgaatgttttgattctgttacctccatactattcctcgtctccagttccgaattcgaccaggtgctgatggaggatcgcctgactaatcggctcacagaatctctgaacatcttcgagactatagtaaacaatagagtgtttagcaatgtaagtattatcttgtttctgaacaagaccgacctgctcgaagagaaagtccagattgtcagtatcaaagattatttcctggagttcgagggcgacccacactgtctgcgtgacgtccaaaaatttctggtcgagtgtttcaggaataagcggagggaccagcagcagaagcccctgtaccaccatttcactactgcgataaacacagaaaatatccgacttgtgtttagggatgtcaaagacacaatccttcacgacaatttgaagcagctgatgctccaatag

SEQ ID NO: 190032 - DNA, 849 bp, synthetic construct
  misc_feature 1..849: note = Description of Artificial Sequence: Synthetic coding sequence
  source 1..849: mol_type = other DNA
atgcgggtgctggtggacgcccgggagaagctgcacatcccctggggagataatagcaaccagcagcatggggacaaaatgatgtccttcgatactcgagcaccaatggctgctcaggggatggtagagacgcgagtgttcttgcagtatctacctgccattagagcactttgggcagattccggaattcagaatgcctacgatcgtaggcgcgaattccagctgggagaatcagtcaagtacttccttgataacctcgataagttaggtgagcctgattatattcccagccagcaggatatcctgttagccaggcggcccactaagggcatccacgaatacgactttgaaatcaaaaatgtgccatttaagatggtagacgttggtggccagagatcggagcgtaagagatggtttgagtgcttcgattccgtgaccagcatactgttcctggtgagttcgtccgagtttgaccaggtgctgatggaagatagattgacgaaccgactcaccgagtcactgaacatcttcgaaacaatagtgaacaacagagtgttctccaatgttagtatcatcctgtttttgaacaagacggacctcctcgaggagaaagtacagatcgttagcataaaggattacttcttagagtttgaaggcgatccacactgcctacgcgacgttcagaagtttctggtcgaatgtttccgcaataaacggcgggatcagcagcagaaacccctgtatcatcacttcacaacggcaattaacacggagaacatacgcctagtgttccgagacgtcaaagacactatcttgcacgacaacctgaagcagcttatgctgcagtag

SEQ ID NO: 190033 - DNA, 1068 bp, synthetic construct
  misc_feature 1..1068: note = Description of Artificial Sequence: Synthetic coding sequence
  source 1..1068: mol_type = other DNA
atggccggctgctgctgcctgagcgccgaggagaaggagagccagcgcatctctgccgagatcgaacggcaactcagacgggacaagaaggatgcccgaagagaactgaaactgcttcttcttgggaccggggaaagtggaaagtcaacatttatcaagcaaatgcgtatcatccacggctccggctatagtgacgaagataggaaaggtttcacgaaactggtctaccagaatatatttacagcgatgcaggcgatgatcagagccatggacaccttacgcatacagtatgtttgcgagcagaacaaggaaaacgcccagatcattagagaggtagaggtggacaaagtgagtatgctatcacgggaacaggtggaggcgattaaacagctgtggcaggacccgggtatccaggaatgctatgatcggaggcgagagtatcagctttcagattctgccaagtactatctgacggatattgacaggatagctacacccagtttcgtacccacacagcaagacgtgctacgcgtgagagttcctactactggcatcatcgagtacccatttgaccttgaaaatattatcttccgaatggtggatgtaggcggacagaggtctgagcggcgaaagtggattcactgtttcgagagcgttacgagcatcattttcctggtcgccctgagtgaatatgatcaggtactggccgaatgcgataacgagaaccgaatggaagaatccaaggcactcttcaagaccataatcacctacccttggttcttgaatagttcggtcatcttatttcttaataagaaagatctgctggaagaaaagattatgtactcccatctcatttcgtactttccagagtatacgggtccaaagcaggatgtacgggcagcacgtgacttcatcctgaagctctatcaagatcaaaaccctgacaaggaaaaagtgatttactcccattttacatgcgctacggacaccgacaacatccgtttcgtgttcgctgctgtcaaggatactatccttcagcttaacctgcgcgaatttaatttggtctag

SEQ ID NO: 190034 - DNA, 1125 bp, synthetic construct
  misc_feature 1..1125: note = Description of Artificial Sequence: Synthetic coding sequence
  source 1..1125: mol_type = other DNA
atggcccggagcctgacctggcggtgctgcccctggtgcctgaccgaagacgaaaaagccgcagcaagagtggatcaggaaattaaccgcattctgctcgaacagaagaagcaggatcgtggcgaactgaaactcctcctcttgggaccaggagagtcgggaaagtccacattcataaaacaaatgcgcattattcacggagcgggatattctgaggaggaaaggaaggggtttcgaccactggtgtaccaaaacatcttcgtgtctatgagggccatgatcgaggctatggaaaggttgcagatccctttcagcaggcctgagagcaagcaccatgcgtccctggtgatgagtcaggatccttataaggtgaccacttttgagaagcgatatgccgctgctatgcagtggctttggcgcgacgccgggattcgagcatattatgaaagaaggagagagttccatttgctcgacagcgctgtgtactacttatctcatcttgagcgcataactgaagaaggctatgtgccgactgctcaggatgtgctgaggtcccgtatgccaacaaccggaattaatgagtattgcttttctgtccagaaaaccaacctgcgaatagtagatgttggcggccaaaagagcgaacggaagaagtggatccactgttttgagaatgtgattgcactgatatacctcgcaagcttgtccgagtatgaccagtgcttggaagaaaacaaccaggagaacagaatgaaggaaagtttggccctgtttggtactattctcgaactcccctggtttaaaagcacctcagtgatactatttctgaataagacggacatcctcgaggaaaagatccctacctctcatctggcaacttattttcctagttttcaaggtcccaaacaggacgctgaggcggcaaagcgtttcatcctggacatgtacacccggatgtataccgggtgtgtagacggacccgaaggaagcaaaaagggggctcgcagccggagattgttttcccactacacctgtgcaaccgacacacaaaatatcagaaaagttttcaaggatgtacgggattcagttcttgcccggtatctggacgaaattaacttgctgtag

SEQ ID NO: 190035 - DNA, 1065 bp, synthetic construct
  misc_feature 1..1065: note = Description of Artificial Sequence: Synthetic coding sequence
  source 1..1065: mol_type = other DNA
atgggctgcaccctgagcgccgaggagcgggccgccctggagcggtctaaagccatcgagaaaaacctcaaagaagacggcatttccgctgcaaaagacgttaagctcctcctcttgggcgcaggtgaaagcggtaaaagcacaatcgtgaaacagatgaaaatcatccatgaagacggcttctcaggtgaagatgtcaagcagtataagcccgtggtctattcaaacacgatacaatctctggcagctatagtgagagcgatggatacactaggcatcgaatacggagacaaggagagaaaggctgatgcaaagatggtgtgtgacgtggtaagtcgcatggaagatactgaacccttctcagctgaactcctgtccgccatgatgagactgtggggggactccggcattcaggagtgcttcaacagatcacgcgaataccagcttaatgactccgccaagtactacctggactcacttgaccgtatcggagcagcggattaccagcccaccgagcaggatatcctgcgtacaagagtaaagaccaccggaattgtggagacccacttcactttcaagaatttgcattttaggttgtttgatgttggtggacaaaggtccgaacgcaaaaaatggattcactgttttgaagacgtcactgccatcatcttctgtgtcgctttatcagggtatgaccaggtcctccacgaagatgaaactacaaacaggatgcatgagtcactgatgttatttgattctatttgcaacaataaattcttcattgacacaagtattatcttatttctgaacaagaaggatctgttcggagaaaagatcaagaaaagcccgcttacaatctgctttccagaatataccggacccaatacctacgaggatgccgccgcctacattcaggcacagttcgagagcaaaaaccgcagtccaaacaaagaaatttactgccacatgacctgcgccaccgacaccaataacatacaggtggttttcgatgcagtgaccgacataatcattgcaaacaacctgcgtggttgcggactctactag

SEQ ID NO: 190036 - DNA, 1065 bp, synthetic construct
  misc_feature 1..1065: note = Description of Artificial Sequence: Synthetic coding sequence
  source 1..1065: mol_type = other DNA
atgggctgcaccctgagcgccgaggagcgggccgccctggagcggagcaaggctattgaaaagaatctgaaggaggatgggattagcgccgctaaagacgtcaagctgcttctgctgggggcaggggagtccggcaagtccacgatcgtcaaacagatgaagatcattcacgaagacggattttccggtgaggatgtaaagcagtacaaacctgtggtttactccaacaccattcagtcactcgctgctatcgtccgcgcaatggataccctgggcatcgaatatggggacaaagagaggaaagccgatgcaaaaatggtgtgtgatgttgtgtcaagaatggaggataccgaacccttctcggccgagttgctgtccgcaatgatgagactgtggggcgattccgggattcaggagtgcttcaaccgcagcagagagtaccaactgaatgacagcgccaagtactacctggatagtctggacaggataggcgccgccgactatcaacctaccgaacaggatatcctgcggaccagagtgaagactacagggatagtggaaacccacttcacctttaagaatctgcattttcggcttttcgacgtggggggacagagaagtgagcgaaaaaagtggatacattgcttcgaggatgtgactgctatcatattttgcgtagcactgagtgggtacgaccaagtgctacacgaggacgagaccacgaaccgcatgcacgaatctctcaaactttttgactccatatgtaataataagtggtttaccgacactagcatcatactttttctaaacaagaaggacatcttcgaggaaaaaattaagaagagccccctgacaatatgcttcccggagtacacgggaccttcagccttcacagaagcggtggcttatattcaagcacagtacgagtccaagaataaaagtgcacataaggagatctatacccacgtcacatgcgccaccgatacaaacaatatccagtttgttttcgatgcggtgacagatgtgatcattgctaagaatctcagagggtgtgggctgtattag

SEQ ID NO: 190037 - DNA, 1146 bp, synthetic construct
  misc_feature 1..1146: note = Description of Artificial Sequence: Synthetic coding sequence
  source 1..1146: mol_type = other DNA
atgggctgcctgggcggcaacagcaagaccaccgaggaccagggcgttgatgaaaaggaacgtagagaggcgaataaaaagatcgaaaaacagcttcaaaaggagcggctggcgtataaggccactcaccgattgctcttgctgggcgccggggaatcgggtaaatcgacgatcgtgaagcaaatgcgaattctgcacgttaacggcttcaatccggaggagaagaaacagaagatcctggacatacgcaagaacgtgaaggacgctattgtaactatcgtttccgccatgtcaactatcatccccccagtgccgctagcaaaccctgagaaccagtttcggagtgactacatcaagagtatcgcgccaattactgatttcgagtactcccaggagtttttcgatcacgttaagaagctatgggatgacgagggggttaaagcttgtttcgagaggagtaatgagtatcaactgatcgattgtgctcagtacttccttgagcggatcgactcggtaagcctggttgattatacaccaacagatcaggatctgcttaggtgtcgggtcttgacctcaggcatcttcgaaacccgcttccaggtagataaagtgaacttccacatgttcgatgtcggtggacagcgagacgagcgccgcaagtggattcagtgcttcaacgacgtaacagctattatttatgtcgccgcctgttccagctataatatggttattcgagaggacaataacacaaatagactaagagagagcctggatctgtttgaatctatctggaataaccgctggctgagaaccatctcaatcatcctattcctcaacaagcaggacatgctggccgagaaggtcctcgccggcaaaagcaagattgaagactattttcccgagtacgcaaattacacggttcccgaggacgctacaccagatgcaggagaggatccaaaggtgaccagggcaaaatttttcatccgagatcttttcctgcgtattagtacggctacaggagacggtaagcattactgttatccccactttacgtgtgcagtggataccgagaacattaggagggtcttcaacgactgtcgagatattatccagaggatgcatctcaaacaatacgagcttctttag

SEQ ID NO: 190038 - DNA, 1377 bp, synthetic construct
  misc_feature 1..1377: note = Description of Artificial Sequence: Synthetic coding sequence
  source 1..1377: mol_type = other DNA
atgggcctgtgctacagcctgcggcccctgctgttcggcggccccggtgatgacccctgcgctgctagcgagccccccgtggaggacgcacagcccgccccggcccctgccctggcgccagtgagggcggccgcccgtgatacagccaggactctcctgccgagggggggagaagggtctccagcgtgtgcacggcccaaggctgataaacctaaggagaagaggcaacgaacggaacagctctccgcagaggagcgtgaggccgcaaaggagcgagaagccgttaaggaggcaaggaaagttagccgcggaatcgacagaatgttgcgggatcagaagagagatctccagcagacacatcgactgctgctactgggtgcaggggaaagcggcaagagtaccattgtgaaacagatgcggattcttcatgtgaatggcttcaatcctgaggaaaagaagcagaagattctggatattagaaagaacgtaaaagatgccatagttacgatcgtgtctgctatgtctaccatcatccctccggtccccctcgcgaatccagagaaccagtttaggagtgactatatcaagtccattgctcctattaccgacttcgagtactctcaggaattttttgaccatgtgaagaaactgtgggacgatgagggcgtgaaagcgtgtttcgagcggtctaatgaatatcagcttattgattgtgcccagtatttcctggagcggattgacagcgtatctctcgtggattacacacccaccgatcaggatctattgcggtgtagagtgctgaccagcgggattttcgagacacgcttccaggtggataaggtgaattttcacatgttcgatgtgggagggcagagagacgaacggcgcaagtggattcagtgcttcaacgatgttaccgctattatttacgtggctgcatgttcgagttacaatatggtgatccgtgaggataacaacaccaaccgcctccgtgagtctttggacctgtttgagtccatttggaacaatagatggctgcgaacaatatccataatcctgttcttgaataaacaagacatgcttgccgaaaaagtgctcgcagggaagagtaaaattgaggactacttcccggagtatgctaactataccgtgcctgaagatgccacacctgacgctggcgaggatccaaaagtcacacgagccaagtttttcatccgggatctcttccttaggatttccacagcaactggtgacggaaaacactactgctacccacactttacttgtgccgttgacacggagaacatacgacgagtgttcaatgactgcagagacatcattcagcgcatgcacctgaagcagtacgagctgctgtag

SEQ ID NO: 190039 - DNA, 1146 bp, synthetic construct
  misc_feature 1..1146: note = Description of Artificial Sequence: Synthetic coding sequence
  source 1..1146: mol_type = other DNA
atgggctgcctgggcggcaacagcaagaccaccgaggaccagggcgtggacgaaaaagagaggagagaggcaaacaagaagatcgaaaagcagctgcagaaagaaagactggcgtataaagcgacccaccggctcctgcttctcggtgccggcgagtcagggaaatcaacaatcgtcaagcaaatgcgcattttgcacgtgaatggtttcaatcccgaagaaaagaagcagaagatcctggacatccgcaagaatgtcaaggatgctatcgttaccatcgtgagcgccatgagtacaatcatcccccccgttccactggccaaccccgaaaatcagtttagatccgactacattaagtccatcgcgccaatcaccgatttcgagtatagccaggaatttttcgatcatgtgaagaaactgtgggatgacgaaggcgtaaaagcttgtttcgagcggtccaatgaatatcagcttatcgactgcgctcagtacttcctggagaggattgattccgtcagcctggtggactatactccgaccgatcaggacttgctgaggtgcagagtactgaccagcgggattttcgagaccaggtttcaggtggataaagtgaactttcatatgtttgatgtggggggacagagagatgagaggcgtaagtggatccagtgtttcaacgatgtgaccgcaatcatttacgtggcggcctgctcctcgtataacatggttattcgcgaggacaacaacaccaaccgactgcgggagtccttagacttgtttgagtcaatttggaataataggtggctgagaaccatctctataattctcttcctgaacaaacaggatatgttggcagagaaggtgttggccggcaagtcaaagatcgaggattatttccctgagtatgctaactacaccgttccagaagatgctacacccgacgccggggaagaccccaaggtgacaagagccaaatttttcattcgagacctgttcctcaggatatccacagctacaggcgacggcaagcactactgttatccgcactttacctgtgccgtggatacagagaacattaggcgagtattcaatgattgcagggatataatccagaggatgcacctcaagcagtatgaactcctgtag

SEQ ID NO: 190040 - DNA, 1146 bp, synthetic construct
  misc_feature 1..1146: note = Description of Artificial Sequence: Synthetic coding sequence
  source 1..1146: mol_type = other DNA
atgggctgcctgggcggcaacagcaagaccaccgaggaccagggcgtggatgagaaagagagaagggaagcaaacaaaaagattgagaagcagctccagaaagagaggcttgcttataaggctacacatcgcctgctcctgttgggagccggggagagtggcaaaagcactattgtgaagcagatgcgcatcctgcacgttaacgggtttaaccccgaggagaagaagcagaaaatcctcgacattcgcaaaaacgtcaaagacgccattgtgaccatcgtgtcagccatgagcactatcatcccgccagtccccctggccaatcccgaaaaccaatttcgctccgattatatcaaaagtatcgcccccattaccgacttcgagtacagtcaggaattctttgatcacgtcaaaaaactgtgggacgacgagggggtgaaggcttgctttgaacggtcaaacgagtaccagcttatcgattgcgctcaatattttctagagcgcattgattctgtgtctcttgtagattacactcccaccgaccaggatttgctcaggtgtcgagtattgacatcaggaatctttgagactcgatttcaggttgataaggtcaacttccatatgttcgatgtggggggacaacgcgatgagcgtcgcaaatggatccagtgctttaatgacgtgactgccatcatctatgtcgccgcctgtagttcatataacatggtgatacgggaggataacaatacaaaccgtctacgcgaaagcctagaccttttcgaatcaatctggaacaataggtggctaaggaccatatccataatcctgtttctgaacaagcaggatatgctcgccgagaaagttttagctgggaaaagtaagattgaagactactttcctgagtacgccaactacactgtgcccgaagacgctacccctgacgccggggaggaccctaaggtgactcgagccaagttcttcattagggaccttttcctgcgtatcagcacagctacaggggatgggaagcactactgctatcctcactttacttgtgccgtggacacagagaacatcaggagggtttttaatgattgcagggatattattcaacggatgcacctgaagcagtacgagctcctctag

SEQ ID NO: 190041 - DNA, 525 bp, synthetic construct
  misc_feature 1..525: note = Description of Artificial Sequence: Synthetic coding sequence
  source 1..525: mol_type = other DNA
atgttcgacgtgggcggccagcgggacgagcggcggaagtggatccagtgcttcaacgacgtgactgcaattatatacgtcgccgcctgttcaagctacaacatggtcatacgcgaggataacaatacgaaccgtcttcgtgagtctctcgacctatttgagtcaatatggaacaatcgttggctgcgtacaatttctattatcctgttcctgaacaaacaggacatgcttgccgaaaaggtcctagcaggcaaatcgaagattgaggactattttcccgagtacgccaactataccgtgcctgaggatgctacacctgatgctggtgaggacccgaaggtcaccagggcaaagttctttatcagggatctattcctgcgtatctccacagccaccggcgacggaaaacactactgttatcctcattttacttgcgctgttgacacagaaaatattaggagagtgttcaacgattgcagggacattattcagcgcatgcacctgaaacaatacgaactgctgtag

SEQ ID NO: 190042 - DNA, 963 bp, synthetic construct
  misc_feature 1..963: note = Description of Artificial Sequence: Synthetic coding sequence
  source 1..963: mol_type = other DNA
atgcggatcctgcacgtgaacggcttcaaccccgaggagaagaagcagaagatcctcgatataaggaagaacgtgaaagatgctatcgtaacgatcgtttctgctatgtccactatcattcctccagtccctctggccaatcctgaaaatcaatttaggagcgattacataaagtcaattgcacctattaccgatttcgaatattcacaagagttcttcgaccatgtgaagaaactttgggatgacgagggtgtgaaagcatgctttgagcgatccaacgagtaccagctcatcgactgcgcacaatacttcttggaacgtatcgactctgtgagcttggtcgactataccccaaccgaccaggacctcctgcggtgccgagtgctgacatcgggaattttcgaaaccaggtttcaagtcgacaaggtcaatttccatatgttcgatgtcggcggacagagagatgaacgccgaaaatggatccagtgcttcaacgatgtgaccgctattatttatgttgctgcatgtagctcctacaatatggtcatcagggaggataataataccaaccggcttagggaatcacttgatctgttcgagtccatatggaataaccgttggctgcgaactatatcaataatcttgttccttaacaaacaggacatgctggccgaaaaagtcctggcaggaaagtcaaaaatcgaggactattttccagagtacgcgaactacacagtccccgaggacgccacgcccgacgctggcgaggacccgaaggtcacacgggcaaaattttttatccgagacttgttcctgagaatatctacagcgactggagacggaaagcattattgctatccccacttcacctgtgccgtcgacacggagaacataaggcgtgtcttcaacgattgtcgggacatcatacagcgtatgcacttgaagcagtacgagctgctctag

SEQ ID NO: 190043 - DNA, 1065 bp, synthetic construct
  misc_feature 1..1065: note = Description of Artificial Sequence: Synthetic coding sequence
  source 1..1065: mol_type = other DNA
atgggctgcaccctgagcgccgaggacaaggccgccgtggagcggtctaagatgatcgacaggaacctgagggaggatggtgaaaaggccgctcgagaggttaagctcctactgctcggagccggagaaagtggtaagagtactatcgtaaaacagatgaagattatacacgaggctggttatagcgaggaggagtgtaaacagtacaaagcagtggtgtacagcaatacgatccagtccatcatagcaattattagagctatgggccgtctaaagattgattttggtgattctgctagggccgacgacgctcggcagctattcgttttggccggcgccgccgaagaggggtttatgaccgctgaactggcgggcgttataaagagattgtggaaagatagcggcgttcaggcctgtttcaaccgtagtcgagaatatcaattgaatgattccgccgcctattatttaaacgatctggatcgaatcgcccagcctaactacatccctactcaacaggatgtccttaggactcgcgttaagactactggaatcgttgagacacacttcaccttcaaagatctacacttcaaaatgtttgatgtggggggccagagaagtgaaagaaaaaagtggatacattgctttgaaggcgtcaccgccatcatcttttgtgtcgcgctcagcgattacgatcttgtccttgctgaggatgaggagatgaaccgaatgcatgaatctatgaaactctttgattctatctgcaacaacaagtggttcactgacacgtcgattattttgtttcttaacaagaaggacctcttcgaagaaaagattaaaaaaagtcccctcacaatttgctaccctgagtacgcagggtctaacacgtacgaggaagccgcggcgtacattcagtgccagttcgaagacttaaacaagcggaaggacacaaaggaaatctacactcacttcacatgtgcaactgatacaaagaatgttcagttcgtctttgatgctgtaaccgatgtgatcattaagaataacctgaaagattgtggtttgttctag

SEQ ID NO: 190044 - DNA, 72 bp, synthetic construct
  misc_feature 1..72: note = Description of Artificial Sequence: Synthetic coding sequence
  source 1..72: mol_type = other DNA
atgggctgcaccctgagcgccgaggacaaggccgccgtggagcggtccaaaatgatagataggaatctctag

SEQ ID NO: 190045 - DNA, 909 bp, synthetic construct
  misc_feature 1..909: note = Description of Artificial Sequence: Synthetic coding sequence
  source 1..909: mol_type = other DNA
atgaagatcatccacgaggccggctacagcgaggaggagtgcaagcaatacaaagccgtggtctatagtaacacaatccagtcaatcatcgcaataataagagcaatggggcggctcaaaatcgacttcggcgacagcgcccgggccgatgatgcgcggcaactgtttgtgctggctggagctgccgaggaggggttcatgacggccgaactcgcaggagtcattaagcgtttatggaaagactccggtgtacaggcctgcttcaatagatcccgggagtatcagttgaacgactctgccgcttattacctaaatgatctggaccgcatcgcacagccaaactacattccaacccaacaggatgtactcagaacccgcgttaagacgacaggaatcgtcgaaacgcatttcacttttaaggaccttcacttcaagatgttcgatgtgggaggacagaggagtgagaggaaaaagtggatccattgttttgaaggggttacagctatcatattctgcgtggcactgtccgattacgacctggtcctggcagaggatgaagagatgaaccggatgcatgagagcatgaagctgttcgattcaatctgtaacaacaagtggtttactgacacgtccattatattatttttgaataaaaaagacctgtttgaagaaaagattaagaaatcccccctgacaatttgctaccccgaatacgcggggtcaaacacctatgaggaggctgccgcctatatccagtgccagttcgaagacttaaacaaacggaaagacactaaagaaatttacacccacttcacatgtgccaccgataccaaaaacgtccagttcgtgttcgacgccgtcaccgacgtcatcattaagaataacttgaaggactgtggcctgttctag

SEQ ID NO: 190046 - DNA, 1020 bp, synthetic construct
  misc_feature 1..1020: note = Description of Artificial Sequence: Synthetic coding sequence
  source 1..1020: mol_type = other DNA
atggagtacgccggccacctgcccgccagcagcgcccagggcaccattcttgcttgtactagctgtaccggggccggcgagtccggcaaatccacaatagtcaaacaaatgaaaatcattcacgaggacggctatagcgaggaggagtgcagacagtatcgggcagtggtttattccaatacgatccagagtataatggctatcgttaaggccatgggtaatctacagatcgatttcgcagacccttctagagccgacgacgcacggcagctctttgcactatcatgtaccgcggaagagcagggagtgctgcctgatgatctatcaggtgttatccggcgactttgggctgatcacggcgtccaagcatgcttcggtcggagccgtgaatatcaacttaatgatagtgccgcttactacctgaacgatcttgaaaggatcgcccagtccgactatatccccacgcagcaagatgtgttgcggacaagggtcaaaaccactggcattgtggagacacacttcacgtttaaagacctacatttcaagatgttcgatgttggaggccaacgttccgagaggaaaaaatggatccactgcttcgagggggtgacggccattattttctgcgtcgcgctctcagcctacgatctcgttctcgccgaggatgaggagatgaacagaatgcacgaatcaatgaagctcttcgatagtatctgtaataataaatggtttactgacacgagcatcattctttttcttaataaaaaggacctcttcgaggagaaaattacacacagcccattaacaatatgtttcccagaatacacaggcgccaataaatacgacgaggctgccagttatattcaaagtaagttcgaagaccttaataagaggaaggataccaaggagatttacacacatttcacttgtgcaacagacaccaagaacgtgcagttcgtttttgatgccgtgactgatgtgatcatcaaaaacaacctaaaggattgtgggctgttttag

SEQ ID NO: 190047 - DNA, 1068 bp, synthetic construct
  misc_feature 1..1068: note = Description of Artificial Sequence: Synthetic coding sequence
  source 1..1068: mol_type = other DNA
atgggctgcaccgtgagcgccgaggacaaggccgccgccgagcggtctaaaatgatcgacaaaaatctacgcgaggatggagagaaggctgcgcgggaggtgaagcttctgcttctgggcgccggcgaatccggtaagtctaccattgtgaagcagatgaaaatcatacacgaggacggctattctgaggaggagtgtcgacagtatcgggctgtagtgtactccaatactattcagtcaataatggcgattgtgaaagccatgggaaatttacagatagattttgcggatccttctagggccgacgatgctagacagctgttcgccttaagctgcaccgctgaggaacaaggggtgctgccggacgatcttagtggagtgattaggagactttgggcggaccatggggtgcaagcctgttttggcaggtcacgagaatatcagctcaacgattctgccgcatactatttgaacgatctagaacggatcgcccaatctgattacatcccaactcagcaggacgtgctcagaacccgcgtgaagactaccggtatcgtagagacccatttcacgtttaaggaccttcatttcaaaatgtttgatgtcggcggacagcgtagcgaaaggaagaaatggatccactgctttgagggagtaactgctattatcttttgtgtcgccctcagcgcctatgacttggttctcgctgaggacgaagagatgaacaggatgcacgagtccatgaagctgttcgattccatctgcaataataagtggttcactgacacgtccatcatactatttttgaataagaaggacctctttgaagagaagatcactcattcacccctaacaatctgtttccctgaatataccggggccaataaatacgacgaggctgcctcctatatccaaagtaagtttgaagacctcaacaagaggaaggacaccaaggaaatatacacacacttcacctgtgcgactgacaccaagaacgtgcaatttgtattcgacgccgttaccgacgttattatcaagaataatctcaaagattgcgggttgttttag

SEQ ID NO: 190048 - DNA, 1020 bp, synthetic construct
  misc_feature 1..1020: note = Description of Artificial Sequence: Synthetic coding sequence
  source 1..1020: mol_type = other DNA
atgaccgagggcgtgaagaccctgggctggaccaagcagaagggcggctgtcattggggcagatctgagggcgcaggagaatccggaaaaagtaccattgtaaaacagatgaaaatcatacacgaagacggatactcggaggaggagtgtcggcaatatagagccgtggtatattccaacaccatccagagcatcatggccatcgtgaaagccatgggcaacctgcagatagactttgccgatccatcccgagccgacgacgcgaggcaactgttcgctctctcctgtacagcagaggaacaaggagtcctgcctgacgatctgagtggcgtgatacgacgcctgtgggccgatcacggggtgcaggcatgtttcggaagatctagagagtatcagttgaatgattctgccgcgtactacttaaacgatctggagaggatcgctcagtcagattacatccccactcagcaggacgtcctaaggacacgcgtcaaaaccaccggaatcgtcgagacacacttcacatttaaggaccttcactttaagatgttcgacgtgggcggacaacgatcagagaggaaaaaatggattcactgctttgaaggcgtgaccgccattatcttctgcgtggctctcagcgcgtatgaccttgtcctggcagaagacgaggaaatgaaccgtatgcatgaatccatgaagctgttcgactccatctgtaacaacaagtggtttaccgacacgtctatcatattgtttttaaataaaaaagacctgttcgaggagaagattacacactcacccctgactatttgtttccccgaatatacgggggccaataagtatgacgaggcagcctcctacattcagtccaagttcgaggatctcaataagaggaaggacaccaaggagatatacacacattttacttgtgcgaccgacacaaaaaatgttcaatttgtgttcgacgcggtgactgacgtgatcatcaagaacaacctgaaggattgcgggctgttctag

SEQ ID NO: 190049 - DNA, 912 bp, synthetic construct
  misc_feature 1..912: note = Description of Artificial Sequence: Synthetic coding sequence
  source 1..912: mol_type = other DNA
atgaagatcatccacgaggacggctacagcgaggaggagtgccggcagtaccgcgccgttgtctatagcaataccatacagtctatcatggccatagtcaaggctatgggaaacttacagatagacttcgctgacccctctagagccgatgatgctcgccaattgtttgcgctgtcctgtactgcagaggagcagggtgttctgccagatgacctctctggtgtgattcggcgactgtgggcagaccacggcgtccaagcctgcttcgggaggagcagggagtaccaactgaacgattctgccgcatattacctgaacgacctcgaacgcatcgcccaaagcgattatataccaactcaacaagatgtgctcagaacaagggtgaagacaactggcatcgtggagactcactttacatttaaagacttgcacttcaagatgtttgacgtgggcgggcaacgctccgagaggaagaagtggatacactgttttgaaggagtgacagccattatcttttgcgtagcactgtccgcttatgatctggtgcttgcagaggatgaagagatgaataggatgcacgagagcatgaagctgttcgattctatctgcaacaacaagtggtttaccgatactagtatcatcctctttctgaacaaaaaagatctttttgaggagaagatcacacattctcctcttacaatctgtttcccagaatacacaggtgccaataagtatgacgaagcagctagttatattcagtccaaatttgaagacttaaataagaggaaagataccaaagagatttacacgcactttacctgtgcgactgacaccaagaatgtacagttcgtgttcgatgcagtcacagacgtgattattaagaataacctgaaggattgcggacttttttag

SEQ ID NO: 190050 - DNA, 957 bp, synthetic construct
  misc_feature 1..957: note = Description of Artificial Sequence: Synthetic coding sequence
  source 1..957: mol_type = other DNA
atgcggggcgccggcgagagcggcaagagcaccatcgtgaagcagatgaaaataattcacgaggatggatactccgaggaagaatgtcgtcagtacagagcggtggtgtacagcaacacgatccagagcatcatggctattgtgaaagcaatgggcaatctccagatcgatttcgccgatccaagtcgagccgacgacgctaggcaactgttcgctttgtcttgtactgctgaagagcagggggtcttgcctgacgatttaagtggggtgattagaagactgtgggccgaccatggggtgcaagcttgtttcggacggagtcgtgaatatcaattaaacgacagtgccgcttactacctgaacgatctggagcggattgctcagagcgattacatcccaacccagcaggacgtgctgaggacaagagtcaagactactggtatcgtggagacacacttcacttttaaagatctgcatttcaaaatgttcgacgttggcggccagaggagtgagcggaagaaatggatccattgttttgagggagtcacagcaatcatcttctgcgtcgcactgagcgcctatgatcttgtgctggccgaggatgaagaaatgaatcgcatgcatgaatctatgaagctctttgactctatctgtaataacaagtggttcactgatacaagtattatcttattccttaacaaaaaagatttgtttgaagagaaaattacacacagccccctgacaatttgctttccagaatacacaggggccaataagtacgacgaggctgcgagctacatacaaagtaagtttgaggacctaaacaagaggaaggataccaaagaaatctacacgcacttcacgtgtgcgactgacaccaagaatgtgcagttcgtgttcgatgctgttacggatgtgatcattaagaataatttgaaggactgcggcctgttctag

SEQ ID NO: 190051 - DNA, 825 bp, synthetic construct
  misc_feature 1..825: note = Description of Artificial Sequence: Synthetic coding sequence
  source 1..825: mol_type = other DNA
atggccatcgtgaaggccatgggcaacctgcagatcgacttcgccgacccgtccagggccgatgatgctcgccagctgtttgccctcagttgcacagccgaagaacagggcgtgttgcctgatgacctgagtggcgtaattcgtcggctctgggccgaccacggagttcaggcctgttttggcagaagccgcgaatatcaactgaacgattctgccgcttactacctaaacgacctcgagaggatcgcccagtcagactacattccaacacagcaagatgtgctgaggacccgagtgaaaaccactggcattgtggagacccattttacttttaaagacctgcacttcaaaatgttcgacgttgggggccagcggtccgagcgcaagaaatggattcattgcttcgagggcgttacagccattatcttttgcgtggcactctctgcctacgatttagtgctggcggaagatgaggagatgaataggatgcacgagagtatgaagctattcgattctatttgtaataataaatggttcaccgatacaagtatcattttatttttgaacaaaaaggacctgttcgaagagaagatcactcactccccattaactatttgctttccggagtatactggagccaacaagtacgacgaagccgccagttatatacagagtaagtttgaggatctcaacaaacggaaagacactaaagaaatttatactcacttcacgtgtgccacagacaccaaaaatgttcagttcgtgtttgacgccgtaacagacgtgattattaagaacaatctgaaagactgcggactgttttag

SEQ ID NO: 190052 - DNA, 1086 bp, synthetic construct
  misc_feature 1..1086: note = Description of Artificial Sequence: Synthetic coding sequence
  source 1..1086: mol_type = other DNA
atgggctgcaccgtgagcgccgaggacaaggccgccgccgagcggtccaagatgatcgacaaaaacctgcgagaagacggggaaaaagccgcccgagaagtcaaattactgcttttgggcgcaggagagagcgggaaatcgacaatcgtgaaacagatgaaaatcatacatgaagatggctattccgaagaagagtgcaggcagtatagagcggtggtgtattctaacactattcagtccatcatggccatcgtgaaggccatgggcaatttacagatcgactttgccgatccaagcagggccgacgacgctcggcagctctttgccctgtcttgcactgcagaagaacagggagtgctgccagacgacctgagtggggtcatccgcaggctgtgggccgatcatggcgtccaggcttgctttggacggtcacgggagtaccagctaaatgacagcgccgcatattacctgaatgacctcgaaaggatcgcgcagtccgactacattcccacacaacaggatgtcctcagaacaagagttaagaccacaggtatagtggagactcactttacgttcaaggatctccactttaaaatgtttgatgtgggtggccaacgcagcgagaggaaaaaatggatacactgtttcgaaggcgtaaccgccatcatcttctgtgtggctctctcggcttatgacctggtcttggccgaagatgaagagatgaatcggatgcatgagagcatgaaactgtttgacagcatatgcaacaacaagtggtttactgatacctcgatcatcctctttctgaataaaaaggatcttttcgaagaaaagattactcatagccctcttacgatctgtttcccagaatacacaggcgctaacaaatacgatgaggctgcctcttatattcaatcaaaatttgaagacctaaacaagaggaaagatacaaaagagatatatacgcacttcacctgtgccaccgacacaaaaagccgaaaacttttccgtgagaactacctgaagctgtccgaccctgaccagcaacctccccccgcccctctccccagcgattctgtcccgtag

SEQ ID NO: 190053 - DNA, 1065 bp, synthetic construct
  misc_feature 1..1065: note = Description of Artificial Sequence: Synthetic coding sequence
  source 1..1065: mol_type = other DNA
atgggctgcaccctgagcgccgaggacaaggccgccgtggagcggtccaagatgatagaccgtaatcttcgagaagatggtgagaaggctgctaaggaagttaaattgttgctcttgggcgccggggaaagcggaaaaagcactattgtcaagcaaatgaaaataatacacgaggacggttatagtgaagacgaatgcaagcagtataaggtggttgtgtactccaacaccattcagagcattatcgcaattatccgcgccatggggcgattaaagattgatttcggtgaagccgcccgcgctgatgacgcaaggcagttgttcgtcctagcaggatctgccgaggagggtgttatgacgcccgaactggctggcgtgatcaaaagactttggcgtgacgggggcgtgcaagcttgctttagccgcagccgagaataccagctgaacgatagcgcctcctactacttaaatgatctggataggatttcacagagcaactacatccctacacagcaggatgtgctgaggacacgcgttaaaacgacaggcattgtggagacccacttcacctttaaggacctttacttcaaaatgttcgacgtcggcggccaacgctccgaaagaaagaaatggatccactgctttgaaggagtgaccgcaattatattctgtgtcgcactgtccgactatgacctggtgctcgcggaggacgaagagatgaaccggatgcatgaaagcatgaagctgttcgactccatatgcaataacaaatggttcacagaaacatccatcattctatttctgaataaaaaggacttatttgaggagaagatcaaacgctcgcccctcaccatctgctatcccgaatataccgggagcaatacctatgaggaagcagctgcatatattcagtgccagtttgaggatcttaaccgacggaaagacacgaaggaaatttacacacattttacttgtgccaccgatactaaaaacgtccagtttgttttcgacgctgtcacagatgtcatcattaagaacaatttgaaggaatgtggcctttactag

SEQ ID NO: 190054 - DNA, 2652 bp, synthetic construct
  misc_feature 1..2652: note = Description of Artificial Sequence: Synthetic coding sequence
  source 1..2652: mol_type = other DNA
atggccgagaacagcgtgctgaccagcaccaccggccggaccagccttgcagatagctccatctttgatagcaaggtgaccgagatctccaaagagaatctgctgatcggaagcacttcctatgttgaggaggaaatgccacagatcgagacacgcgtgattcttgttcaagaggccgggaagcaggaagagctaataaaagctttgaaggacatcaaagtggggtttgtgaagatggaaagcgtagaagagtttgagggcctggacagtccggagttcgagaatgtgttcgtcgtaacagatttccaggactccgtctttaacgacctgtacaaggcagattgcagagtcattggcccaccggtggttcttaactgttcccagaaaggggagccactgcccttttcatgcaggccactgtactgtacaagtatgatgaatttggtactgtgttttaccgggttcaggaaaaaggaggaactcgttcgcttggtgacccttgttcaccatatggggggagtgattcggaaggacttcaatagcaaggtgacccatcttgtagctaattgcacccaaggggaaaagttccgggttgcggtcagtctggggacccccattatgaagccggaatggatttataaggcttgggaaagacgcaacgaacaggatttctatgccgccgtggatgatttcaggaatgagtttaaggtgcctcctttccaggattgtatcctgtcatttttaggcttcagcgacgaggagaagaccaatatggaggagatgactgagatgcagggaggaaagtatcttccacttggtgacgaacgttgtactcatttggtggtggaggaaaatatcgttaaggacctcccctttgaacctagtaagaagctgtacgtggtcaagcaggagtggttttggggcagcatacagatggacgctagggctggagagaccatgtatctatatgagaaggctaatactcccgagttgaaaaaatcggtgagcatgttaagcttaaatacgccaaactctaacagaaagcgccgccggctgaaggaaacgttggcccagctgtcacgggaaacagacgtgtcaccattccctccaaggaaacggcctagcgctgagcactcattgtctatcgggtcccttcttgatatcagtaatacacccgagtccagcatcaattatggcgatacgcctaaaagctgcaccaagagttcaaagagcagtactcccgtcccgagtaagcagagtgcaagatggcaggtcgccaaggaattataccagaccgagtctaattatgtgaacatcctggcaaccatcatccagctgtttcaagtgcccctggaggaggagggccaacgcggcggaccgatcctggcccctgaggagatcaagacgatcttcggaagcataccagacatttttgacgttcatactaagattaaggatgatctcgaagatctcatcgtaaattgggatgagtccaagagtatcggtgatatcttcttaaaatacagtaaagaccttgtgaaaacctatcctccatttgtgaatttctttgagatgtcgaaagagactataatcaagtgtgagaagcagaagcccaggttccacgcctttctgaagattaatcaggctaaacctgagtgtggccggcagtccctggtagagctgttaattcggcccgtacaacgcctgcccagtgtggcccttctattgaacgacctgaaaaagcatactgccgacgagaaccctgataagagcacactggagaaagctatcggctctctcaaagaggtgatgacccacatcaatgaggataaaaggaagaccgaagctcaaaagcagatttttgacgtcgtctatgaggtcgacggatgtcccgccaaccttttatcttcccaccgatcattagttcaacgagtcgaaacaatctcattgggagaacacccctgtgacagaggggaacaggtgactttgttcctcttcaatgactgcctggagattgctcgcaagagacataaagtgattggcacgtttcggagcccccacggtcaaacacggccccccgcttctctgaaacatatccatctaatgccactgtcccagattaagaaagtgttggacattcgggagacggaagactgtcacaacgcctttgccctgctggtgagaccaccaaccgagcaggcaaacgtgctgctgagctttcagatgacctctgatgagttgcccaaggaaaactggctcaaaatgctgtgtcgtcatgtggctaatactatctgtaaagctgacgcggagaacctgatttacacagcggaccccgaaagtttcgaggtgaacaccaaagatatggatagcaccctgtctagggcatctcgcgctatcaagaagacttccaagaaagtaaccagagccttttccttttccaagacccctaagagggctttacgccgcgctcttatgacatcacacgggtctgtcgagggcagatcacccagttctaacgataaacacgtgatgagtaggctgtcttctacgtcttcactggcagggataccatcgcccagccttgtgtctttacctagctttttcgagcgaagatcacacaccttatcccgatccaccacacatctgatctag

SEQ ID NO: 190055 - DNA, 1053 bp, synthetic construct
  misc_feature 1..1053: note = Description of Artificial Sequence: Synthetic coding sequence
  source 1..1053: mol_type = other DNA
atgggcgccggcgccagcgccgaggagaagcacagccgggagctggaaaaaaagctcaaagaggacgctgagaaggatgcccgtaccgtgaagctactgctcctcggggcaggtgagtccgggaagagcactatcgtcaagcagatgaaaatcatccaccaggatgggtattccctggaagagtgcttggaattcatcgcaattatttacggtaatacactgcagagcatactggccatagtaagggccatgaccacgctgaacatccaatatggcgactccgccaggcaggacgacgccaggaagctgatgcatatggcagacacaatcgaggagggtacaatgccgaaggagatgagtgatatcatccagcgattatggaaggactcaggcattcaggcttgctttgaaagagcttccgaatatcagctgaacgatagcgctggatactatctttctgacttggaaagactggtgaccccggggtacgtgcccacggagcaggacgtgttgaggagtcgagtgaaaaccaccggcatcattgagacccagttttctttcaaagaccttaacttcagaatgttcgacgtgggtggacagaggtctgaaagaaagaagtggattcattgtttcgagggtgttacttgtataatctttatcgcagcccttagcgcttatgacatggtactggtcgaggacgatgaagtaaataggatgcatgaatctctgcacctcttcaacagcatctgcaatcaccggtatttcgctaccaccagcattgtgcttttcttgaacaagaaggacgttttcttcgagaaaatcaagaaagcccacctcagcatatgtttcccagactacgatggacctaacacctacgaggacgcaggcaactacattaaagttcaattccttgaacttaatatgcggagagacgtgaaggaaatttactcacatatgacgtgcgccaccgacacacagaacgtgaagtttgtgttcgacgccgtgaccgatatcatcataaaagaaaacttgaaggactgcggtctcttctag

SEQ ID NO: 190056 - DNA, 1065 bp, synthetic construct
  misc_feature 1..1065: note = Description of Artificial Sequence: Synthetic coding sequence
  source 1..1065: mol_type = other DNA
atgggcagcggcgccagcgccgaggacaaggagctggccaagcggtcgaaggagcttgaaaaaaaactccaagaggatgcagacaaggaggctaagacagtgaagctcctcttgctgggggccggcgagagcgggaaaagcaccatcgtgaagcagatgaagattatccatcaggacggctactctcctgaggaatgcctggaatttaaggcaattatctatggaaatgtgttacagagcatcctcgccatcattcgggcgatgaccacattaggtattgactacgctgaaccttcatgtgctgatgacgggagacagctcaataatctggcagatagcatagaggaagggacaatgccccccgaactggtggaggtaatccggcgtctgtggaaagatggaggcgtacaggcttgtttcgaaagagcagctgagtaccaactgaatgatagtgcgtcgtactacttaaaccagctggagagaatcacggatcctgagtatctccccagcgagcaagacgtgctgcgcagccgagtgaagaccacgggcatcattgagactaagttcagcgtgaaggacttgaattttcggatgttcgacgtgggcggacagaggtctgagcgcaaaaagtggatacactgcttcgagggcgtaacatgcattatcttctgtgccgccttatctgcttacgacatggtgctggtggaagacgatgaggtgaaccgtatgcatgagagcctgcacctgttcaactctatttgtaatcataaatttttcgccgcaacaagtattgtattattcttaaataagaaggacttgtttgaagagaagatcaaaaaggttcacctgagcatttgtttccccgaatatgacggcaacaatagttatgacgacgctggcaactatattaagtctcaattcttggacctcaatatgcggaaggatgtcaaagagatctacagccatatgacttgcgctaccgatacccaaaacgtgaagttcgtgttcgacgcagtcaccgatattataattaaagagaatcttaaggattgcgggctgttttag

SEQ ID NO: 190057 - DNA, 1068 bp, synthetic construct
  misc_feature 1..1068: note = Description of Artificial Sequence: Synthetic coding sequence
  source 1..1068: mol_type = other DNA
atgggctgccggcagagcagcgaggagaaggaggccgcccggcggtctaggcggattgatcggcatctccgcagcgaaagccagcgccagagacgggagattaagctgcttctacttggcacatctaacagcgggaagtcgactatagtaaagcagatgaagatcattcacagcggggggttcaacctggaggcttgcaaggagtacaaacctcttataatctacaacgccattgactcacttaccagaattatacgggcactcgctgccctcagaattgacttccataatccagaccgtgcatatgacgctgttcagctgttcgcactaacaggtccagcagagagcaaaggcgagatcacccctgagttacttggcgtcatgcggcggctctgggccgatccaggcgcacaggcctgctttagtcggtcttctgagtaccacctggaagataatgcggcctattacctcaacgatctggagcgaatcgctgccgctgactatattcccaccgtggaggacatactccggagtcgtgatatgactaccggaatagtagaaaataagttcactttcaaggagctgacgttcaagatggtcgacgttgggggccaacgaagcgaacgaaagaagtggattcattgtttcgaaggcgtcaccgctatcatattctgtgtggagcttagcggatacgacctgaagctctacgaggataatcagacttcacgtatggctgagtcactgcggctgtttgatagcatctgtaataataactggtttatcaatacgagcctcatcctgttccttaacaagaaggatctccttgccgagaaaattaggcgtattcctctcaccatttgctttcccgagtacaagggccagaacacctacgaggaggcggcagtgtacatccaaaggcagttcgaggacctgaaccggaacaaggagaccaaagaaatctacagccactttacctgcgccactgatacatccaacatccaatttgtcttcgatgcagttacggatgtgatcatccaaaataacctcaaatacatcgggttgtgctag

SEQ ID NO: 190058 - DNA, 912 bp, synthetic construct
  misc_feature 1..912: note = Description of Artificial Sequence: Synthetic coding sequence
  source 1..912: mol_type = other DNA
atgaagatcatccacagcggcggcttcaacctggaggcctgcaaggagtataagcctctgattatctacaacgccatagacagtttgactcgaattatcagggccctggccgctcttaggatcgatttccacaatcccgaccgcgcctacgacgcagttcagctctttgccctgactggaccagccgagtctaaaggcgagatcactcccgaactccttggggtgatgaggaggctctgggccgatcctggggcccaggcctgtttctcccgctcatccgagtaccatttggaggacaacgccgcctactacctcaacgatttagagagaattgcggcagctgactacatcccaacagtggaggacatactgcggagcagggacatgacaacgggcattgttgagaataagtttactttcaaggagctaaccttcaagatggtagatgtaggagggcagaggtccgagcggaaaaagtggatccactgctttgaaggtgtgactgcaattatcttctgcgttgagttgagcggctatgatttgaagctgtatgaagataaccagacctccagaatggcagagtccttgcgcctattcgacagtatttgtaataataattggtttatcaacacgagtctgattctgttcttgaacaagaaagacctgttggcagagaagattaggcggattcccctcaccatatgttttccagagtataaaggacaaaatacatacgaggaagccgccgtgtatattcaacggcagtttgaagatctgaaccgaaataaggagactaaagaaatctacagccactttacttgcgctacagacactagcaacatccagttcgtcttcgatgcagtcacagacgtaatcatccagaacaacctaaagtatataggcctttgttag

SEQ ID NO: 190059 - DNA, 1188 bp, synthetic construct
  misc_feature 1..1188: note = Description of Artificial Sequence: Synthetic coding sequence
  source 1..1188: mol_type = other DNA
atgtgcgaccagaccttcctggtgaacgtgttcggcagctgcgacaagtgcttcaagcagagggcactccgacccgtgttcaagaagagccaacagctgtcatactgctccacctgcgctgaaattatggcaacagaaggactccatgaaaatgaaactttggcaagcctaaagtctgaagcagagagcctgaagggcaagctggaagaggaacgggccaaactgcacgatgtggagcttcaccaggttgccgagagggtagaagcattgggccagtttgtgatgaagacgaggcggaccttgaaggggcacggtaacaaagtgctgtgcatggactggtgtaaggacaaacgacggatcgtttcaagctcccaggacggcaaagttatcgtgtgggactcattcactaccaacaaggagcatgcggtgactatgccttgcacttgggttatggcatgcgcttacgccccctccggctgcgcaattgcctgcgggggtttggataataaatgcagcgtttaccctctgaccttcgataaaaacgagaacatggccgcaaaaaaaaagtccgtcgctatgcacactaactatctgtcagcttgctcctttactaactctgacatgcagatcctgactgctagtggggacggtacatgtgcactctgggatgtcgaaagtggccagttgctccagtcatttcatggacacggggctgatgtgctgtgcctggacctggcacctagtgaaactggcaacactttcgtttcaggaggctgtgataagaaggccatggtttgggatatgcgctctgggcaatgcgtgcaggcattcgaaacccacgagagcgacattaattccgttcgttactatcctagcggcgacgctttcgcgagcggaagtgacgacgccacctgccggttgtatgacctgcgcgctgatcgggaggttgccatctattcaaaggaatctatcatatttggcgcttcgagcgtcgacttctctctaagtgggagattactgttcgctgggtataatgactataccattaacgtgtgggatgtgctcaagggctcacgtgtctctatcctcttcgggcatgagaaccgagtcagcacattaagggtatctcctgacggaactgccttctgctcgggcagctgggatcacacactccgagtgtgggcctag

SEQ ID NO: 190060 - DNA, 1062 bp, synthetic construct
  misc_feature 1..1062: note = Description of Artificial Sequence: Synthetic coding sequence
  source 1..1062: mol_type = other DNA
atggccaccgagggcctgcacgagaacgagaccctggccagcctgaaaagcgaagcagaaagcctgaaggggaagctggaggaggagcgggcaaaactgcatgacgtagaacttcaccaggtggctgagcgggtcgaggccttaggtcagttcgtgatgaagacaaggagaacactgaaaggacacgggaacaaggtgttgtgcatggattggtgcaaggacaaacggagaattgtcagcagctcccaggacggtaaggtaatcgtgtgggattcttttacaacaaataaggagcacgctgttacaatgccttgcacctgggtgatggcctgcgcctacgcgccatcaggttgtgccattgcctgtggggggctggacaacaagtgctcagtctaccccttgactttcgacaagaacgaaaacatggccgccaagaagaagagtgtggccatgcacacaaattacctctccgcctgcagtttcacaaattctgacatgcaaattctgacagcctccggcgatgggacctgcgcgctctgggacgtcgagtcgggccagcttcttcaatctttccacggccacggggctgatgtgctttgtctggacctggctccttcagagacgggcaacaccttcgtctctggggggtgcgataaaaaggcaatggtgtgggatatgaggtcaggccagtgcgtgcaggccttcgagacacacgaatctgacatcaatagcgtccggtattatcccagcggagatgcctttgcctcagggagcgacgacgctacttgtcgcttgtacgacctccgcgctgatcgtgaggtagccatttattcgaaagagtcaatcatttttggcgcaagtagcgtagactttagcctgtcgggacggttactgtttgccgggtataatgactatactattaatgtctgggacgtcctaaaaggttcccgagtttcaatactcttcggccacgaaaaccgcgtgtccacgctgcgggttagccccgacggcacggctttctgtagcgggagctgggaccatacactgagggtgtgggcctag

SEQ ID NO: 190061 - DNA, 852 bp, synthetic construct
  misc_feature 1..852: note = Description of Artificial Sequence: Synthetic coding sequence
  source 1..852: mol_type = other DNA
atggccaccgagggcctgcacgagaacgagaccctggccagcctgaagagtgaggctgaatccttgaaggggaagcttgaagaggaacgcgccaagctccacgacgtcgaactgcatcaggtggccgaacgtgtagaagcgctgggacaattcgtgatgaaaaccagacgtacacttaaggggcatggcaacaaagtgttatgcatggattggtgtaaagataagcgcaggatcgtgagctcgagtcaagacggaaaggttattgtctgggattcttttaccactaataagatcttgaccgcgtctggggacggaacctgtgccttgtgggatgtcgaaagcggccaactgctacagtcattccacggtcacggggccgacgtcctgtgcctggatttagccccctccgaaacaggcaacacgtttgttagcggtggttgtgataagaaagccatggtctgggatatgcgatccgggcagtgcgtccaggcttttgagacacatgaatccgacatcaactccgtccgttattatccgagcggtgatgcctttgcttcgggatcagacgatgcaacctgcagactctatgatttaagagctgaccgcgaggtggcgatttacagcaaagaatcaattatctttggtgctagctccgtggacttcagtttgtctggccgcttgctcttcgccgggtataacgactatacgatcaatgtctgggacgttctcaaggggagccgcgtgtctatcctgtttggccacgagaacagagtgtctaccctccgcgtgagtcctgacgggaccgcattttgctccgggtcctgggatcacacactgcgggtgtgggcctag

SEQ ID NO: 190062 - DNA, 582 bp, synthetic construct
  misc_feature 1..582: note = Description of Artificial Sequence: Synthetic coding sequence
  source 1..582: mol_type = other DNA
atgagcaagctgctgatcctgatcctgaccgccagcggcgacggcacgtgcgccctatgggacgtggaatcagggcagctgctgcagtcctttcacggccatggcgcggacgtgttatgtctggaccttgcccccagcgaaaccggcaatacttttgtgagcgggggctgcgacaaaaaggccatggtgtgggacatgagaagcggtcaatgtgtccaagcattcgagacacacgagtccgatatcaatagtgtgagatactacccaagcggagatgccttcgcttcgggttcggacgacgctacttgtcgcctctacgacctgagagctgatagggaagttgccatctactcaaaggagtcaatcatcttcggtgccagttctgtagatttttctttgtctggccggctactgttcgctggatacaatgactatacgatcaatgtgtgggatgtgctgaagggaagccgcgtctccatacttttcggccacgagaacagagtcagcacattaagagtgtccccagacggcacggccttttgctctggatcctgggaccacactctccgcgtttgggcctag

SEQ ID NO: 190063 - DNA, 1023 bp, synthetic construct
  misc_feature 1..1023: note = Description of Artificial Sequence: Synthetic coding sequence
  source 1..1023: mol_type = other DNA
atgagcgagctggaccagctgcggcaggaggccgagcagctgaagaatcaaattagggatgctcgcaaggcctgtgccgatgcaacactctcccaaattaccaataatatagaccccgtcggacgaatccagatgcgaacccgccgaaccctgcggggccatttggccaagatctatgccatgcactggggtacagactctagactgctggtctctgcttcccaggacggaaagctgattatctgggatagctataccaccaacaaagtgcatgctattccgctgagaagcagctgggtcatgacgtgcgcttatgccccctctgggaactatgtggcctgtggcggtctagacaatatatgcagcatttacaatttgaaaacaagggaaggcaatgtgcgggtgagtcgcgaacttgccggccacaccggttatctgtcttgttgccgtttcctggatgataatcaaatagtcacaagttctggtgacacaacgtgtgcactttgggatattgaaacaggtcagcagacgactacgtttaccggccatactggggatgttatgtccctgtccctggcccctgatacaaggctttttgtgtccggagcatgtgacgcatctgccaaactgtgggacgtgcgggaaggcatgtgtcggcagaccttcacaggtcacgagagtgacatcaatgccatctgtttctttccaaacggcaacgccttcgccaccggcagcgatgacgcaacttgccgcctattcgatctccgcgcagatcaggaactaatgacctatagccatgataatatcatctgcggcattactagcgtctcgttctccaaaagtgggcgcctcctgttagcaggttacgacgacttcaattgtaacgtgtgggatgctcttaaggccgacagagccggggtgctcgccgggcacgacaatcgcgtgagttgcctgggagtcacagacgatggaatggcggttgccacaggaagctgggattcctttcttaaaatttggaactag

SEQ ID NO: 190064 - DNA, 1023 bp, synthetic construct
  misc_feature 1..1023: note = Description of Artificial Sequence: Synthetic coding sequence
  source 1..1023: mol_type = other DNA
atgagcgagctggaccagctgcggcaggaggccgagcagctgaagaaccaaatacgggacgccaggaaggcctgtgccgacgcaaccctctcacagatcacaaacaatattgacccagtagggaggatacaaatgcggacaagaagaacactcagaggtcacctggcaaagatatacgcgatgcactggggcactgatagcaggctactggttagcgcttcccaggacggaaaattaatcatatgggactcatataccacaaacaaggttcacgcaattcctctgcgttcctcatgggtgatgacttgcgcctacgcccctagcgggaattatgttgcctgtggaggtctcgataatatttgctccatctataatctcaagaccagagagggcaacgtgcgcgtgtctcgagaattagccggtcatactggatacctctcatgttgtcgttttctggatgacaatcagatagtgactagttccggagataccacgtgtgccttgtgggacatagagaccgggcagcaaaccactactttcacaggtcacacaggcgatgtaatgagcctctctcttgcccccgacacccgtctgttcgtgagtggggcttgcgatgccagcgccaagctgtgggacgtgagagagggaatgtgtcgccagacgtttactgggcatgaatctgatataaacgctatatgcttttttcccaatggtaacgctttcgcaaccggcagcgacgacgccacctgtaggcttttcgatttaagggctgatcaagagctgatgacatattcgcacgataatatcatctgtggaattacatccgtctcattcagtaagtctggtcgccttctgcttgccggatatgacgatttcaattgcaatgtttgggatgccctcaaggctgatagagctggcgtcctcgcaggacatgataacagggtaagttgcctgggcgtcacagatgacgggatggcagtcgctaccggttcttgggactccttcctgaagatatggaattag

SEQ ID NO: 190065 - DNA, 597 bp, synthetic construct
  misc_feature 1..597: note = Description of Artificial Sequence: Synthetic coding sequence
  source 1..597: mol_type = other DNA
tgaggctacctgagctgctgccggttcctggacgacaaccagatcgtcacaagctcaggcgataccacttgcgccctttgggacatagagaccggccagcaaacgacgactttcacggggcacaccggagacgtcatgtcgctgagcctggccccagacaccagattgtttgtctctggcgcatgcgacgccagcgccaaactatgggacgtgcgcgagggcatgtgcagacagaccttcaccggccatgaatcagacatcaatgcaatttgtttttttcctaatgggaatgcctttgccaccggctccgacgacgccacatgccgactgttcgacctccgtgccgaccaggagctaatgacttacagccacgataacattatctgcggcattacctccgtgtccttcagcaaaagtggtcgactgctgttagcgggctatgatgactttaactgcaacgtatgggatgcattgaaggccgatagagccggcgtcctcgcaggtcatgataatcgggtaagctgtctcggagttaccgacgacggaatggccgttgccaccggttcttgggatagcttccttaaaatatggaactag

SEQ ID NO: 190066 - DNA, 444 bp, synthetic construct
  misc_feature 1..444: note = Description of Artificial Sequence: Synthetic coding sequence
  source 1..444: mol_type = other DNA
atgagcgagctggaccagctgcggcaggaggccgagcagctgaagaaccagattcgtgatgctcgaaaggcttgcgccgatgccacactgtcccaaatcacgaacaacattgacccagttgggcgcatccaaatgcgtacccgcaggactctccgtggacatcttgccaagatctatgcaatgcactgggggaccgacagtcgcctccttgtgagtgccagtcaggatggaaaactgatcatctgggactcctacaccacgaacaaggttcatgctattcctctgaggtcatcttgggtgatgacctgtgcctacgctccttcagggaattacgtggcatgcggcggactggataacatctgctcaatatataacctcaaaactagggagggcaacgttagggtgagtcgcgaattagccggacatacaggcacctgcccgtag

SEQ ID NO: 190067 - DNA, 327 bp, synthetic construct
  misc_feature 1..327: note = Description of Artificial Sequence: Synthetic coding sequence
  source 1..327: mol_type = other DNA
atgagcgagctggaccagctgcggcaggaggccgagcagctgaagaaccagatccgagacgctagaaaggcctgcgcagacgctacactgagccagatcacaaacaacattgaccccgtgggtaggatacagatgcggacgcgccgcacactgcgtgggcacctggccaagatttatgcaatgcactggggcactgatagccgcctcctagtgtctgcctcccaggacggcaagctgataatctgggattcatataccactaataaagtgcacgccatccccttaagaagttcttgggttatgacctgtgcctacgcccctagctag

SEQ ID NO: 190068 - DNA, 405 bp, synthetic construct
  misc_feature 1..405: note = Description of Artificial Sequence: Synthetic coding sequence
  source 1..405: mol_type = other DNA
atgagcgagctggaccagctgcggcaggaggccgagcagctgaagaaccagatcagaataacgaacaacatcgatccggtagggcgcattcagatgagaactaggagaaccctacgcggccatcttgcaaagatctacgctatgcactggggtacagatagtcgattgctcgtgtcagcatctcaagatggaaaattaatcatttgggatagctatactaccaataaggtacacgctattcccctgcggtcaagctgggtcatgacctgtgcgtacgccccatcggggaattacgtcgcctgcggcggtctggataatatatgttccatttacaatctgaagaccagagagggtaacgtgagagtgtctagagaattggccggacatactggtacttgcccctag

SEQ ID NO: 190069 - DNA, 723 bp, synthetic construct
  misc_feature 1..723: note = Description of Artificial Sequence: Synthetic coding sequence
  source 1..723: mol_type = other DNA
atgacctgcgcctacgcccccagcggcaactacgtggcctgcggcggcctcgataatatctgcagtatctacaacctgaagaccagagaaggtaatgtgcgggtttcacgcgagctggccggtcacactgggtacctatcctgttgtcggttcctggacgacaaccagatagttacaagttcaggcgacactacctgcgctctatgggatattgaaacgggtcagcagacgacaactttcactggtcacacaggggacgttatgtctctgtcgctcgcaccagacaccagactcttcgtctccggagcctgcgatgcatccgctaaactttgggacgtgagagaggggatgtgtcggcagaccttcactgggcatgagtctgacattaatgccatttgtttctttcctaacggaaacgcattcgctacgggttcagacgatgccacctgtagactcttcgacctgcgcgctgaccaggagctgatgacatattcacacgacaatataatctgtggcattacttccgtgagctttagcaagtctgggagacttctgctcgctggatatgacgactttaactgtaacgtgtgggatgccctaaaggccgacagggcaggcgtgctagccggccacgataacagagtgtcttgccttggagtcaccgacgacggcatggccgtggccacagggagctgggatagttttctcaagatttggaactag

SEQ ID NO: 190070 - DNA, 984 bp, synthetic construct
  misc_feature 1..984: note = Description of Artificial Sequence: Synthetic coding sequence
  source 1..984: mol_type = other DNA
atgaccgccccctgccccccccccccccccgacccccagttcgtgctccgcggaacccagtctcccgtgcatgctcttcacttctgcgaaggggcccaggcacagggtaggcctctgctgttctccgggagtcagtcgggtctggtccacatctggagcctccagacgcgaagagctgtcaccaccctcgacggccacgggggacagtgtgttacttggctgcagaccctgcctcaggggcgccagcttctctcccagggcagggatctgaagctctgtttatgggatctggctgagggtcgcagcgcagtcgtcgattctgtatgcctggagtccgtgggattctgtagatcttccatcctcgccgggggccagccacgctggactctggccgtgcctggaagaggttctgacgaggttcagatactcgagatgccctccaagaccagtgtgtgcgccctgaagcctaaggcggatgccaaactaggtatgccaatgtgtctgcggctttggcaggctgattgttcgtcccgacccttattactcgcaggctacgaggacggtagcgtggttctgtgggacgttagtgagcaaaaggtgtgctcccggatcgcttgccacgaggaacccgttatggatttagattttgacagccaaaaggctcggggcatttctggatctgccggaaaagctttggcagtctggtctttagactggcagcaggcacttcaggtacgcggtacacatgagctgacaaatcctgggattgcggaagtcacgattcggccagacaggaagattctggcaacggcaggctgggaccaccgcatccgcgtattccattggaggacaatgcaaccactggccgtgctggcattccacagtgctgctgtgcaatgcgtggcctttactgctgatgggctgctcgctgccgggagcaaggatcaacgaatctcgttgtggagcctgtacccccgagcctag

SEQ ID NO: 190071 - DNA, 984 bp, synthetic construct
  misc_feature 1..984: note = Description of Artificial Sequence: Synthetic coding sequence
  source 1..984: mol_type = other DNA
atgaccgccccctgccccccccccccccccgacccccagttcgtgctgaggggtacacagtcccccgtgcatgccttacatttttgcgaaggagcccaagcccaaggtcggcctctgctctttagtggctctcagtccggcctggtgcatatctggtctctgcagacccgcagggctgtcacaaccttggatggacacggcggtcagtgtgtcacctggctacagactttgccacagggacgccagctgcttagccagggcagggacctgaagttgtgtttatgggacctagcggagggccggtccgctgtggtggattccgtgtgcctggaatccgtcggcttctgccggtcctccatactcgccggaggtcagcccaggtggaccctggctgtccccggtagaggcagtgacgaggtacagatccttgagatgccctccaagacaagcgtttgtgctctgaagccaaaagcggacgccaaacttggtatgcctatgtgtttaagactgtggcaggctgactgctctagcagaccactgctgctggccggctatgaggatggatcagtggtactttgggacgtctccgagcaaaaagtctgctcccggattgcctgccacgaggagcccgttatggatctagatttcgatagtcagaaggctcggggaatatccgggagtgccggtaaggccttagcggtttggtcccttgattggcagcaagcactgcaggtcagaggaacgcatgagctcaccaacccagggattgccgaggtgacaatccggccagatcggaagatcctggccaccgccggctgggatcatcgaatcagggtttttcattggcggacaatgcaaccccttgccgtgctcgctttccatagcgcggccgtgcagtgtgtcgcttttaccgcagatggcctactcgccgcaggatctaaagatcagcggatctcgctctggagtctgtacccgagggcatag

SEQ ID NO: 190072 - DNA, 639 bp, synthetic construct
  misc_feature 1..639: note = Description of Artificial Sequence: Synthetic coding sequence
  source 1..639: mol_type = other DNA
atgaccgccccctgccccccccccccccccgacccccagttcgtgctgcggggtacacagtcccccgtgcatgcattacatttctgcgagggagcacaggcccagggcagacctctgctattcagtggtagtcagtccggacttgtacacatttggtcactgcaaacacggagggccgtgaccacactcgatggccacgggggtcagtgtgtgacgtggctccagactctgccacagggccggcagttgctctcccagggcagagaccttaagctgtgtctttgggacctagccgagggccgaagcgcggtggtggattctgtttgtttggagagtgttggcttttgtaggtcctcaattcttgcaggaggccagcccagatggacattggctgtgcctgggcgcggttccgacgaggtgcagatcttggagatgccaagcaagacctctgtctgcgcgctcaagccaaaggcggacgccaaacttgggatgcccatgtgccttcgcttatggcaggccgactgctcatctagacctctgcttctggctggttacgaggatggcagtgtcgtcttatgggatgtctcagagcagaaggtctgtagccgaatcgcttgccatgaagaacctggcctgtag

SEQ ID NO: 190073 - DNA, 1023 bp, synthetic construct
  misc_feature 1..1023: note = Description of Artificial Sequence: Synthetic coding sequence
  source 1..1023: mol_type = other DNA
atgagcgagctggagcagctgcggcaggaggccgagcagctgcggaatcaaatacgagatgcacgcaaagcgtgcggggattctacactcactcaaattacagcaggcctggaccctgtgggcagaatacagatgcggacgagacgtacgctccgtggacatcttgccaaaatctacgctatgcactggggtacagatagcaggcttcttgtgagcgcctcgcaggacgggaaactcataatttgggattcatacacaaccaataaggttcacgctattcctttgaggtcatcatgggtcatgacgtgtgcatacgccccatcgggcaacttcgtggcctgtggcggtttggataatatatgctctatctacagcctcaagacgagagagggcaacgtgagggtctctcgcgagctcccagggcataccggctatctcagctgctgccgatttctcgacgataaccaaattatcacttccagcggagacaccacctgtgccctgtgggacatcgagactgggcagcagaccgttgggtttgccggccacagtggtgacgtgatgagcctcagtcttgctcccgacggccgtacatttgtctccggggcttgtgacgcatccatcaagctttgggatgtcagagactcaatgtgtcggcagacatttattgggcacgagtccgatatcaatgcagttgcattttttcccaatgggtacgcttttactacaggaagcgacgatgctacctgtagactcttcgatctcagagccgaccaggaattactgatgtacagccatgacaacatcatttgcgggataacatcggtggcattctcgcggagcggtagactgttgctggccggttatgatgactttaattgtaacatctgggatgctatgaaaggtgaccgagcaggggtgttggcagggcacgacaacagggtctcatgcttgggggtcactgacgatggcatggcagtggcaacaggatcatgggactcttttctgaaaatctggaactag

SEQ ID NO: 190074 - DNA, 1023 bp, synthetic construct
  misc_feature 1..1023: note = Description of Artificial Sequence: Synthetic coding sequence
  source 1..1023: mol_type = other DNA
atgagcgagctggagcagctgcggcaggaggccgagcagctgcggaatcagatacgtgatgccagaaaagcctgcggagattcaaccctaacccagattactgcaggcctcgatcccgtcgggcgaattcagatgcgtacaagaagaacactgagaggtcatttagccaaaatatacgctatgcactggggtaccgattccaggcttcttgtgtcagcctcacaagacggaaagctaattatatgggattcctacacaactaacaaggtacatgctatccctctgagatccagttgggtcatgacatgtgcatacgccccgtctggaaattttgtggcctgcgggggcttggacaatatttgttcaatctactcactgaagacaagggagggcaacgtgcgcgtgagtcgagagctcccgggacacacaggctacctttcttgttgccgcttccttgatgataatcagatcatcacatcatctggggacacaacctgcgccctttgggatatagaaaccggtcagcaaactgtcggctttgcgggtcactccggagatgtaatgtctttgagcctcgctcctgacggcagaacatttgtgtccggggcatgcgacgcatcaatcaagctctgggacgtgagggactcaatgtgtcgacaaacattcatcgggcacgagtctgacatcaatgctgttgcattcttccctaatggctatgcctttacaaccggatctgacgacgcgacctgtagactgtttgatctgcgtgccgaccaggaattgctgatgtactcacacgacaatattatctgtggcattaccagcgtagcctttagccgaagtgggcgtcttctgctggcaggctacgatgacttcaattgcaacatttgggatgccatgaagggtgacagagctggtgtgctcgccggccacgacaaccgagtatcctgtttgggggtcacagacgacggcatggccgtggcaacagggtcttgggacagctttttaaaaatatggaactag

SEQ ID NO: 190075 - DNA, 1023 bp, synthetic construct
  misc_feature 1..1023: note = Description of Artificial Sequence: Synthetic coding sequence
  source 1..1023: mol_type = other DNA
atgagcgagctggagcagctgcggcaggaggccgagcagctgcggaatcagattagagatgcgagaaaagcgtgtggtgactcgaccctgacccagattaccgcaggcctggacccggtaggccgcatccagatgagaactaggcggacgctccgcggccatctggcgaagatctacgctatgcattgggggacggactcaagactgctggtttctgcgagccaggatggcaagctgataatttgggactcttacactaccaacaaagtacatgccatcccactgcgtagctcgtgggttatgacatgcgcttatgccccgtccggcaacttcgtggcgtgtgggggactggataacatatgctccatttactctctgaaaacaagggaaggtaatgttcgagtgtctcgggaactgcctgggcatacaggttacctgtcatgctgccggttcctcgatgacaaccaaatcatcacctcgagcggagacacaacctgtgcactgtgggacatcgaaaccggacagcagacagttggcttcgccggccatagtggggatgttatgtccctgagtctggcccccgatggacggacttttgtttctggagcctgtgatgcaagcataaagctgtgggatgtgcgggacagcatgtgtcggcagacgtttatcggacatgaatctgacattaacgccgtcgcatttttccccaacggctatgctttcaccacaggctcagatgatgccacgtgtcgcctcttcgacctgcgtgcagaccaggagctgcttatgtactctcacgataatatcatttgcggcataaccagtgtggccttctcaagaagcggcaggctgctgctggccggttacgacgatttcaattgtaacatctgggatgctatgaagggagatagggcaggggtgctagccggccatgacaaccgcgtctcctgtcttggggtcaccgatgatggtatggctgttgctacaggttcctgggactcatttctgaagatttggaattag

SEQ ID NO: 190076 - DNA, 459 bp, synthetic construct
  misc_feature 1..459: note = Description of Artificial Sequence: Synthetic coding sequence
  source 1..459: mol_type = other DNA
atgagcgagctggagcagctgcggcaggaggccgagcagctgcggaaccaaattagggacgcaagaaaggcttgcggagattctactctgacccagatcacagcaggactggaccccgtcgggagaatccagatgaggacacgtcggacacttagaggacacctcgcaaaaatctacgccatgcactggggaaccgattcgaggctcctcgtgtccgcctcccaagacgggaaactgatcatttgggactcttataccaccaacaaggtgcatgcgattcccctccgctccagttgggtgatgacatgcgcctacgccccctcggggaattttgtggcctgtggtggattggataacatttgctccatctactctttaaaaacacgggaaggcaatgtacgggtgtccagagagttgccaggccacaccgggtatctctcttgctgtcgcttcttatag

SEQ ID NO: 190077 - DNA, 723 bp, synthetic construct
  misc_feature 1..723: note = Description of Artificial Sequence: Synthetic coding sequence
  source 1..723: mol_type = other DNA
atgacctgcgcctacgcccccagcggcaacttcgtggcctgcggcggcctggacaacatttgtagtatttactctttgaagacacgtgagggcaacgtccgcgtgtctagagagctgccaggacacacaggatacctgtcatgctgccggttcctcgatgataatcaaatcatcacttccagtggggacaccacatgcgccctctgggacattgagacgggtcagcagactgtgggatttgctggacactccggagacgtgatgtctctttccctggctcccgacggcagaacttttgtttctggagcctgtgacgccagcattaaactctgggacgtacgcgactccatgtgccgtcagaccttcatcgggcacgaatcagacatcaatgccgtcgcttttttccccaacggttacgcctttacaaccggatcggatgacgccacgtgtcggttgttcgatctgagggcggatcaggagcttctgatgtattcacatgataacattatctgcggaataacgagtgttgcgttttccagatccggtcggctgctgctggctgggtatgatgactttaattgtaatatctgggatgcaatgaaaggcgaccgtgctggggttttggctgggcacgacaaccgggtgagctgcttaggtgtgactgacgatggaatggccgttgccacaggtagttgggatagctttctgaaaatctggaactag

SEQ ID NO: 190078 - DNA, 891 bp, synthetic construct
  misc_feature 1..891: note = Description of Artificial Sequence: Synthetic coding sequence
  source 1..891: mol_type = other DNA
atgcggacccggcggaccctgcggggccacctggccaagatctacgcgatgcactggggcaccgattcgcgattattagtaagtgcatcgcaagatggaaagttaatcatctgggactcatacaccaccaacaaagtccacgctatccccctgaggagtagctgggtgatgacgtgtgcatacgcaccctcgggtaatttcgtggcctgtggagggctggacaatatctgttccatttattcactcaagacccgcgaaggaaacgtgagagtgagccgggaacttcctggccacacgggatacctgtcttgctgccggttcctggacgataaccagattatcaccagcagcggagacaccacttgtgcattatgggacatcgagacagggcaacagactgtcggtttcgctgggcactctggagacgtgatgtcacttagcctggcaccagatgggagaacttttgtgagcggcgcctgcgacgcttcaattaaactctgggatgtgagagattcgatgtgccggcaaactttcatcgggcatgagtccgacattaatgcagtcgcgttctttccgaatggatatgcattcacgacgggctcagacgacgctacatgtcggttgttcgacctgcgcgccgatcaggaacttctgatgtactcacatgataatattatttgcggtatcaccagtgtggccttttcaagaagtggccggctcctgctggcaggatacgatgattttaattgtaatatctgggacgccatgaaaggcgatcgagccggagtattggcagggcatgacaatagagtgtcctgcctgggggtcactgacgacggcatggccgtggccacgggaagctgggatagttttctgaagatatggaactag

SEQ ID NO: 190079 - DNA, 723 bp, synthetic construct
  misc_feature 1..723: note = Description of Artificial Sequence: Synthetic coding sequence
  source 1..723: mol_type = other DNA
atgacctgcgcctacgcccccagcggcaacttcgtggcctgcggcggcttagacaacatttgttctatctatagcttaaaaactagagaaggcaacgtgcgggtgtcccgggagctgccaggtcacactggttatcttagttgttgtcggttcctcgacgataaccagataatcacctcgagcggtgacaccacatgtgccttgtgggacatagaaactggccagcagacagtgggcttcgccgggcactccggagacgtcatgtctttatctcttgctccggatggtcgtacctttgtgtcgggcgcctgtgacgcctcgatcaaactgtgggacgtgagagattcaatgtgccgacaaaccttcataggacacgagagcgacattaatgcagttgctttttttccaaatggttatgccttcacaaccggtagcgatgacgcgacttgccgactgttcgatctaagagcagaccaggagctgttgatgtacagtcatgataacattatatgcggaatcacctctgttgccttctcccggtccgggaggcttcttttggcaggttatgatgactttaactgtaatatatgggacgcgatgaagggggatcgggccggggtactggcaggacacgacaatcgagtaagttgtctgggcgtgactgacgacggaatggcggtcgccaccggcagctgggactcgtttctgaagatatggaattag

SEQ ID NO: 190080 - DNA, 699 bp, synthetic construct
  misc_feature 1..699: note = Description of Artificial Sequence: Synthetic coding sequence
  source 1..699: mol_type = other DNA
atgagcgagctggagcagctgcggcaggaggccgagcagctgcggaatcagatacgcgacgcccggaaggcctgtggagacagtacactaacacaaattaccgccggcctggaccccgtagggcgcatccagatgagaacccgccggacgctgagagggcatctggcgaaaatctatgcgatgcactggggcacagattcacggctgttggtctctgcatcgcaggacggtaaacttatcatctgggactcctacacaaccaataaagtacacgccataccgctcaggtctagctgggtgatgacatgtgcatacgccccttcagggaacttcgtcgcatgtggaggcctcgacaacatctgtagcatctattcactgaagaccagggagggaaatgttcgggtgtccagggaactgcccggccacacagggtatctgagttgttgccgcttcctggacgacaatcagattataacatcaagcggggatacgacctgtgcactctgggacattgaaaccggacaacagactgtagggttcgccggacacagtggggatgtgatgagcctgagtcttgcccccgacggccgcactttcgtcagcggcgcctgcgacgcatcgattaagctctgggatgtcagggattctatgtgtaggcagacctttattgggcacgaaagcgacattaatgccgtgtag

SEQ ID NO: 190081 - DNA, 891 bp, synthetic construct
  misc_feature 1..891: note = Description of Artificial Sequence: Synthetic coding sequence
  source 1..891: mol_type = other DNA
atgcggacccggcggaccctgcggggccacctggccaagatctacgctatgcactggggcactgatagcagacttttggtgtccgcaagccaagacggcaagctcattatctgggacagctataccaccaataaagtccatgctatccctttgcgctcatcctgggttatgacttgcgcctacgcccctagcggcaacttcgtagcatgtggcggcttagacaacatctgtagcatttactctttgaaaactcgggaagggaatgtgagggtgtcacgcgagttgcccgggcatactggatacctgagctgttgtagattcctcgacgacaaccagattattacatcttccggggacactacctgcgctctgtgggatatagaaacaggacaacagacagtggggtttgcggggcattcgggtgacgtgatgtctttgtccctagcccccgatggcaggacattcgtgtcaggtgcctgtgatgccagtatcaaactgtgggatgtcagggatagtatgtgtagacagacttttatcggacacgagtctgacatcaacgctgttgcttttttccccaacgggtacgccttcacaacgggtagcgatgatgctacctgccggctgtttgacctccgcgccgaccaagaacttctgatgtatagtcacgataatatcatctgtgggatcacatctgtcgccttttctcggtctggtcggctgcttcttgcgggctatgatgactttaactgcaatatttgggacgctatgaaaggcgaccgcgcgggggtgctggcgggccacgacaaccgggtctcgtgtctgggtgtgaccgacgatgggatggcagtggctactgggtcatgggacagcttcctgaaaatctggaattag

SEQ ID NO: 190082 - DNA, 756 bp, synthetic construct
  misc_feature 1..756: note = Description of Artificial Sequence: Synthetic coding sequence
  source 1..756: mol_type = other DNA
atgagcgagctggagcagctgcggcaggaggccgagcagctgcggaatcagatccgcgacgcccggaaagcatgcggagatagcaccctgacccagatcacagcaggacttgacccagtaggtaggattcagatgcgcactaggcggactctgcggggacacctggctaagatatacgcaatgcattggggcacagattcacgattgctagtgtctgccagccaggacggcaagctaattatctgggatagttatactacaaacaaagttcacgctatcccgctacggtcttcgtgggtaatgacttgcgcctatgcccccagcggcaattttgtagcctgtggaggactggataacatttgctccatatactctttgaaaacccgagagggaaatgtgagggtctctcgggagctgcctggccacactgggtatctgtcatgttgccgtttcctcgacgataatcaaatcataacctcatccggcgataccacttgtgctctgtgggacatcgagaccggacagcagactgttggtttcgcaggtcacagcggagacgtaatgtccttaagtcttgccccagacggtagaactttcgtttcgggagcatgtgatgcatccatcaaactgtgggacgtccgcgattccatgtgcagacagaccttcatcggacacgaatccgacattaatgctgtcgccttcttccctaatggctacgcttttactactggatcggatgacgctacttgtagatag

SEQ ID NO: 190083 - DNA, 828 bp, synthetic construct
  misc_feature 1..828: note = Description of Artificial Sequence: Synthetic coding sequence
  source 1..828: mol_type = other DNA
atgagcgccgaggtgaaggtgaccggccagaaccaggagcagttccttcttctggccaagtccgcaaaaggcgccgcattagctaccttgatccatcaggtcctggaggctccaggcgtatatgttttcggcgagcttcttgatatgcccaacgtgcgagaactcgctgaaagtgactttgcgagtaccttccgtctgttgacagtctttgcatatggaacctatgctgattacctcgcggaggcgaggaacctgcccccgctcactgaggcgcagaaaaataagctgcggcacctcagcgtggtcactctcgccgccaaggtcaagtgcataccgtacgctgttctgttagaagcactggcccttcgcaatgtgaggcagctcgaagacctggtcatcgaagccgtttacgccgatgtactccggggcagccttgatcagaggaatcagagattagaggttgactactcaataggcagggatattcagcggcaagatcttagtgccattgccaggaccctacaggagtggtgtgtgggctgcgaagtcgtccttagtgggattgaggaacaggtgagtcgcgccaaccagcataaagagcaacagctaggcctcaaacaacagatagagtccgaagttgctaacctgaaaaagacaatcaaggtgaccaccgccgcagcggcggctgctacctcacaggaccccgaacagcacctcaccgaattgcgcgaacccgcgccaggaactaatcagcgccagccgtctaagaaagcgtccaaaggaaagggacttagaggcagtgccaaaatatggagcaagtccaattag

SEQ ID NO: 190084 - DNA, 387 bp, synthetic construct
  misc_feature 1..387: note = Description of Artificial Sequence: Synthetic coding sequence
  source 1..387: mol_type = other DNA
atgaccagcctgttcgcccaggagatccggctgagcaagcggcacgaggagatagtgtcacagcgcctcatgttgctgcagcagatggaaaacaaactaggagaccagcacacagagaaagccagtcaactgcaaaccgttgagactgctttcaagagaaacctctcactgttaaaggatattgaagccgccgagaaaagcttgcagacgcgtatccatcccctgccgagaccagaagtggttagtcttgagacccgttattgggcatcagtggaggagtatattcccaaatgggaacagtttctgctgggaagagctccttatccatttgccgtagaaaaccagaacgaggccgaaaataccatccagaacgaagcccagagatag

SEQ ID NO: 190085 - DNA, 1023 bp, synthetic construct
  misc_feature 1..1023: note = Description of Artificial Sequence: Synthetic coding sequence
  source 1..1023: mol_type = other DNA
atgagcgagctggagcagctgcggcaggaggccgagcagctgcggaaccagattcaggacgcacgaaaagcttgcaacgacgcaactctggtgcaaattacaagcaatatggactccgtcggcagaattcagatgcgaactcgtaggactctgcgtggacatctggcgaaaatctacgctatgcattggggatatgatagccggctgctggtgtccgcttcacaggacgggaagctgattatctgggattcttacaccactaacaaaatgcacgcaatcccactacggtcttcttgggtcatgacctgtgcatacgctccctcaggcaattacgttgcctgtggcggcctggacaatatctgttccatttacaatctcaagacacgggaaggcaacgtacgagtctccagagaactgcccggccacacagggtacctcagctgctgccggttcctggacgattcacagattgttacttcaagcggagacacaacctgtgccctctgggacatagaaactgcccagcagactactacttttaccgggcactccggcgacgtcatgtcactgtccctgtcaccggacatgagaactttcgtcagcggagcatgtgatgcttcttcgaaactttgggacataagggacggcatgtgccgccagagctttaccggccacgtgagcgacataaatgccgtctcattcttccccaatggatacgcattcgctacagggtccgacgacgctacctgcagactattcgacttgagagctgatcaagaactgctgttatacagccacgacaacatcatctgcggcatcacctccgtggccttttccaagagcgggcgtctgcttttagcaggttacgatgattttaattgcaacgtctgggacacgctcaagggcgaccgggcaggtgtgttggctggccatgataacagggtctcttgcctgggtgtgactgacgatggcatggccgtggctacgggctcctgggactctttcctcaggatatggaattag

SEQ ID NO: 190086 - DNA, 240 bp, synthetic construct
  misc_feature 1..240: note = Description of Artificial Sequence: Synthetic coding sequence
  source 1..240: mol_type = other DNA
atgagcgagctggagcagctgcggcaggaggccgagcagctgcggaatcagatccaagacgctcgcaaagcatgtaacgacgcaacattggtccagatcacctctaatatggattcagtggggcgtatccagatgcgtactagacggacccttagaggccacctggccaagatctacgcaatgcattggggatacgactcacgccttcttgttagcgcgtctcaggatggtaagctctag

SEQ ID NO: 190087 - DNA, 204 bp, synthetic construct
  misc_feature 1..204: note = Description of Artificial Sequence: Synthetic coding sequence
  source 1..204: mol_type = other DNA
atggaggagtgggacgtgccccagatgaagaaggaggtggagagcttaaagtaccaactcgcctttcaaagagagatggcctccaaaacaattccagagctcctgaaatggattgaagatggaatccccaaagacccatttctgaaccctgacctgatgaagaataacccctgggttgagaaagggaagtgtactatactttag

SEQ ID NO: 190088 - DNA, 216 bp, synthetic construct
  misc_feature 1..216: note = Description of Artificial Sequence: Synthetic coding sequence
  source 1..216: mol_type = other DNA
atggccagcaacaacaccgccagcatcgcccaggcccggaagctggtcgaacaactgaagatggaagcaaacatagatcgaatcaaagtctctaaagccgctgctgacttgatggcatactgcgaagcccacgccaaggaagacccacttctgactccggtccctgcgtccgagaaccctttcagggagaaaaaatttttttgtgccattctttag

SEQ ID NO: 190089 - DNA, 309 bp, synthetic construct
  misc_feature 1..309: note = Description of Artificial Sequence: Synthetic coding sequence
  source 1..309: mol_type = other DNA
atgcagggcaagctgcagccccccatggagcgggaggcccgggacggggtgccgtccggaaaggtgtttttgaaggacctgtctagcactccaatggcatctaataacaccgcaagtatcgcccaggcacgcaaactggttgagcagctgaaaatggaagctaatattgatcgtattaaagtgagtaaagctgcggcggatctgatggcgtactgcgaagcccatgccaaggaggatcccttattgaccccagttccggcaagcgaaaacccatttagagaaaaaaagtttttctgtgcaatactgtag

SEQ ID NO: 190090 - DNA, 216 bp, synthetic construct
  misc_feature 1..216: note = Description of Artificial Sequence: Synthetic coding sequence
  source 1..216: mol_type = other DNA
atggccagcaacaacaccgccagcatcgcccaggcccggaagctggtcgaacagctcaagatggaggccaacatagacagaataaaagtgtcaaaagccgcagccgacctcatggcatattgtgaggctcacgccaaggaggacccgcttttgactcctgttccagcgagcgagaatccattcagagagaagaagtttttctgtgcgatcctatag

SEQ ID NO: 190091 - DNA, 216 bp, synthetic construct
  misc_feature 1..216: note = Description of Artificial Sequence: Synthetic coding sequence
  source 1..216: mol_type = other DNA
atggccagcaacaacaccgccagcatcgcccaggcccggaagctggttgagcagttgaagatggaagctaacattgaccggatcaaagtgtccaaggccgccgctgacctgatggcctactgcgaggcccacgcaaaggaggaccctcttctgacccccgtgcccgccagcgagaacccttttagagagaagaagtttttttgcgcaatactgtag

SEQ ID NO: 190092 - DNA, 216 bp, synthetic construct
  misc_feature 1..216: note = Description of Artificial Sequence: Synthetic coding sequence
  source 1..216: mol_type = other DNA
atggccagcaacaacaccgccagcatcgcccaggcccggaagctggtcgaacaattgaaaatggaagctaatatcgacaggatcaaagtgtcaaaggcagccgcagatctcatggcctattgcgaagcccacgccaaggaggacccacttctgaccccggtgcccgctagcgaaaaccccttccgcgaaaagaaattcttctgcgctattctgtag

SEQ ID NO: 190093 - DNA, 216 bp, synthetic construct
  misc_feature 1..216: note = Description of Artificial Sequence: Synthetic coding sequence
  source 1..216: mol_type = other DNA
atggccagcaacaacaccgccagcatcgcccaggcccggaagctggtggagcagctgaaaatggaggccaacattgaccggatcaaggtctccaaagccgccgccgacttaatggcctactgcgaggcacacgccaaggaagatcccctgctcacaccggtaccagcttcagagaaccccttccgggagaagaagttcttctgcgccatcctctag

SEQ ID NO: 190094 - DNA, 333 bp, synthetic construct
  misc_feature 1..333: note = Description of Artificial Sequence: Synthetic coding sequence
  source 1..333: mol_type = other DNA
atggtgtacctgcaggccaagacccggatccccgagcaccggaaggtgactcagctcattaaatgctggtccccggacctcaaccccgtgtttctcaaagacctctcaagcacccccatggccagcaataacaccgcatctatcgctcaggcacggaagctagtggaacagttgaagatggaggccaatatagaccgcattaaagtgtcaaaggcggctgccgatcttatggcatattgcgaagcccatgccaaggaagaccccctgcttacccctgtccctgcatccgaaaatccctttagagagaagaaattcttctgcgccatcctatag

SEQ ID NO: 190095 - DNA, 207 bp, synthetic construct
  misc_feature 1..207: note = Description of Artificial Sequence: Synthetic coding sequence
  source 1..207: mol_type = other DNA
atgagcggcagcagcagcgtggccgccatgaagaaggtggtgcagcagttgcggcttgaagccggactgaatcgggtgaaggtaagtcaggctgcagccgacttaaaacagttctgtctgcaaaatgcacagcatgatcccttactcaccggggtctcttcctccaccaatccattccggccgcagaaggtctgcagttttctatag

SEQ ID NO: 190096 - DNA, 207 bp, synthetic construct
  misc_feature 1..207: note = Description of Artificial Sequence: Synthetic coding sequence
  source 1..207: mol_type = other DNA
atgagcggcagcagcagcgtggccgccatgaagaaggtggtgcagcagctccggctggaggcagggttgaatagggtaaaagtttcacaggccgctgccgatcttaagcaattttgcctgcagaatgcccagcatgatcccttattaactggagtaagcagcagtacgaatcccttcagacctcaaaaggtctgcagcttcctgtag

SEQ ID NO: 190097 - DNA, 225 bp, synthetic construct
  misc_feature 1..225: note = Description of Artificial Sequence: Synthetic coding sequence
  source 1..225: mol_type = other DNA
atgcccgtgatcaacatcgaggacctgaccgagaaggacaagctgaagatggaggtggatcagttgaagaaagaagtcactcttgagcggatgcttgtgtcgaaatgttgcgaggaggtccgagactacgtagaagagcggtcaggagaggatcccttggtcaaagggatcccagaagacaagaacccgttcaaggaattgaaaggcggctgcgtgatcagttag

SEQ ID NO: 190098 - DNA, 225 bp, synthetic construct
  misc_feature 1..225: note = Description of Artificial Sequence: Synthetic coding sequence
  source 1..225: mol_type = other DNA
atgcccgtgatcaacatcgaggacctgaccgagaaggacaagctgaagatggaggtggatcagcttaagaaagaggtgacacttgagaggatgttggtcagcaagtgttgtgaagaagtgcgcgactacgtcgaagaacggtcaggtgaagaccctctcgtcaaagggatcccagaggacaaaaatccctttaaagagctcaagggcgggtgcgtcatttcttag

SEQ ID NO: 190099 - DNA, 210 bp, synthetic construct
  misc_feature 1..210: note = Description of Artificial Sequence: Synthetic coding sequence
  source 1..210: mol_type = other DNA
atggcccaggacctgagcgagaaggacctgctgaagatggaggtggagcagcttaaaaaagaagtgaagaatacacggatcccaatctccaaggccggcaaagaaattaaagagtacgtcgaggctcaggctggaaacgaccccttccttaaaggcatccccgaggacaagaatccatttaaggaaaagggagggtgtctgatatcatag

SEQ ID NO: 190100 - DNA, 210 bp, synthetic construct
  misc_feature 1..210: note = Description of Artificial Sequence: Synthetic coding sequence
  source 1..210: mol_type = other DNA
atggcccaggacctgagcgagaaggacctgctgaagatggaggtggagcaactgaaaaaagaggtcaagaatactcgcatcccaatctccaaagccgggaaggaaatcaaagaatacgtggaggctcaggccggtaacgatccattccttaaaggcatccctgaagacaaaaacccttttaaagagaaaggaggttgcctaatttcctag

SEQ ID NO: 190101 - DNA, 210 bp, synthetic construct
  misc_feature 1..210: note = Description of Artificial Sequence: Synthetic coding sequence
  source 1..210: mol_type = other DNA
atggcccaggacctgagcgagaaggacctgctgaagatggaggtggaacaattgaagaaagaagtgaaaaacacgcgcattcccatctctaaggctggcaaggagatcaaagagtacgttgaagcacaggcagggaatgatccgtttctaaaaggaatcccagaggataagaatccgtttaaggagaagggcggctgtctgatctcatag

SEQ ID NO: 190102 - DNA, 210 bp, synthetic construct
  misc_feature 1..210: note = Description of Artificial Sequence: Synthetic coding sequence
  source 1..210: mol_type = other DNA
atggcccaggacctgagcgagaaggacctgctgaagatggaggtggagcaactcaaaaaggaagtgaagaatactcgcatcccaatttctaaagcggggaaggagatcaaggagtatgtggaagctcaggctggcaacgaccctttcctgaagggaattcctgaggataaaaatcctttcaaggaaaaaggagggtgcctcatctcatag

SEQ ID NO: 190103 - DNA, 210 bp, synthetic construct
  misc_feature 1..210: note = Description of Artificial Sequence: Synthetic coding sequence
  source 1..210: mol_type = other DNA
atggcccaggacctgagcgagaaggacctgctgaagatggaggtggaacagttgaagaaggaagtgaagaacacccggatcccgattagcaaggccggaaaagagatcaaagagtatgttgaagctcaggctggtaacgacccattcctgaaagggatcccagaagataaaaatcctttcaaagagaagggggggtgtctgataagttag

SEQ ID NO: 190104 - DNA, 1080 bp, synthetic construct
  misc_feature 1..1080: note = Description of Artificial Sequence: Synthetic coding sequence
  source 1..1080: mol_type = other DNA
atgaccctggagagcatcatggcctgctgcctgagcgaggaggccaaggaggcaaggagaatcaacgatgagattgagcgacaattgagaagagataaacgagacgcacgtagggagttgaagttgctactcctgggaactggtgagagtgggaaatctacatttattaagcagatgcgaattattcatggaagcggatatagcgatgaggacaagagggggttcaccaaattggtataccagaatatttttacagctatgcaggccatgattcgtgccatggacaccctgaaaattccctataaatacgaacacaacaaggcacacgcacaactggtgagagaagtagatgttgaaaaagtctctgcttttgagaacccatatgtcgatgcgatcaaaagtctgtggaatgaccccggaatccaagagtgttacgacagaagaagggaataccagctgtcggactctacaaagtattacttgaatgatttggaccgagttgcggaccccgcctacctgcccacccagcaggatgttctccgagttcgggttcccaccaccggaatcattgaatacccctttgacctgcagagcgtgatcttccggatggttgatgttggaggccagagaagtgaaagacgcaaatggattcactgtttcgagaatgttaccagcataatgtttctcgttgcgctgtcggagtatgatcaagtgctagtggagtccgacaacgaaaataggatggaggaaagtaaggctctctttcgcacgataataacctatccttggtttcagaatagctcagttatactcttccttaacaaaaaggaccttctggaggagaagatcatgtattcccacctggtggattacttccctgagtacgatggacctcagagagacgcgcaagctgcgagggagttcatcctgaagatgttcgttgatctcaacccagattcagataagattatttatagtcatttcacttgtgccactgacacagaaaatatccggttcgtgtttgcagctgtgaaagacactattctccagcttaacctgaaagaatacaatttagtttag

SEQ ID NO: 190105 - DNA, 474 bp, synthetic construct
  misc_feature 1..474: note = Description of Artificial Sequence: Synthetic coding sequence
  source 1..474: mol_type = other DNA
atggtggacgtgggcggccagcggagcgagcggcggaagtggatccattgtttcgaaaatgtaacctctataatgtttcttgtggccctgtcagagtacgaccaagtcctagtggaatcggataatgaaaatcgtatggaagagtccaaggccctgtttagaactatcatcacctatccttggttccagaacagctccgtcatactgttcctcaacaaaaaagacctgctagaggagaagattatgtacagccacctggtggattattttcccgaatatgacggaccccagcgggatgcgcaagccgctcgcgaatttatcctgaaaatgttcgtggatctgaatccggattctgacaaaattatctacagccacttcacgtgtgctactgacaccgagaatatacgatttgttttcgccgcagtcaaggataccattctgcagctgaacttaaaagagtataacctggtctag

SEQ ID NO: 190106 - DNA, 513 bp, synthetic construct
  misc_feature 1..513: note = Description of Artificial Sequence: Synthetic coding sequence
  source 1..513: mol_type = other DNA
atgggcgagcggtgggccgacagccagctggacagccggagcacccacggaaccggcgagtccgggaagagtaccttcatcaaacagatgcgcataatacacgggtcaggctacagcgatgaggacaagagaggttttaccaaactggtttaccaaaacatcttcactgctatgcaagcaatgattagggccatggatacactgaaaatcccgtacaagtacgagcataacaaagcacacgcgcaacttgttagggaggtggacgtagagaaggtaagcgcctttgagaacccttatgttgatgccatcaagtccctgtggaatgaccctggcatccaggagtgctacgataggagaagggagtatcagttatcagattccacaaaatactatctgaatgacctggatcgtgtggccgaccctgcgtacctgccaacacagcaggatgtccttcgcgtgcgtgtccctactacaggtatcattgaatacccgttcgacctccagtcggtctag

SEQ ID NO: 190107 - DNA, 1824 bp, synthetic construct
  misc_feature 1..1824: note = Description of Artificial Sequence: Synthetic coding sequence
  source 1..1824: mol_type = other DNA
atgccccggaagaagcccttcagcgtgaagcagaagaagaagcagctgcaagacaagcgtgaaaggaaaagagggctccaagatgggctgaggagctcttccaatagcagatcaggcagccgggaaaggcgggaagagcagacagacaccagtgatggagagtccgttacccaccacatccgccggctgaaccaacagccatcacaggggctcgggccgcgcgggtacgatcccaatcgatatagattgcacttcgagcgcgactcacgggaggaggtcgagcggcggaaaagagctgccagagagcaggtgttacagccagtcagcgccgaactcttggagctcgatataagggaagtctaccagccgggttcagttctcgatttcccccgtcgcccgccttggtcctatgagatgtccaaagagcagctcatgtcccaggaggagagaagtttccaggattacctaggcaagatccatggcgcctattcatcggagaaattatcctatttcgaacacaacctggaaacatggaggcagctctggcgcgtgttagaaatgagtgatatcgtcctgctcatcactgatatccgtcacccagtggtcaactttccgcctgctctctacgagtacgtgaccggcgagctggggctggcactagttctcgttctcaataaagttgatctggcgccccctgccctcgtggtcgcgtggaaacactattttcaccagcactatccccagctgcatgtagtcctattcacttcctttcctagagatccaagaacaccccaggacccatcctctgttctgaaaaagtcccgccggaggggcaggggatggaccagagcactcgggccggaacagctgctgagggcgtgcgaagccattaccgtcgggaaggttgacttatcctcctggagggagaagatagcgcgggacgttgctggggccacatggggcaacgggagtggggaagaagaggaggaggaagacgggccagctgtgctggtggagcaacaaacggattcagctatggaacccacagggccgactcaggagaggtataaggacggggtggttacgattggatgcgtcgggtttcctaacgtgggcaagtctagcctgataaatggcctcgtgggtaggaaggtggtgtcagtttctagaacacctggccatacaaggtattttcagacgtactttctgactcctagcgttaaactctgtgattgtccagggctgatatttccctcattgcttccacgccagctgcaggtcctggcggggatctacccaattgcgcagattcaagagccatacaccgcagtggggtatctcgcgtcaaggattcccgtgcaagccctgctgcacctgcggcatcccgaagctgaagacccctcggctgaacatccttggtgcgcatgggacatctgtgaggcgtgggccgagaagagaggatacaaaacggccaaggccgccagaaacgatgtttaccgggccgctaatagtctgttgagacttgcagttgatggccgactgagcctgtgctttcatccccctggctactccgaacagaaaggcacctgggagagtcaccccgagaccacagagctggtggtgctccagggcagagtgggcccagccggtgacgaagaggaggaggaagaagaggagttgtccagttcctgcgaggaggagggcgaggaggatcgcgacgccgacgaggagggcgaaggtgacgaggagacccccaccagtgcccctgggtcctctctcgctggacggaacccatacgctctacttggtgaggacgagtgctag

SEQ ID NO: 190108 - DNA, 1224 bp, synthetic construct
  misc_feature 1..1224: note = Description of Artificial Sequence: Synthetic coding sequence
  source 1..1224: mol_type = other DNA
gtggtgaacttcccccccgccctgtacgagtacgtgaccggcgagttgggtctggcccttgtcctagttcttaacaaggtggacttagcaccgcccgctctcgttgttgcctggaaacactattttcatcaacattaccctcaactgcatgtggtcctcttcaccagttttcctcgcgaccccagaactcctcaggatccaagctcggttctgaaaaaatcaagaaggcggggccgcggctggacgagggccctgggaccagaacagcttctcagggcgtgcgaggctatcaccgtggggaaggtcgatctaagctcatggagggaaaaaattgcgcgcgatgttgctggagcaacctggggaaatggtagtggagaggaagaggaggaggaggacggtcccgctgtactcgtagaacagcagacagattccgccatggagcctaccggcccgacccaggaacgttacaaggatggcgttgtgaccattggctgcgtgggcttccctaatgtgggtaagtcctccctaatcaacggcctggtggggcggaaggtcgtctcagtttcccgcacacctggccacacgcgatactttcaaacttacttcctgactccttctgtaaaactttgtgattgtcccggtttgatcttcccttccctgttacctagacaactacaggtgcttgcagggatctaccccatcgcccaaattcaggaaccctatactgctgtcggctatcttgcctcccggatccctgtgcaggccctgctgcacctgcgtcaccctgaggctgaggatccaagtgcagagcacccctggtgtgcctgggacatatgtgaggcatgggccgagaaacggggatacaaaactgcgaaagccgccaggaatgacgtgtaccgcgcggccaattcccttttacgcctggctgtggacggacgtctgagcctttgtttccaccctccaggttactccgagcaaaaaggcacctgggagagccaccctgagacaaccgagcttgtggtcctacagggcagggttggacccgctggggatgaggaggaagaggaggaggaggaattgtcatcttcttgcgaagaggaaggtgaggaagatcgcgatgccgatgaggagggcgaaggggatgaggagacaccaacatctgctcctggttccagcttggcgggccggaatccttacgctctcctaggggaagacgaatgttag

SEQ ID NO: 190109 - DNA, 1824 bp, synthetic construct
  misc_feature 1..1824: note = Description of Artificial Sequence: Synthetic coding sequence
  source 1..1824: mol_type = other DNA
atgccccggaagaagcccttcagcgtgaagcagaagaagaagcagctgcaagataaaagggagcggaagcgcggcttacaggacgggctgagatcatctagcaattcccggtcgggcagtagggagaggcgggaggagcagactgacacgtcggacggcgaatcggtaactcaccacatccgccggctaaaccaacagccatcccaaggacttggacctagggggtacgatcccaaccggtaccgattgcacttcgagagagattctagagaggaagtggagagacggaagcgggcagccagggagcaggtgctacagcctgtgtctgctgaactgttggaacttgacatacgcgaggtctaccagcctgggtcagtcctggacttcccaaggcgcccgccctggtcttacgaaatgtccaaagagcaactgatgagtcaagaggagcgatcctttcaggactacctaggaaaaatccacggagcatattcttctgaaaagctgagctacttcgagcacaacctcgagacatggcgtcaactgtggagggtcctcgaaatgagcgatatcgttctgctcatcacagatatccgacaccctgtggtgaacttccctcctgctctctacgaatacgtaactggcgaactaggactagcgcttgtgctggtcctgaataaagtggacctagcgccacccgccctggttgtggcctggaaacactacttccatcagcactatccgcagctgcatgtcgtgctgttcacttccttccccagggacccacggactccccaagatccaagtagtgttctgaaaaagagccgccggaggggtaggggatggacacgcgccctgggccctgagcagttgttacgggcttgtgaagcaatcacggtcggtaaggtcgatctgagcagctggcgggaaaagatcgcaagagatgtggctggggctacttggggaaacggatccggcgaggaggaagaagaggaggatgggccagccgtgctggtcgagcaacagaccgactcggcaatggagcccactggaccaacccaagagcgctacaaagacggggtcgtgacgatcggatgcgtggggttccctaatgtgggcaaatctagtttgattaacggcctggttggtagaaaggtagtatccgttagtcgcacccccgggcacactcgctattttcagacgtactttctcacacctagtgttaagctgtgcgactgtccggggttgatttttccttcattgctcccgaggcagctccaggtgctcgctggaatataccctattgcacaaattcaggaaccatacacggcagtggggtatctggcctcgagaatccccgtccaagctctgctgcacttaaggcatcccgaggctgaggatccttctgctgaacacccatggtgtgcctgggatatctgcgaggcatgggccgagaaaaggggctacaaaaccgccaaagcagccaggaacgacgtctatagggccgctaacagtctgctacgattagccgtagacggtcggctgtcgttgtgctttcaccccccagggtatagcgaacagaagggcacctgggagagtcatcctgagaccacggaacttgtcgtccttcaaggaagggtgggtcctgccggcgacgaggaagaagaagaggaagaagaactctcctcctcgtgcgaagaagagggcgaggaagatcgggatgccgacgaggagggcgaaggcgatgaggagacacctacctccgcacccggcagttctctagctggccgcaatccatatgcactcctcggagaggacgagtgctag

SEQ ID NO: 190110 - DNA, 795 bp, synthetic construct
  misc_feature 1..795: note = Description of Artificial Sequence: Synthetic coding sequence
  source 1..795: mol_type = other DNA
atgggcgagcgggtgctgtggcccctgcgggccggccagcactggcgacaccgcccacttcctgctggacttcaggacggactccgcagttccagcaatagcaggtccggatcccgagagagaagggaggagcagaccgatacaagtgatggggagtccgtcacccaccatatccggcgactgaatcagcagccatcacaagggctcggccctcgtgggtatgacccaaaccggtataggcttcacttcgaacgggacagccgcgaggaagtggaaaggcggaagcgcgctgcaagagagcaggtcctccaacccgtttctgcagaactgctggaactcgacattagagaagtgtaccagcctggtagcgtgctcgacttccctcgacgacccccttggagctacgagatgtcaaaggaacagctgatgagtcaggaagagcgctccttccaagattatcttggcaagattcacggagcctattcttcagaaaaactgtcatattttgaacacaacttggagacatggcggcagctctggcgagtgctcgaaatgtcagatattgtgctgctcattaccgacatcaggcacccagtcgtaaactttccacctgccctgtacgaatacgtgaccggcgaactcggactggccctggtgctggtccttaacaaagtcgatctggcgcctccagctttggttgttgcttggaagcattacttccaccagcactacccacagctccacgttgtactctttacaagcttccccagggatccgagaacgccgcaggattag

SEQ ID NO: 190111 - DNA, 1824 bp, synthetic construct
  misc_feature 1..1824: note = Description of Artificial Sequence: Synthetic coding sequence
  source 1..1824: mol_type = other DNA
atgccccggaagaagcccttcagcgtgaagcagaagaagaagcagctgcaagacaagagggagcgcaagcgagggctccaggacggacttcgttcttcttccaactcccggtccggcagccgcgagaggcgggaggaacaaactgatactagtgatggtgaatcagtaactcatcacattagaaggctgaaccagcaaccttcacagggcctggggccacggggttatgacccaaatcgctatcgtctgcacttcgaaagggactctagggaagaagttgagagaaggaaacgggcagctagggagcaggttctccagcccgtgtccgcagaactgctcgagttggacataagagaggtctaccagcctggctcggtgttagacttcccgaggcggcctccgtggagctacgagatgagcaaggagcagctgatgtcccaggaagaaaggtccttccaggactacttaggtaagattcacggcgcctatagctcagagaagctaagctacttcgagcacaatctggagacctggaggcaactttggagggtcctggaaatgtcagatattgttttgctgataacagatatccgccacccggtggtgaactttcctccagccctgtatgagtacgtaaccggggagcttggactcgctttggtcctcgtcctgaacaaagtggatttagcccctcctgcgcttgttgtggcctggaagcactacttccaccagcattatccacagctgcacgtcgtgctgttcacctcctttcctcgggatcctcggacccctcaggatccctcctcagttctgaagaagtctcgccgacgaggccgcgggtggactcgggccttgggcccggagcagctgttacgcgcgtgtgaggctataactgtgggaaaggtcgatctgtcatcttggcgagagaagatcgccagggatgtggcgggcgccacttggggaaatggaagcggcgaagaagaggaggaggaggacgggccagccgtgttggtggagcaacagactgatagtgcaatggaaccaacagggccaacccaggaaagatacaaagatggcgtggtaaccataggatgtgtcggatttcctaatgttggcaaaagcagtctgatcaacgggctcgtggggcgcaaggtcgtgagcgttagccggactcccggacatacaaggtactttcagacctactttctgaccccctccgtgaaactgtgcgattgccccggcctaatatttccctccctcctgcctcgccagttacaagttctggctggcatttatccaatcgcacagattcaggaaccctatacggccgttggctacctggccagccgaattccggtgcaggccctacttcaccttagacaccccgaagcggaggacccctcggccgagcatccctggtgcgcgtgggacatctgcgaagcgtgggccgaaaagaggggatataagacggcgaaggctgcaaggaacgatgtgtatcgtgcggccaatagcttgttaagactggcagttgacgggaggctctctctctgttttcaccccccgggatactcagagcagaagggcacctgggagagtcaccctgagacgactgaactggtggtcctgcagggcagggtgggtccagccggagacgaggaagaagaggaggaggaagagctgtccagctcctgcgaagaagagggtgaggaggaccgtgacgctgacgaagagggcgaaggcgacgaggaaacacctacttccgctccaggttcctccctcgccgggcgcaacccatatgctctcctgggtgaagacgagtgttag

SEQ ID NO: 190112 - DNA, 1290 bp, synthetic construct
  misc_feature 1..1290: note = Description of Artificial Sequence: Synthetic coding sequence
  source 1..1290: mol_type = other DNA
atggaggccgccgtggtgctggagatgagcgacatcgtgctgctgatcacagatattcggcatcccgtggttaattttcccccagcattatacgagtacgttactggcgaacttggattagccctggtattggtgctgaataaagtggatctggcccctccagccctggtcgtagcctggaagcactactttcatcagcattacccacaacttcacgtagtgctgttcacatctttcccaagagatcctcggacgccacaggatccttctagtgtgcttaaaaaatctaggaggcgggggagaggatggactcgcgcgcttggtcccgagcagttgctcagggcttgcgaagctattacagtgggaaaagttgaccttagttcttggcgagaaaaaatcgcaagggacgtagccggggctacctggggaaacggatccggcgaagaggaggaagaagaagacggcccagcagtactggtcgagcagcagacagactccgccatggagccaacaggaccaacccaagagaggtacaaggatggtgtcgtgactatagggtgtgttggcttcccaaatgtcgggaaaagcagcctcatcaacgggttggtgggcagaaaggttgtatccgtgagccgcacacctggacacactcgttacttccagacatatttcctaacaccctcggtcaagttgtgcgattgccctggacttatctttccttcactgttgcctagacagcttcaggtgctcgctggaatttatccgattgcccagattcaagaaccctataccgccgtgggctacctcgccagccgcatccctgtccaggccctgctccatctgcgccacccggaagctgaggacccttccgctgagcacccttggtgcgcatgggacatttgcgaagcttgggctgaaaagcgcgggtataagaccgccaaggctgccaggaacgacgtctaccgcgcggctaacagtttgttaaggctggccgtagacggccgcctctctctctgctttcaccctcctgggtactcagagcagaagggaacctgggaaagtcatcccgagacgactgagttggtggtgctccaggggagggtggggcctgccggcgacgaagaagaggaggaggaggaagagctctcaagctcttgtgaagaggaaggcgaagaagatagggatgctgacgaagagggagaaggcgacgaagaaacccctacctcagcccctgggtcctctctggccggccgaaacccgtacgccctcctgggcgaggatgagtgctag

SEQ ID NO: 190113 - DNA, 1824 bp, synthetic construct
  misc_feature 1..1824: note = Description of Artificial Sequence: Synthetic coding sequence
  source 1..1824: mol_type = other DNA
atgccccggaagaagcccttcagcgtgaagcagaagaagaagcagctgcaggacaagagggagcgaaagcggggattgcaggatggactcaggagctctagtaactcacgctccgggagtcgagagaggagagaagagcagactgatacaagtgacggggagagcgtgactcaccatatccggagactcaatcaacagcctagtcagggactcggcccccgggggtacgacccaaacaggtatagactccactttgaacgcgattctcgagaggaggtggaacgcaggaagagagccgcgcgcgaacaagtgctacagcccgtgtccgccgagctgctcgaactagatattcgggaagtttaccagcccggctcagtactggacttcccaagaaggcctccctggtcttacgagatgtctaaggagcagctgatgagccaagaggagcggtccttccaagattatctcggcaagatccatggcgcttattcatcagaaaagctaagctacttcgaacataacttggagacatggcgccaattatggcgagtgctggaaatgagtgacatcgtgctcttaatcaccgacattaggcatccggtcgttaacttcccgcctgctctttatgaatacgttacaggcgagttgggcctggctctcgttctggtgttgaacaaagttgatcttgcaccccccgccctagtagtcgcatggaaacactactttcaccaacactaccctcagctgcacgtggtcctgttcacctctttccccagagatcccaggacgcctcaggatccctcatctgtcctgaaaaaatcgagacggagaggtcggggttggacaagggcactggggcccgagcaactgctccgggcgtgtgaagccatcaccgtgggaaaggtggatctgtcaagctggagagagaagatcgcccgagatgtggcaggtgccacttgggggaacgggagtggtgaggaggaggaggaggaggacgggccagcggtgctggtagaacagcaaactgactccgcaatggagccaactggccctacccaggagcggtataaggatggcgtggttactatcggatgcgtggggtttccaaacgtgggaaagtccagcttgattaacggcctggttggtcgcaaagtcgtcagcgtgtccaggacccctggacacacacgctactttcagacatatttcttaactccatctgtcaaattgtgcgactgtcccgggcttatctttccgtccctgctccctaggcagttgcaggtgctcgcaggcatttacccaatcgcccagattcaggaaccgtatactgccgtcgggtatctcgcctcaaggattcctgtccaggcactcctgcatctacggcatccagaggccgaggaccccagcgctgaacacccctggtgcgcttgggacatatgtgaagcgtgggccgagaaacgaggatacaagaccgcaaaagccgcacgcaacgacgtgtacagggccgccaactctctactccgactggccgtcgacggacgcttatctttatgtttccatcccccaggttactccgaacagaaggggacatgggagtcccaccctgaaacgaccgagctcgtggtccttcaagggagagtgggccccgctggtgacgaagaggaggaagaggaagaagagctgtcatcgagctgcgaagaagagggtgaagaagacagggacgcagacgaagaaggcgagggcgacgaagaaacacccacatccgcgccaggatcatccttagccggccgtaacccctatgctctgctgggagaggatgagtgttag

SEQ ID NO: 190114 - DNA, 1215 bp, synthetic construct
  misc_feature 1..1215: note = Description of Artificial Sequence: Synthetic coding sequence
  source 1..1215: mol_type = other DNA
atgagcaaggagcagctgatgagccaggaggagcggagcttccaggattacctgggaaagatccatggagcgtactcatcagagaagctttcctatttcgaacataacctggagacatggcgacagttatggagggtgctggagatgtctgacatcgtgctgttaataaccgatatccggcaccctgtcgtgaattttccccctgccttgtacgaatatgtgaccggcgagctcgggctggccttagtgctcgtgttgaataaagtagatttagctccacccgccttggttgtcgcatggaagcattacttccatcagcactacccccagttacatgttgtcctctttacaagctttcccagggaccccagaacaccacaggaccccagtagcgtgctgaagaaatcaaggcgccgcggccgcggatggaccagagccctgggccccgaacaattgcttagagcctgtgaggcaatcactgtcgggaaggggtttcctaacgtgggtaagagtagcctcattaatggactcgttggcaggaaggtcgtgtctgtatcccgtacccctggccacactcgctactttcagacttacttcctgacgccctcagtaaagttgtgtgattgtcccggtctgatcttccctagcttgttgcccaggcagctgcaggtgctcgcaggtatctatccaatcgcacagatccaggaaccatatactgctgtggggtacctggctagccggatccccgtgcaggcattattacacttgaggcatcccgaagccgaagacccgagcgccgagcacccttggtgtgcatgggacatttgcgaggcctgggccgagaagcgggggtataaaacagctaaagccgcgaggaacgatgtctaccgcgctgctaacagccttctcagactggccgtcgacggtcgcctttccctgtgcttccaccctccaggctactctgagcaaaaaggaacgtgggaatctcacccggagacaaccgaacttgtggtccttcagggacgggtgggcccagccggagatgaggaggaggaggaggaggaagagttatcaagctcatgtgaagaagagggcgaggaagaccgggacgctgatgaggagggagaaggcgacgaagaaacgccaacttctgcgcccggaagctccctggccggtcggaatccttacgcactcttgggagaggatgagtgttag

SEQ ID NO: 190115 - DNA, 795 bp, synthetic construct
  misc_feature 1..795: note = Description of Artificial Sequence: Synthetic coding sequence
  source 1..795: mol_type = other DNA
atgggcgagcgggtgctgtggcccctgcgggccggccagcactggcgccacagaccgctccctgcaggactgcaggatggactgagatcaagcagcaattctagatccggctcccgcgaacgtagggaggaacagactgatacatcagacggagagtccgtgactcaccacatacgcagactgaaccaacagcctagtcagggattaggaccaagagggtacgaccctaaccgctatagactgcacttcgaacgagatagcagggaagaggtcgagcgacgaaaacgggcagccagagaacaggtgttgcaaccggtgtctgccgagctgttggaattggacattcgcgaagtctaccaacccgggagcgtgctggatttcccaagacgtccaccctggagctacgaaatgagcaaagagcagctgatgtcccaggaggagcgcagcttccaagactacttggggaagattcacggcgcttacagcagcgagaagctttcctacttcgaacacaatctggagacatggagacagctgtggagggtgttggaaatgagcgatattgtgctcctgataaccgatatacgtcaccccgtggtgaatttcccacctgcattgtatgagtatgtcaccggggagctgggccttgccttggtcctcgtgctgaacaaggtggatttagccccacctgccctggtggttgcttggaagcactacttccaccagcactacccacagctgcacgttgtgctctttacctcttttccacgggatcctcggacaccgcaggactag

SEQ ID NO: 190116 - DNA, 795 bp, synthetic construct
  misc_feature 1..795: note = Description of Artificial Sequence: Synthetic coding sequence
  source 1..795: mol_type = other DNA
atgggcgagcgggtgctgtggcccctgcgggccggccagcactggcgtcacagacccttaccagcaggccttcaggatggactgcgcagctcctcaaacagccgctccggatccagggaacggcgtgaggaacagacagatacttccgatggcgagtcagtgactcaccacattagacgcctcaatcagcagccatctcagggacttggtcccaggggatacgacccgaaccgatatagactgcacttcgagcgggactctagagaagaggtggagcgtagaaagagggccgctagagagcaggtgcttcagcccgtctctgctgagttgttggaacttgatataagggaggtctaccaaccaggaagcgtgctcgatttccctcgcagacccccttggtcctacgaaatgagcaaggaacagttaatgtcgcaagaagaacggtctttccaggactatctgggaaaaatacatggcgcctattcatccgaaaagctttcctattttgagcacaatctcgaaacgtggaggcagttatggcgagttctggaaatgtccgacatcgtgctactgatcaccgacataagacatccggtcgtcaattttcctcctgcattgtacgaatatgtgacgggtgaactgggtttggccctggtactcgtgctgaataaggtcgacttggcaccaccagctcttgtggtcgcttggaaacactacttccatcagcattacccgcagctgcacgtcgtgctgttcacgtcatttcccagggaccctcgcaccccccaggactag

SEQ ID NO: 190117 - DNA, 795 bp, synthetic construct
  misc_feature 1..795: note = Description of Artificial Sequence: Synthetic coding sequence
  source 1..795: mol_type = other DNA
atgggcgagcgggtgctgtggcccctgcgggccggccagcactggcggcaccgtcccctccccgcgggcttacaggatgggttacggagctcatcaaattctagaagtgggagcagagagcgccgggaagagcagactgacactagtgatggagagtccgtcactcaccacataagacggctgaatcagcaacccagccagggactgggacctagagggtacgacccaaatcggtatcgcttgcacttcgaacgagacagcagagaagaggtggaaagacgaaaacgtgccgctagagaacaagtgctgcagcctgtcagtgccgaactgctcgagctcgatatccgcgaagtctaccagcccggtagcgtgcttgattttccacgccgcccaccctggagctacgaaatgtccaaggaacagctgatgagccaggaagaacggtcgttccaggattacttgggcaagattcacggcgcctatagctccgaaaagctgtcatatttcgaacataatttggagacttggagacagctttggcgagtgttagaaatgagcgacatcgtgctcctgatcacggatattcggcaccctgttgtgaatttccctccagcactttacgaatacgtgaccggcgaactgggcctggcgctggtgctcgtgcttaataaagtggacctggccccaccggccctggtggtagcctggaaacactattttcaccagcactatccacagctgcacgttgtacttttcacttccttcccaagagatccaaggaccccacaagattag

SEQ ID NO: 190118 - DNA, 1824 bp, synthetic construct
  misc_feature 1..1824: note = Description of Artificial Sequence: Synthetic coding sequence
  source 1..1824: mol_type = other DNA
atgccccggaagaagcccttcagcgtgaagcagaagaagaagcagctgcaggataagagggagagaaaaaggggactgcaggacgggctgagatcctcatccaacagtcggagtgggtcgcgggagcggcgcgaggaacagaccgataccagtgatggtgaaagtgttacccaccacattcggagactgaaccaacaaccttcccagggcttagggcccagaggatacgaccccaatagatatcggctacactttgaacgagacagtcgggaagaagtagagaggcgtaaaagggcggctcgggagcaagtgttacaaccagtgagcgcagagctccttgagttagacatacgcgaagtctaccaacctgggtccgtcctggatttccctcgccgcccgccatggagctacgaaatgtctaaggagcaactaatgagtcaagaggagcggtcttttcaggactatctgggtaagatccatggagcttacagttctgagaagctctcttactttgagcacaatcttgaaacttggagacagctgtggagggttttggagatgagtgatatagtgttattaatcactgacataaggcaccccgtcgtgaactttcccccggccttatacgaatacgtcaccggggagctgggcttggcactggttctcgtgctgaataaggtggatttagccccgcccgcgctcgtggtggcctggaaacactacttccaccagcactaccctcagctgcacgttgtactctttacatcattcccacgggatccccgtacgccccaggatcctagtagcgttctgaaaaagagtaggaggagggggagagggtggacaagagccctggggcccgagcagctactgcgagcctgcgaggccataacggttggtaaggtggatctctcatcttggagggagaaaattgcaagagatgttgcgggagccacgtggggcaatggctccggcgaggaggaagaggaagaggacggacctgccgtgctggtggagcaacagaccgatagcgctatggaacctactggacctacacaggaacggtacaaggacggcgtggtgactattggttgtgtgggcttccctaatgtggggaagtccagtctcattaatggtctcgtcgggagaaaggtcgtcagcgtcagcagaactcccggtcacaccagatacttccagacatactttctaacaccctctgtaaaactgtgcgattgtcctggcttgatatttccgtctttgctacctcgccagcttcaggtgctggctggaatttatcctatcgctcagatccaggaaccttataccgcagtcggttaccttgcctcgcgtatccccgtacaagcactgctacaccttcgtcatcccgaagccgaggatcctagcgccgagcacccttggtgtgcttgggacatctgcgaggcttgggctgagaaaagggggtataagactgccaaagccgcccgcaatgatgtatatcgagcagctaactctcttctgcggctcgccgtagatggtcgcctgagcctgtgtttccacccgccaggctactcagagcaaaagggcacttgggagagccaccccgagactactgagctggtggtattgcaagggcgagtgggacccgccggggatgaagaagaagaagaggaggaggaactaagcagctcgtgtgaggaagaaggagaggaggaccgcgacgccgacgaagagggcgagggggacgaagagacgccaaccagtgcccctgggagtagtctcgcaggacgaaatccttacgccctgcttggcgaggacgaatgttag

SEQ ID NO: 190119 - DNA, 1824 bp, synthetic construct
  misc_feature 1..1824: note = Description of Artificial Sequence: Synthetic coding sequence
  source 1..1824: mol_type = other DNA
atgccccggaagaagcccttcagcgtgaagcagaagaagaagcagctgcaggacaaacgcgagcgaaagagaggtctgcaggatggcctaagatccagctctaattctaggagtggatctcgggagcggagggaggaacagacagatacaagcgacggcgaatctgtgactcatcatatccgaagactgaaccagcagccctctcagggtctgggccccagagggtacgacccaaaccgctataggctccattttgaaagggattctagagaagaagttgaaagacggaaacgtgctgcccgtgaacaggtgttgcagccagtgagcgcggagctccttgaattagatataagggaagtctatcagccgggcagcgttctggacttcccacgacggccaccatggtcctatgaaatgagcaaagaacagttgatgtctcaggaggagcggagtttccaagactacttgggaaaaatccacggggcctattcctccgaaaagctttcatactttgagcataacctggaaacttggagacagctctggagggtgttggaaatgtctgatatcgtcctcttaattacagacattcggcaccccgtggtgaacttccccccagccctatatgagtatgtgacaggcgaactgggcctggctcttgtgctagtgttgaataaagtggacttagccccacctgctctggtcgttgcttggaaacactacttccatcagcactacccacagctgcatgtcgtcctgttcaccagcttcccgagagatcctcggacaccccaggacccatccagtgtgcttaaaaagagccgcagacgtggaagagggtggaccagggcacttgggccagaacagcttcttcgcgcctgcgaggcaatcaccgtcggcaaggtggatctgtcctcctggagagagaagatagctcgggatgtggccggggcaacctggggcaacggtagcggagaggaggaagaagaggaggacggacccgccgtccttgtggaacagcagaccgattccgctatggagcctactggtccgacacaggagagatataaggacggtgtcgtgactatcgggtgtgtggggtttccaaatgtcggcaagagttccctgatcaatggcctggtgggtcgcaaggtagtatccgtctctcggacacctggacacactaggtacttccagacctactttctcaccccttccgttaaactgtgtgattgtcctggactcatcttcccatccctgctgccgagacagttgcaggtcctcgcgggtatttatccaatagctcagatccaagagccttacacggcagtaggctacttggcgtccagaatcccggtgcaagctcttctacatcttcggcatccagaagccgaagacccctcagctgagcatccctggtgcgcatgggatatttgcgaagcttgggcagagaaacgagggtacaagacagccaaagccgctagaaatgatgtctaccgagccgctaattcactgctgaggctcgctgttgacgggcgcttgagcctgtgttttcatccaccaggttactccgagcagaagggcacctgggaatcccatcctgaaactactgagctggtggtcctccagggacgggttggcccagccggcgacgaggaagaggaggaagaagaggaactgagtagcagctgtgaagaagaaggcgaggaggaccgtgatgccgatgaggaaggggagggcgacgaggagacccctacttcagcccctggctctagcttagcgggccgtaatccatatgctctgctgggagaagatgagtgctag

SEQ ID NO: 190120 - DNA, 795 bp, synthetic construct
  misc_feature 1..795: note = Description of Artificial Sequence: Synthetic coding sequence
  source 1..795: mol_type = other DNA
atgggcgagcgggtgctgtggcccctgcgggccggccagcactggcgacaccgaccattacccgctggcttgcaagacggactccggtctagctccaattcccgcagcgggtcgcgagaaaggcgcgaggaacagactgatacttccgacggcgaaagcgttacacaccatatcagacggctgaaccaacagccctcgcagggtctaggtccccggggttacgaccctaaccgctaccgcctgcacttcgaacgagattctcgagaggaggtcgagcggcgcaagcgtgccgctagagagcaggtactccagcccgtcagtgcagagttattggagctcgacatcagagaggtgtatcagcctggttctgtgctcgactttccgaggcgccccccctggtcctacgagatgtcaaaggaacagcttatgtcccaggaggagagatcatttcaagattatctcggcaaaattcatggagcctacagtagcgaaaagctgtcatacttcgagcataatttggagacctggcggcagctgtggcgggtgttagaaatgtctgatatagtcctgttaatcaccgatatcagacatccggtggtcaatttccctcctgccttgtacgagtatgtcactggcgagctgggcctcgcactcgtcctggtgcttaacaaagtggacttagcccctcctgccctcgtcgtggcctggaaacactactttcaccagcactacccccaattgcatgttgtcttgttcacaagcttcccccgcgacccaagaactccccaagactag

SEQ ID NO: 190121 - DNA, 795 bp, synthetic construct
  misc_feature 1..795: note = Description of Artificial Sequence: Synthetic coding sequence
  source 1..795: mol_type = other DNA
atgggcgagcgggtgctgtggcccctgcgggccggccagcactggaggcatcggcccctacctgctggactccaggatgggttaaggtcatcatccaactccaggtcaggaagccgagagcggcgcgaggagcagactgatacttctgacggggaatcagtaacacatcatatccgaaggctgaatcagcaacctagccaaggcctggggcctagaggctatgatccgaatcgttacaggcttcatttcgagagagattccagggaagaggtagagagaagaaaaagagcagctcgcgaacaggtgctccagccagtctctgccgaactgctcgaactagatattagagaagtgtaccaaccgggatcggttcttgacttcccgcgcaggccaccatggtcttacgaaatgtcaaaagagcagctgatgagtcaggaggaaaggagctttcaggattacctgggtaagattcacggggcttattcatccgagaaactgagctattttgagcacaatctcgagacgtggaggcaactgtggcgcgtgctcgagatgtccgatatcgttctcttgattactgatattcgacatccggtagtaaattttccacctgctctctacgaatacgtgaccggggagctgggcctggccttggttctggtcctcaacaaagtcgatcttgcaccacctgcactcgtggtggcctggaagcattactttcatcagcactatccccagttgcatgtagtgctatttacatcctttcccagagatccaaggactccccaggactag

SEQ ID NO: 190122 - DNA, 1824 bp, synthetic construct
  misc_feature 1..1824: note = Description of Artificial Sequence: Synthetic coding sequence
  source 1..1824: mol_type = other DNA
atgccccggaagaagcccttcagcgtgaagcagaagaagaagcagcttcaggataaaagggagcgcaagcgaggcctccaggacgggcttcggagttccagcaactcaaggtcaggctctcgcgagcgccgggaggagcagacagatacttccgatggagaatcagtaacgcatcatatccggagactgaaccaacagccctcgcagggcttaggacccaggggctatgatcccaataggtatcggttgcactttgagcgcgacagtcgagaggaggtcgaacgccgaaaacgggccgccagagagcaggtcctacagcctgtgagcgctgaactgctcgaacttgatatccgggaagtataccaacctggatcagttttggacttcccaaggagaccaccttggtcctatgaaatgagtaaggagcagctgatgtcccaagaagaacgcagctttcaggactatcttggcaaaattcatggagcctactcaagtgagaagctgagttacttcgaacacaatctggagacatggaggcagttgtggagagttctggaaatgagcgatattgtcctgctcattactgatatacgtcacccagttgttaatttcccaccagccttgtatgaatatgtaaccggagaactcgggctggccctcgtcttggtgctgaacaaagtggacctggctcctccggcgctagtcgtcgcatggaaacattacttccaccagcattacccacaactccacgtagtactcttcacaagcttcccgcgggaccccagaacaccacaggacccctcatctgtcctgaaaaagagccggcgccgcggtaggggctggaccagggctctaggccctgaacaattattgcgggcctgtgaagccatcacagtgggaaaagtggatctgtcctcctggcgggagaagatcgcccgcgacgttgccggcgcaacatgggggaacggatccggtgaggaggaagaagaggaagacgggccggccgtactcgtggagcagcagactgactctgctatggaaccaacaggccctactcaggaaagatacaaggacggagtcgtaactattggctgcgtcggtttccccaatgtcgggaagtcctcgctgataaatggactcgtaggccgtaaggtggtctccgtgagtagaacgcctggacatacccggtatttccaaacctactttcttacaccctccgtcaagctttgcgattgccccggactgatattcccctccctgctcccccgccaacttcaggtgctggcaggaatctaccctattgcacagatccaggagccgtacaccgccgttgggtacctcgcttctaggatcccagtccaagccctgcttcatctccgccatcccgaggccgaagacccaagcgctgaacacccttggtgcgcttgggacatttgcgaggcctgggctgaaaaacgcggctacaagacggcgaaggccgcgcgcaatgacgtgtatcgggcagccaattccctcctgcgcttggcagtcgatggtcgcctgagcctgtgctttcaccctcccggctacagcgaacaaaaaggaacttgggaatctcatccagagaccaccgaactggtggtcctgcaggggagagtcggcccagcaggggatgaggaggaggaagaagaagaggaactgtcttcatcttgcgaggaggagggcgaggaggatcgcgacgcagacgaggaaggcgagggcgatgaggagacacctactagcgctcccggcagttctttggccgggcggaatccctatgccctgcttggggaggacgaatgctag

SEQ ID NO: 190123 - DNA, 201 bp, synthetic construct
  misc_feature 1..201: note = Description of Artificial Sequence: Synthetic coding sequence
  source 1..201: mol_type = other DNA
gtggtgaacttcccccccgccctgtacgagtacgtgaccggcgagctcggattggccctggtgctggtgctgaacaaggtggaccttgctcctccagcactggtcgtggcttggaagcattatttccaccagcactacccccagttgcacgtggtattgttcaccagttttccccgggaccccagaaccccccaggactag

SEQ ID NO: 190124 - DNA, 795 bp, synthetic construct
  misc_feature 1..795: note = Description of Artificial Sequence: Synthetic coding sequence
  source 1..795: mol_type = other DNA
atgggcgagcgggtgctgtggcccctgcgggccggccagcactggcgccaccgacccttgccagccgggttgcaggatgggctgcggagctcttccaatagcaggagcggcagccgcgagcggcgagaggagcaaactgatacgagtgacggcgaaagtgtaacacaccatattcggcggttgaaccagcaaccgtctcaaggcctggggcccagaggctacgaccccaacaggtataggctccactttgaacgggactcccgggaggaggtggaacgacgtaaacgtgccgcccgcgaacaggtacttcagccggtctcagccgagctactagaactcgacatccgggaggtgtatcaacccggttccgttctggactttccccggcgaccgccttggagttacgaaatgagtaaagagcagctgatgtcccaagaagagagatcctttcaggactatctgggcaaaatacacggcgcatactcaagcgagaaactttcctactttgagcacaacctggaaacttggaggcagctttggagagtgctggagatgtcggatatagtcttattaatcactgatattaggcaccctgtcgtgaatttccccccggccctgtacgaatatgttacaggagaactgggtttggctctggttctggttctgaataaggtggacctggctccccctgcacttgtggtagcctggaagcactacttccatcagcattatcctcagctccatgtggtccttttcacatcctttccccgagacccgagaacaccccaggattag

SEQ ID NO: 190125 - DNA, 1215 bp, synthetic construct
  misc_feature 1..1215: note = Description of Artificial Sequence: Synthetic coding sequence
  source 1..1215: mol_type = other DNA
atgagcaaggagcagctgatgagccaggaggagcggagcttccaggattatctggggaagatacacggtgcatactctagcgaaaagctgagttattttgagcataatctggagacctggcgtcaattgtggcgcgtcctggaaatgtcagatattgtcctgctcatcacagacatccggcatccagtggttaattttccgccggcactatatgaatacgtgactggcgaactgggcctcgcccttgttctagtgctcaataaagtcgatttggctccgcctgccctcgtagtcgcttggaaacattacttccaccagcattaccctcagcttcatgttgtgctttttacatcctttcctcgcgaccctcgcacccctcaagatccctcaagcgtcctgaagaagtcgcgcaggagaggcaggggctggactagagcattgggcccagaacaactcctccgggcctgcgaggctatcaccgtgggtaagggcttcccaaacgttggcaagtcaagccttatcaatggactggttgggcgtaaggtggtcagtgtctcccggacccctgggcacacccgatacttccagacctattttctgacgcctagtgttaaattatgcgattgccccggtctgatctttccatccctgttacctaggcagttgcaggtgctcgccggcatctatcccatagcccagatccaagagccgtacaccgctgttggttatttggcctctcgcatcccagttcaagcactcctgcacttaaggcacccagaggcagaagacccgtcggcggagcatccatggtgcgcctgggatatttgcgaggcttgggccgaaaagagaggctataagactgctaaagccgcccgcaacgatgtgtaccgggccgccaactccctgcttagacttgctgttgatggccgcctgagcctctgttttcatccacctggctattctgagcaaaaaggtacttgggagtcccatcccgaaactacagaactggtcgtgttgcaggggcgtgtcggacctgccggagatgaggaggaggaagaggaggaagaattatcctccagttgtgaagaggagggcgaggaagaccgcgatgccgacgaggagggcgagggcgatgaggagacgccaaccagcgctccaggtagctctcttgctggtaggaacccctatgcactgctgggagaagatgagtgctag

SEQ ID NO: 190126 - DNA, 789 bp, synthetic construct
  misc_feature 1..789: note = Description of Artificial Sequence: Synthetic coding sequence
  source 1..789: mol_type = other DNA
atggagcccaccggccccacccaggagcggtacaaggacggcgtggttaccataggatgcgtcggctttcccaatgtcggcaagtctagcttgatcaatggactggtgggcagaaaagtcgtctccgtgtctcgtaccccgggccacaccagatactttcagacttacttcctgactcccagcgtcaagctttgtgattgccctggattaatcttcccttccctgcttccaagacagttacaagttctggccgggatttatccaattgcgcaaatccaggaaccatacacagccgtaggatatctcgcatccaggatcccagtgcaggccctgttgcaccttcggcacccggaggctgaggatccaagcgctgagcatccatggtgtgcctgggatatttgcgaggcatgggcagagaaaaggggatacaagacagcgaaggccgcaagaaacgatgtgtatagagccgctaattctctgctgaggctggcagtggacggtagactcagtttgtgctttcatccccccggatattcagaacagaaaggcacatgggagtcgcatccagagacgactgagctcgtggttctacaaggacgtgtcggacctgccggagatgaggaggaagaggaagaggaagaattaagcagctcctgtgaggaggaaggggaagaggatcgcgacgcggatgaagagggcgaaggcgacgaggagacccccaccagcgcccctggaagcagtctcgccggaaggaacccttacgcacttctcggagaggatgagtgctag

SEQ ID NO: 190127 - DNA, 789 bp, synthetic construct
  misc_feature 1..789: note = Description of Artificial Sequence: Synthetic coding sequence
  source 1..789: mol_type = other DNA
atggagcccaccggccccacccaggagcggtacaaggacggcgtggtgactatagggtgcgtcgggttccccaacgtcggaaaatctagtctaatcaacggactcgtggggcgtaaagtggtctctgtgtctagaactccaggacacacacggtacttccagacctactttctgactccttccgtcaagctgtgtgactgcccaggactcatctttccttcgctgctgccacgccagctccaggtactcgccggaatataccctattgcacagatccaggagccgtacacggccgtcggttacctggcttctcgtatacctgtgcaagccttgttgcacctccgtcaccctgaagcagaggacccatccgcagaacacccttggtgcgcctgggacatctgtgaggcttgggccgagaagcgtggttataagaccgctaaggcagctagaaacgacgtctatcgagcagctaattctttactcagactcgcggtagacggacggctgtcactttgcttccacccgcccggttatagtgagcagaagggtacttgggaaagtcatccagaaaccacagagttggtcgtcttgcaggggcgcgtcggccctgccggggacgaggaggaggaggaagaggaggaactaagctcgtcttgcgaagaggagggggaagaagatagggatgcagacgaagagggcgaaggcgacgaggaaacacccaccagcgcacccgggagctctttagccggacggaacccatacgccctgcttggcgaagatgaatgctag

SEQ ID NO: 190128 - DNA, 1290 bp, synthetic construct
  misc_feature 1..1290: note = Description of Artificial Sequence: Synthetic coding sequence
  source 1..1290: mol_type = other DNA
atggaggccgccgtggtgctggagatgagcgacatcgtgctgctgattaccgatatccggcatcccgtcgtgaactttccccccgcactctacgagtatgtgacaggcgaactgggcctcgcactggttcttgtgctgaataaagtggacctggcgccaccagctctggttgttgcatggaagcattacttccatcagcattatcctcaattgcacgtagtcctgtttacctcatttccgcgagacccccgaacaccccaggacccctccagcgtactaaaaaagagccgcagacgcggcagggggtggacaagagccctgggacctgaacagctactgagagcatgcgaagccatcaccgtcgggaaggtagatctgtcatcctggagagagaaaattgcacgggatgttgctggcgccacctggggtaatggatctggtgaggaggaggaggaagaggatggcccagcagtgctcgtagaacagcaaactgactcggccatggaaccaaccggaccgacccaggagcggtataaagatggcgtggtgacgatcggctgcgtgggttttccgaacgttggaaaatccagcctgatcaacggcctggtcggacggaaggtcgtgtctgtgtcacggacaccaggacacaccaggtattttcagacatacttccttacaccttccgtgaagctctgcgactgccctggactcatattcccatctctgctacccaggcaactccaggtgctcgctggtatttaccccattgctcagatccaagaaccttatacagctgttggatacctcgcaagccgtattccggtgcaggccctgctgcatctgaggcaccctgaggcagaggatcccagcgctgagcatccatggtgtgcgtgggacatctgtgaggcctgggcagagaagcggggctataagaccgcgaaggctgcacggaacgatgtgtacagggccgccaattccctcctgagacttgcagtggatggacggctttcactctgcttccacccacctgggtactcagagcagaagggcacatgggaaagccacccggagactactgagcttgtcgttctacagggacgagtgggtcccgcaggcgacgaggaggaggaagaggaggaggaactttccagctcatgcgaagaggaaggagaggaagatagagatgcagatgaggaaggtgaaggagacgaggaaaccccaacatccgcccctggaagctccctggctggtaggaacccatacgccctcctgggcgaagatgagtgctag

SEQ ID NO: 190129 - DNA, 1215 bp, synthetic construct
  misc_feature 1..1215: note = Description of Artificial Sequence: Synthetic coding sequence
  source 1..1215: mol_type = other DNA
atgagcaaggagcagctgatgagccaggaggagcggagcttccaggactatctaggaaagatccacggcgcttattcttccgagaaactgtcctattttgaacataaccttgagacctggcggcaactctggagagtgttagagatgtccgatattgtcttgctgataactgacattcggcatcctgtcgtgaactttccacccgccctgtacgagtatgttaccggcgagttgggtttagctttagttctggttcttaataaagtcgacctcgctcctcctgcgctggtggtggcatggaaacactacttccatcagcattatcctcagctgcacgttgtgctgttcacttctttccctcgcgatcctcggaccccacaggatccttcctcagtgctgaaaaaatcccgacgacgcggccggggttggactagagcattaggacccgaacaacttctccgtgcgtgcgaagctataaccgtaggcaaggggtttccaaacgttggtaaaagtagtctgatcaatggacttgtcggaaggaaggttgtgagcgtgtccagaacgccaggtcataccaggtacttccaaacatacttcctgacgcccagtgtgaaactgtgtgactgtcctggcctgatctttccgtcgctgctaccaaggcaactgcaggtcttggctggaatctacccgatcgcgcagatacaggaaccttacactgccgtcggatatctggcatcccggattcccgttcaggctctcctacaccttcggcatcccgaggcagaggatccttctgccgaacacccatggtgcgcctgggacatctgtgaagcttgggccgagaaacggggttacaagacagctaaagcagcaaggaacgacgtgtatagggcagccaatagtctgcttcgtttggcagttgacgggcggcttagcctgtgcttccatcccccaggctattccgagcagaaaggcacctgggagtctcaccccgagaccacggagctggtcgtactgcaagggagagtgggccctgcaggggatgaagaggaggaggaagaggaggagctgtcttcatcttgcgaggaagaaggcgaagaggacagggatgccgatgaagaaggagagggagatgaagagacaccaaccagtgctcctggttcttctctcgccggcaggaatccttatgccctgctcggcgaagatgagtgttag

SEQ ID NO: 190130 - DNA, 1215 bp, synthetic construct
  misc_feature 1..1215: note = Description of Artificial Sequence: Synthetic coding sequence
  source 1..1215: mol_type = other DNA
atgagcaaggagcagctgatgagccaggaggagcggagcttccaggactatctgggtaagatacatggcgcctattcctccgaaaaactttcatactttgagcataacctggagacctggcggcagctctggagggtgctcgaaatgtccgatatcgtcctgctgatcacagacattcgtcacccagtggtaaactttccccctgccctgtacgaatacgtgaccggggaactcggtctggctttggtgctggtgctgaacaaagttgatctggctccacccgcattagttgtggcctggaagcattactttcaccagcattacccacagttgcatgtggtcttgtttacgtctttccccagagacccccggactccacaggatcccagttcagtgctaaagaaatctcggaggcggggacgcggatggacacgcgctctgggtcccgagcaactgcttagggcatgcgaagcaattactgttggtaaagggtttccaaatgtcggtaagtcctccctgattaacgggctggtcggcagaaaagtggtttctgtgtcgcgaaccccggggcacacccgatatttccagacttattttttaacgccctccgtcaaactctgtgactgccccggcctgatctttccgtccctgttaccgcgtcagcttcaggtgctggccggaatctaccctatcgcccaaatccaagaaccttataccgcggtgggctatctggcctccaggatccccgtgcaagcattgctccacctcaggcatcctgaggcagaggaccccagcgctgagcacccttggtgcgcttgggatatctgtgaggcatgggccgaaaaacggggatacaagactgccaaggccgcccgaaacgatgtataccgagctgctaattcactccttcgcctcgcggtagatgggagattgtccctctgctttcacccgccaggctattcagagcagaaaggcacatgggagtcccacccggagacaaccgagctcgtggtgctgcagggccgcgtgggaccagccggagacgaggaagaggaggaagaggaggagctgtccagttcttgcgaggaagagggcgaagaggaccgagacgctgacgaggaaggagagggggatgaggagaccccaacgtcagctccaggtagctctctggcgggaagaaacccatacgccctactgggggaggacgaatgctag

SEQ ID NO: 190131 - DNA, 789 bp, synthetic construct
  misc_feature 1..789: note = Description of Artificial Sequence: Synthetic coding sequence
  source 1..789: mol_type = other DNA
atggagcccaccggccccacccaggagcggtacaaggacggcgtggtgaccatcggttgtgtgggatttccaaacgtgggaaagtcatccctgatcaatgggctcgtcgggcggaaggtcgtctctgtgtctcgaactccagggcacactcgctacttccaaacttacttcttgactccatctgtgaaactctgcgactgtcccggcctcatcttcccgagtctgttgccccggcagctgcaggtgctggccgggatttaccctatcgcgcagattcaggagccatatacagcagttggatatctagcctccaggatacctgtgcaggccctgctgcacctgaggcaccccgaggctgaggaccctagtgccgaacacccatggtgtgcatgggatatctgcgaggcttgggcagagaagcgcggatacaaaaccgccaaagcggccagaaacgacgtttatagagctgcaaatagcttattacgtcttgcagtcgacggacgcctgagtctgtgttttcatcctcctggatatagcgagcagaagggcacgtgggagtcacacccggagacaaccgagctggtggtgcttcagggaagggtgggtccagcaggagacgaagaggaagaagaggaggaagagctgagctcaagctgcgaagaggaaggcgaagaggacagggatgcagatgaggagggcgaaggagacgaggaaacgcccacctccgctccagggtcgtcgctcgctggccggaacccttatgccctgctgggcgaggacgagtgctag

SEQ ID NO: 190132 - DNA, 1290 bp, synthetic construct
  misc_feature 1..1290: note = Description of Artificial Sequence: Synthetic coding sequence
  source 1..1290: mol_type = other DNA
atggaggccgccgtggtgctggagatgagcgacatcgtgctgctgatcacggatatcagacaccccgtagtgaattttcctccggctttgtatgaatacgtgacaggagagctaggtctggcgctggtgctggtgctgaataaagtggacctcgccccgcctgctctcgtagtcgcgtggaaacactattttcaccagcactatccccaactgcatgtggtgttgtttacttcctttcccagagatccgcgcacgccccaagacccgagctccgtgcttaaaaaaagtagacggcggggccgcggctggaccagagcactgggtcccgaacagctccttagagcctgtgaagccattacagtggggaaggtggatctttctagctggagagaaaagatagcccgtgacgtggcaggcgcaacctgggggaacggatccggcgaggaagaggaggaggaagacggtccagcagtgctggtggaacagcaaactgactcagctatggagcctaccggtcccactcaggagcgctacaaagacggtgtcgtaacaattggatgcgtgggctttcccaatgtcggaaagtcaagcctgattaatgggttagtcggcagaaaagtggtgagcgtgtcaagaactccgggtcatacacggtactttcaaacttacttccttaccccttccgtgaaactgtgcgattgtcccggcctgatattcccatcactcttaccacggcagcttcaagtgttggccggtatctaccctatcgctcagattcaggagccgtacaccgctgtggggtacttagcgtctcgcattcccgtccaggctctgctgcacctgagacaccccgaagcggaggacccaagtgccgaacatccctggtgtgcttgggatatctgtgaggcatgggctgaaaaaaggggatataaaaccgccaaagctgcacgcaacgatgtgtaccgcgcagcaaattcactgctcagactcgctgtcgacgggcgcttgtctctctgctttcaccccccaggttactccgagcagaagggaacctgggaaagccatcccgagactacagaactggtggtgcttcagggcagagtcggacccgcaggagacgaggaggaggaagaggaagaggagctgtcgtcctcttgtgaggaggaaggcgaagaggatagagacgccgacgaagagggtgagggcgatgaggagacaccaacatcagcaccagggtcttcgctcgcgggtcgcaacccctacgccctcttgggagaggatgagtgctag

SEQ ID NO: 190133 - DNA, 1290 bp, synthetic construct
  misc_feature 1..1290: note = Description of Artificial Sequence: Synthetic coding sequence
  source 1..1290: mol_type = other DNA
atggaggccgccgtggtgctggagatgagcgacatcgtgctgctgattactgatatcaggcatcctgtggtcaacttccctccagctttatacgaatatgtgaccggtgagctgggtttggcccttgtgctagtccttaataaggtcgacctggcgcctcctgcactggtggtggcctggaagcactactttcatcagcactacccccaattgcatgttgtcctcttcacttcattcccgagggatccgaggacacctcaagacccatcttctgtactgaagaagtctcgacggagagggcgcgggtggacacgggcgctcgggcctgaacaattactgagggcctgcgaggccataacagttgggaaagtcgaccttagttcctggagggaaaagatcgcccgggatgtggccggggctacttggggcaacgggtcgggagaagaggaggaggaagaggatggcccggcagttctcgtggagcagcagacagacagcgctatggaacctaccggccctacccaggaacgctacaaagatggagtggtgaccatcggatgtgtgggttttccaaatgtagggaagagtagcttgattaatggactggtgggtcggaaggttgtgtccgtctccaggactcccggacatactcgctattttcagacttattttctgacccccagtgtgaaactgtgcgactgcccggggctcatcttcccttctttattaccgcgtcaactgcaggtgctggccgggatctacccaatcgcacaaatccaggaaccttataccgccgtcggatacctggcttcgaggattcccgtgcaggcccttttacatctgcggcacccagaagcggaggaccctagtgcagagcatccatggtgcgcttgggacatatgtgaggcatgggcggaaaaacgggggtataagaccgccaaggccgctcggaatgatgtctacagggctgccaattctctgctccgcttagctgtggacggacgcctctctctgtgcttccaccctccgggctactcagaacagaagggtacttgggaaagccatcccgagactaccgagctcgtggttttacaaggcagggtgggacctgcaggcgacgaggaggaggaggaggaggaggagttgtcctcttcatgcgaagaagaaggcgaagaagatagggacgcagatgaagaaggggagggagatgaggagaccccaacctcggcccctgggagcagtctggctggaaggaacccctacgccttgctgggcgaggacgagtgttag

SEQ ID NO: 190134 - DNA, 789 bp, synthetic construct
  misc_feature 1..789: note = Description of Artificial Sequence: Synthetic coding sequence
  source 1..789: mol_type = other DNA
atggagcccaccggccccacccaggagcggtacaaggacggcgtggtgaccatcggatgtgtgggatttcccaacgtcggaaagagctccttgattaacgggttggtcgggagaaaggtggtctcagtgtccagaacacctggacacacaagatactttcaaacctattttcttacccctagtgtgaagctttgtgactgtccaggactgatatttccaagcctcctgccgaggcagctacaggtgctggcggggatctaccctatcgcccaaatccaggaaccttacaccgcagtgggatacttggcatctagaattccagtgcaggctctgctccatctgagacacccagaggctgaagatccaagtgctgagcacccttggtgtgcctgggatatttgcgaagcttgggctgagaagcggggctataaaaccgcaaaagccgccagaaatgacgtttatcgggcagccaatagtctgttgagactggctgttgatgggcgtctgtcactctgcttccacccacccggatattccgaacagaaaggaacgtgggaatcccaccccgaaactacagagctcgttgtgctgcaggggagggtggggcctgcaggtgacgaggaggaagaggaggaggaggaactgtcttcctcctgtgaagaggaaggagaagaagatcgtgacgccgacgaggagggagaaggagacgaagagacccctaccagtgcccccgggtcttctttagctggacgcaacccatacgccttgctgggcgaagatgagtgctag

SEQ ID NO: 190135 - DNA, 1215 bp, synthetic construct
  misc_feature 1..1215: note = Description of Artificial Sequence: Synthetic coding sequence
  source 1..1215: mol_type = other DNA
atgagcaaggagcagctgatgagccaggaggagcggagcttccaggattatctggggaagatccacggcgcttactcatccgaaaaattgtcttactttgaacacaatctggaaacctggcggcagctttggcgagtgctggagatgagtgacatcgtgttgctcattaccgacatcagacacccagtggtaaattttccacctgcactttacgagtatgtcacaggagagcttggcctggcacttgttcttgttctgaacaaggtggacctcgcaccccccgcattggttgtggcttggaagcattacttccaccagcactacccccagcttcacgtggttctgttcacaagctttccccgtgatcctcggacccctcaggaccctagctcggtgttgaagaaatcccgtagacggggccgggggtggactcgagctctgggaccagaacaactcctgcgagcctgtgaggccataaccgttggcaagggcttcccaaacgttgggaagtctagcctgattaatgggttggtgggcaggaaggtggtcagcgtgtcgcgtacaccagggcacactcggtacttccagacatatttcctcacaccaagcgtgaagctgtgcgactgcccaggtttgattttcccctcccttctacctcgtcagctgcaagtgctggccgggatctaccccatcgcccagatacaggagccatataccgccgtcggttatttagcttcccgtattcctgtccaggccctgttacaccttaggcatcccgaagcagaagacccctctgccgagcacccctggtgtgcctgggacatttgtgaagcatgggctgagaagcggggatacaaaacagccaaagctgcgagaaacgacgtctaccgtgctgctaactcactcctgagactcgccgtggatggccgattgtcactgtgtttccatccaccaggatatagtgagcagaagggcacatgggaaagtcatcctgagaccactgaactcgtcgtgctgcaaggcagggtaggacctgcaggtgacgaggaggaggaagaggaggaggagctttccagctcctgcgaggaagaaggcgaagaagatcgggatgccgacgaggagggcgagggagatgaggaaactccaaccagtgcccctggaagtagcctggccggaagaaatccatacgcactcttaggcgaagacgaatgctag

SEQ ID NO: 190136 - DNA, 1290 bp, synthetic construct
  misc_feature 1..1290: note = Description of Artificial Sequence: Synthetic coding sequence
  source 1..1290: mol_type = other DNA
atggaggccgccgtggtgctggagatgagcgacatcgtgctgctgattacagacatacgccaccccgttgtgaacttcccaccagccctctatgagtatgtgaccggagagctaggcctggccctggtcctggtgctgaacaaagtggacctcgctccccctgccctcgtggtagcttggaaacattactttcatcagcattacccccaacttcacgtggtgttattcacctctttccccagggacccgaggactccccaagatcccagcagtgttctgaagaagtcccggcgaagaggccgcggatggactcgggctttaggtcccgagcaactacttcgggcttgtgaggccatcacggtgggaaaggtcgacctctcttcatggcgcgaaaaaattgctcgtgatgtggctggcgcaacatggggcaatggttcaggagaggaagaggaggaggaggatggtcctgccgtcctcgtggagcagcagacagactccgctatggagcctactggtccgacacaagagagatacaaagacggcgtggttactatcgggtgcgtcggatttcccaatgttgggaagagctcattgatcaacggattggtggggaggaaggtggtctccgtttcgcgtactccaggccacacgcgatattttcaaacttacttcctcacaccaagtgtaaagctctgcgactgtcctggcctgatatttccttccctccttccccggcagttgcaggttctggcagggatttaccccattgcccagatccaggagccatatacagccgtggggtatcttgcatcccgcatccctgttcaggcgttactgcacctgagacatcccgaggctgaggaccccagcgccgaacacccgtggtgcgcttgggacatatgcgaagcctgggccgagaagcgaggctacaagactgccaaagccgcgcgaaacgacgtatatagggcggcaaacagcttgcttcgactagctgtcgatggacggttgtccttgtgctttcatccccctggatactctgagcaaaaggggacatgggagagccaccctgaaactaccgagcttgtcgttctgcagggacgcgtcggccctgccggagacgaggaggaggaggaggaggaagaactatccagctcatgtgaagaggaaggtgaggaagatcgcgacgctgacgaggagggagagggggacgaggagacccctacatcagcccccggatctagtcttgccggccggaatccttatgctttactgggcgaggacgagtgttag

SEQ ID NO: 190137 - DNA, 1290 bp, synthetic construct
  misc_feature 1..1290: note = Description of Artificial Sequence: Synthetic coding sequence
  source 1..1290: mol_type = other DNA
atggaggccgccgtggtgctggagatgagcgacatcgtgctgctgattactgacattaggcaccctgtggtcaacttcccaccagcactctacgagtatgtaacaggtgagctgggtctggcactggtactggtcctgaataaagtagatctggctccacccgcgctcgtagtggcgtggaaacactacttccaccaacactaccctcagctgcacgttgtgttgtttacttcgttcccacgtgatcccagaaccccccaggatcctagctctgtgctgaagaaatctcgacgtagagggaggggatggacaagagccttggggccagagcagcttcttcgtgcgtgtgaggctatcacagtgggaaaggtggatctgtcttcttggcgggagaaaattgcccgcgatgttgccggagccacctgggggaacggctctggtgaggaagaggaagaagaagatggacccgcggttctggtcgagcagcagaccgatagcgccatggagcccacaggcccgacccaggagcggtataaagacggggtggtgaccatcggatgcgtgggattccctaacgtggggaaatccagcctgatcaacggcctggtagggcgcaaggtggttagtgtcagcagaacccccgggcatacccggtattttcagacatactttcttacacccagcgtcaagctctgtgactgccccggtttgattttcccatcccttttacccagacaattacaagtcctagctggtatatatcccatcgcccagattcaagagccgtacacagcagtaggctatctcgcatctcgaattcccgtgcaggctctccttcacttacggcaccccgaggccgaagatccgtccgcggaacacccttggtgcgcttgggatatctgcgaagcttgggccgaaaagcggggctataagactgccaaggctgctaggaacgatgtgtacagggccgctaacagcctgcttcggctggccgtggacggaagattgtccttgtgttttcatccacctggctattctgagcagaagggtacctgggagtcccatcctgagaccactgagctcgttgtgcttcagggaagggttggcccagcaggagacgaggaggaggaagaggaagaagaactgtcttcaagctgcgaggaagagggagaagaggatcgagatgctgatgaggagggagagggtgacgaagagactcccacatcagcccccggctcctccctcgccggccggaacccttacgctctgttgggcgaagacgagtgctag

SEQ ID NO: 190138 - DNA, 789 bp, synthetic construct
  misc_feature 1..789: note = Description of Artificial Sequence: Synthetic coding sequence
  source 1..789: mol_type = other DNA
atggagcccaccggccccacccaggagcggtacaaggacggcgtggtcacgataggatgcgtgggatttccaaatgtcggaaagtcttcccttatcaacggactagtgggtcgaaaggtggtttccgtgtcacgaaccccagggcacactcggtatttccagacttattttctgacaccctcggtcaagctttgtgactgtcccggtctgatctttccctcgcttctgccacgacaactgcaggtgcttgccggcatctatcccatcgctcagatccaagagccgtatacagcagtgggttacctggcgtcacgtattcctgtgcaggcattgcttcacctgagacacccggaagcagaggacccatcggccgagcacccttggtgcgcatgggacatttgtgaagcttgggctgaaaagcgcggttataaaactgctaaagctgctcgtaatgatgtataccgtgctgccaattccttgctgaggctggccgtggatggccgcctgtccctgtgtttccatccacccggttattctgagcaaaaaggtacttgggagtcgcaccctgaaacaactgaactggtggtactgcagggcagggttgggccagccggcgatgaagaggaagaggaagaagaggagctttctagttcctgcgaggaagagggggaggaagatcgggacgcggatgaggagggtgaaggcgacgaggaaaccccaacaagcgctccagggtcctcactcgccggtaggaatccctatgcccttttgggagaagatgaatgctag

SEQ ID NO: 190139 - DNA, 1290 bp, synthetic construct
  misc_feature 1..1290: note = Description of Artificial Sequence: Synthetic coding sequence
  source 1..1290: mol_type = other DNA
atggaggccgccgtggtgctggagatgagcgacatcgtgctgctgatcacagatatccggcacccggtcgtgaacttcccgcctgccctctatgagtatgttactggagagctgggactggccctcgttttggtccttaataaggtggatctggcaccacctgctttagtggtagcctggaaacattattttcatcagcattacccccagctccacgtggtcctgttcacctcctttccaagggatcctagaacacctcaagacccctcgagcgtgcttaaaaagtcaagacgccgggggaggggttggacacgtgctctgggccctgagcagttattaagggcatgcgaggctatcaccgtgggaaaagttgacctgtcaagttggcgtgaaaagattgcacgcgatgtggccggagcgacttggggtaacggatcaggagaagaggaggaggaggaggatggtccagccgtgctcgttgagcaacagaccgactccgcaatggaacccaccggaccgacccaggagaggtataaagacggagtggtcaccataggctgtgtggggttcccaaatgtcggcaaatcatccctaattaatggactggtgggcaggaaggtggtttcagtcagccgcacacctggacacacaagatattttcagacttattttctcaccccctcggttaagctgtgtgattgtcccggactgatcttcccttcactgcttcctagacagctccaagtactggccggcatctaccctatagcccagattcaggagccctataccgctgtgggctatctcgcttcgagaattcccgtacaggcccttctgcacctcagacatcctgaagcagaggacccatctgccgaacatccttggtgcgcctgggatatctgcgaggcctgggccgaaaaacgcgggtacaagacagcgaaggcggctagaaatgatgtataccgagccgcgaattccctgctgcgccttgctgtggacggccggttgtcgctgtgttttcacccccctgggtacagcgaacaaaaaggcacatgggaatcccaccccgagacgaccgagctggtcgtactgcagggccgggtcggccctgccggagatgaagaggaagaggaagaggaggaattgagttcctcctgcgaagaagaaggtgaggaagatcgcgacgccgacgaagaaggtgagggagatgaggaaacccctactagtgctccaggctcaagtcttgccgggcgaaatccctacgcgctgctgggcgaggacgagtgctag

SEQ ID NO: 190140 - DNA, 1215 bp, synthetic construct
  misc_feature 1..1215: note = Description of Artificial Sequence: Synthetic coding sequence
  source 1..1215: mol_type = other DNA
atgagcaaggagcagctgatgagccaggaggagcggagcttccaggattatttaggtaagatccatggggcatactcatccgaaaaactaagttatttcgaacacaacctagagacatggagacagttatggagggtgctcgagatgtctgatatcgtgctgctgatcactgatattcggcacccagtcgttaacttccctcctgctctttacgagtacgtgaccggtgagctggggctcgcccttgtcttggtgttaaacaaagtcgaccttgcaccaccagcgctggtggtcgcatggaagcattacttccaccaacactaccctcagctacacgtggtcttattcaccagcttcccccgggacccccggactccgcaagatccgtcatccgtgcttaagaagtctcgtcgacggggtagaggttggactcgcgccctggggcccgaacagttgcttcgagcatgtgaggctattacagtcggtaaggggttccccaacgtagggaaaagttccttgattaatggactggtggggcggaaggtcgtgtcggtgtctcggaccccgggtcacacacgctattttcagacttatttccttactcccagtgttaagctgtgcgattgccctgggctcatttttcctagtctgcttcctcggcagctgcaggtcctggccggaatctatccaatagcccagatccaggagccgtataccgctgttggatacctggccagtcgcattcctgttcaggccctcctgcacctacgccaccccgaggctgaggacccctccgcagagcatccatggtgcgcatgggacatctgcgaggcctgggccgagaagagggggtacaaaacagccaaggccgcacggaacgacgtatatagagccgcaaactccttactgcggctggcagtagacggaaggttgtctctgtgtttccaccccccgggctacagcgaacaaaagggcacatgggaaagtcatcctgaaacgactgagctcgtggtcttgcagggaagggtcggaccagccggcgatgaggaggaagaggaagaggaggaactgtcatccagttgtgaggaagaaggtgaagaggaccgggacgccgatgaagaaggagaaggagacgaagaaacccccacttcagctcccggctcgtcccttgctggacgtaatccctacgccctgttgggagaggacgagtgttag

SEQ ID NO: 190141 - DNA, 1215 bp, synthetic construct
  misc_feature 1..1215: note = Description of Artificial Sequence: Synthetic coding sequence
  source 1..1215: mol_type = other DNA
atgagcaaggagcagctgatgagccaggaggagcggagcttccaggattatcttggaaagatccacggcgcgtactcctcagaaaagctgagttacttcgaacacaatctggaaacttggagacaactctggagagtgctcgagatgtctgatattgtcttgctaattactgacattcgccatccagtggtcaactttccacctgccctgtacgagtatgtgacgggtgaattgggcctggccctggtactcgtgctgaacaaagtcgatctggctccaccagctctggtggtagcctggaagcactatttccatcagcactaccctcagttacacgtggtacttttcacctcattccctagagacccacggacccctcaggaccccagctcagtgctcaagaaaagtcggagacgggggaggggatggacacgggctcttggacctgagcagctgcttcgggcttgtgaggcaatcaccgttgggaaaggcttcccaaatgtaggcaaatcctcactgataaacgggctggtgggacggaaggtagtgagtgttagtcggacccctggacacacgaggtactttcagacctattttttgacaccatccgttaagctgtgtgattgccccgggcttatattccctagcctgctgcctagacagcttcaagtgctggcaggaatatatccaattgctcagatacaggagccatacaccgcggtaggatatctcgccagccgcatccccgtgcaggccctactccacctacgccatccagaagcggaagacccttcagcagaacatccctggtgtgcttgggatatctgcgaagcttgggctgagaaaaggggatacaagacggcaaaagccgccaggaacgacgtgtatagggctgcaaatagtcttctgagactcgccgtggacgggcggctgtccctctgctttcacccgcctggctatagcgagcagaagggcacatgggaaagtcatcctgagacaacggaattggtggtgctccagggtcgcgtgggaccggccggggacgaggaagaagaggaggaggaagaactgtcaagctcatgcgaggaagaaggggaagaggaccgggacgccgatgaggagggggagggggatgaagaaactcccacatctgcacctggaagcagcttggccgggaggaacccatatgccctgctcggcgaggatgaatgctag

SEQ ID NO: 190142 - DNA, 789 bp, synthetic construct
  misc_feature 1..789: note = Description of Artificial Sequence: Synthetic coding sequence
  source 1..789: mol_type = other DNA
atggagcccaccggccccacccaggagcggtacaaggacggcgtggttacaatcggctgcgtgggattcccaaatgtcggtaaatcctctctaatcaacggcttggtcgggagaaaagttgtctctgtgtctagaacaccaggacacacgcgatacttccagacctactttctgaccccctcagtaaaactttgcgactgcccagggttgatctttccatctctgcttccgcgccagctccaagtcctggccggcatatatccgatagctcaaatccaggaaccctatactgctgtcgggtaccttgcctctcgtatcccagtccaagcactacttcacttgcggcaccctgaagccgaggaccccagtgccgagcacccttggtgtgcttgggacatttgcgaggcctgggcggagaagcgtggctataagacagcgaaagctgctcggaatgacgtgtatcgagctgctaacagcttactgagactggccgttgacggtcggctatctttatgttttcacccacccggctatagtgagcagaagggcacttgggaatctcacccagagaccaccgaattggtcgtgctccagggcagagtcgggcccgcaggcgacgaagaggaggaagaggaggaggagctctctagctcatgtgaggaggaaggtgaagaggatagagacgctgatgaagagggcgaaggagatgaggaaacccccactagcgcgcccggttcatcccttgctggcaggaacccttatgctttgttaggcgaagacgagtgttag

SEQ ID NO: 190143 - DNA, 2196 bp, synthetic construct
  misc_feature 1..2196: note = Description of Artificial Sequence: Synthetic coding sequence
  source 1..2196: mol_type = other DNA
atggtgaagcccaagtacaagggccggagcaccatcaaccccagcaaagcgtcaaccaatccagatagggtgcagggcgcaggaggccagaacatgcgcgacagggccaccatccggcggcttaatatgtaccgacagaaagagcggcgcaatagtagagggaagatcattaagccgctgcagtatcagagcacagtggcaagtggaacagtggctcgggtggagcccaacattaaatggtttggcaatacccgcgtcatcaagcagagttcgcttcagaaattccaggaagaaatggacacagtcatgaaggatccatacaaggtggtcatgaaacagtcgaaactacccatgtcgctcctccacgatcgaattcggccccataacttgaaggttcacatacttgacaccgagagttttgagaccacattcggccccaagagccagaggaaaagacctaatctgttcgcctccgatatgcagtcactcattgaaaatgctgaaatgagtacagaaagctacgaccagggaaaagaccgggatctggttaccgaagataccggcgttagaaacgaggcacaggaagaaatatataaaaaagggcagtccaagagaatttggggcgagctctataaagtgattgattccagcgatgtggtagtacaagttctggatgccagagacccaatgggtacccgctcaccacatattgaaacctatctcaaaaaagaaaaaccttggaaacacctgatttttgtgttaaacaagtgcgatctggtacctacttgggctacaaagcgttgggtggctgttctgtcacaggattatcctacccttgctttccacgcttcactgacaaatccgttcggaaaaggtgccttcatccagctgttgagacagtttggtaaattacacactgataagaagcagattagtgtgggcttcatcggctatccgaacgttggcaagagctcagtgataaacacactccgctccaagaaggtgtgtaatgttgcgcccattgccggagagacaaaggtttggcagtacattaccctgatgcgccgcattttcctgatcgactgcccaggcgtagtctacccatccgaagattcggaaaccgacatcgtgttgaagggcgtggttcaggtggagaaaataaaatccccagaggaccatatcggggccgtactagaacgggctaagccagagtatatatccaagacatacaagattgactcctgggaaaatgctgaagatttcctggaaaaattggccttccggaccgggaaactgctgaagggaggcgagcccgatctgcagacagtcggcaaaatggtgctgaacgattggcagcgcggtcgcatacctttcttcgttaagccccctaatgctgagcctcttgtggctccgcagttgttaccgtccagctcccttgaagttgtgcccgaggccgctcagaataaccctggtgaagaggttactgaaacagcaggggagggatcagagtccataatcaaagaagagactgaggagaatagccattgcgacgccaacactgaaatgcagcagatcctgacgcgagtgcgccagaattttggcaaaatcaatgttgtgccgcagttctcaggcgatgacctcgtgcccgtggaggtctccgacttggaggaggagctcgaatctttttccgacgaagaggaggaggagcaggaacagcaaagagacgacgctgaagagtcatcctctgagcccgaggaagagaacgtcggtaatgacaccaaagcagttatcaaggcgctggatgaaaagattgccaaatatcagaagttcctagataaggcaaaggccaagaaattctccgcggtgaggatcagtaaaggccttagcgaaaaaatttttgcgaagcccgaggaacagcggaagaccctggaggaggatgtggacgatagggctcccagcaagaaaggcaaaaaacgcaaggctcaacgggaagaggaacaggagcactctaacaaagcccctcgcgctctcactagcaaagagcggaggcgggccgttcgccagcaacggcccaagaaggttggcgtgagatattacgaaacccacaatgtgaagaaccgcaatcggaacaagaaaaaaacaaacgactctgagggacagaaacataagaggaaaaaatttcgccaaaagcagtag

SEQ ID NO: 190144 - DNA, 579 bp, synthetic construct
  misc_feature 1..579: note = Description of Artificial Sequence: Synthetic coding sequence
  source 1..579: mol_type = other DNA
atgcagagcctgatcgagaacgccgagatgagcaccgagagctacgatcagggcaaggatagggacctagtaactgaagataccggcgtgagaaacgaagcacaagaggagatttataaaaaaggccaaagtaagcggatctggggagagctgtacaaggttattgactcctctgacgtggtcgtgcaggtgttggacgcccgagacccaatgggcaccagatctccccatatcgagacttacctaaagaaagagaagccctggaagcatctgattttcgtattaaataagtgtgatctcgtgcccacttgggccaccaagcgctgggtggccgttctgtcccaagattaccctaccttggcctttcatgcgagtctgaccaacccctttgggaagggcgctttcattcagctgcttaggcagttcgggaagctgcatactgacaaaaaacaaatcagtgtcggctttatcgggtacccaaacgtagggaaatcttcggtaatcaataccttgcgatcgaagaaagtgtgcaatgttgccccgatcgccggcgagacaaaggtttccattctgctgtag

SEQ ID NO: 190145 - DNA, 1614 bp, synthetic construct
  misc_feature 1..1614: note = Description of Artificial Sequence: Synthetic coding sequence
  source 1..1614: mol_type = other DNA
atgacctgccacaagcggtacaagatccagaagaaggtgcgggagcatcatcgtaagttgaggaaggaggccaagaaacgaggtcacaagaaacctaggaaagatccaggagtaccaaatagcgccccctttaaggaggctctgctcagggaagctgaactaaggaagcagaggttggaagagctgaagcagcagcagaagctggatcgtcaaaaagaactggagaagaaacgaaagctggagactaatccggacatcaaacctagtaacgtggagcctatggagaaggaattcggactttgcaagactgagaataaagccaaatccggaaagcagaatagtaaaaagctatactgtcaggagttgaagaaagttatagaagcttcggatgtggtgttggaagtgctagacgcgcgtgaccctctgggttgtcgctgtccgcaggtcgaggaggcgatcgtccagagtggccagaagaagctggtcctaatactgaacaaaagtgatctggttcctaaagagaatctggagtcctggttgaactatctcaagaaggaattgcctaccgtcgtgtttcgtgcttccacaaagcccaaagataaaggcaaaatcacaaaacgggttaaggctaagaagaatgcggcccccttccggtccgaggtgtgttttgggaaagaggggttgtggaaactgttgggcggcttccaggaaacctgtagtaaagctatcagggtgggcgtaatcggatttccaaacgttggcaaatcttctatcatcaacagcctcaagcaggaacagatgtgcaatgtaggtgtgtcgatggggctcacccgatccatgcaggtggtgcccctggacaaacaaatcaccattatagattcaccatcattcatcgtgagccctcttaacagcagctccgccctggctctgagatccccggcatcgattgaagtggtgaaaccaatggaggccgcctccgcaatcttaagccaagcagacgcgaggcaggtagtccttaagtatacggtgcccgggtaccgcaactctctggagttcttcacggttctagctcaaaggagggggatgcatcagaagggcggcatcccaaacgttgagggcgctgcaaagctgctttggagcgagtggaccggagccagcctagcttactattgtcatccccctactagctggactcctccaccttacttcaatgagagcatagtcgtagacatgaagtcagggtttaacctcgaggagcttgaaaaaaataacgcccagtcaatcagagcaatcaaggggcctcacctcgctaacagtatattgtttcagtcttctggcttgacaaatggtattattgaagagaaggacatccacgaggagcttcccaagagaaaagaaagaaaacaagaggaacgtgaggacgataaagattctgaccaggaaaccgtcgatgaagaagtggatgaaaattccagcggaatgttcgctgccgaagaaactggcgaggcattgtccgaggagaccacagccggcgaacaatccacaaggtcctttattttggataaaattatcgaggaggatgacgcgtatgacttttctaccgactacgtgtag

SEQ ID NO: 190146 - DNA, 1650 bp, synthetic construct
  misc_feature 1..1650: note = Description of Artificial Sequence: Synthetic coding sequence
  source 1..1650: mol_type = other DNA
atgaagcggcccaagctgaagaaggccagcaagcggatgacctgccataagcgctataaaattcaaaaaaaagtccgcgaacaccaccggaaattgcggaaggaggcaaaaaagcgcggacataaaaaaccgaggaaagacccgggtgttccgaactctgcccccttcaaggaagccctcctccgcgaagctgaattaaggaaacagaggttagaggagctcaagcagcaacagaagctggaccggcaaaaagagctggagaagaagcgcaaattagagaccaaccctgatattaaaccttcaaacgtggagcctatggagaaggaatttggcctgtgcaaaacagagaacaaggcgaaatctggcaaacagaacagtaagaaactgtattgccaggagttaaagaaagtcatcgaagcctctgatgtggttctcgaggtgctggacgctcgcgatccactaggctgccgctgcccccaggtggaagaggctattgtgcagtccggacagaagaagctggtattaattttgaataaaagtgatctggtcccaaaggaaaacctggagagctggttaaattatctgaaaaaagaactgcccaccgtagtgtttagggccagcacgaagccaaaggataaggggaagattacaaagagagttaaggctaaaaaaaatgctgccccatttcgttcagaagtctgttttgggaaagagggcctctggaagttacttggtgggtttcaagagacttgcagcaaggccatcagggttggggtgattggctttcccaatgtgggcaaatcctcaattatcaatagtctgaaacaagagcagatgtgcaatgtgggagttagtatgggccttaccagaagcatgcaagtcgttcccctggataagcagatcaccattattgactcgccatcttttatagtgtctcccctcaacagctccagcgccctggccttacgcagcccagcgtctatagaggtcgtgaagccaatggaggctgcctctgctattctatcccaggccgatgcccggcaggtggtgttaaagtacaccgttccagggtataggaattctctggaattttttacggtgctggctcagagaaggggaatgcatcagaaaggaggaattcccaatgtggaaggagccgccaagctgctgtggtccgaatggacgggcgcgtccttagcctattactgtcacccacccacatcctggactcctccaccttactttaatgaaagcatagtggtggacatgaagtcagggtttaatctggaggagctagagaaaaacaacgcccagtcaatacgtgccattaaagggccccaccttgcaaattccatcttatttcaaagttctggcttgactaatggtatcatcgaagagaaggatatacacgaggaactgcccaagaggaaggaacgtaagcaagaggagcgagaggatgataaggactctgatcaagagaccgtggatgaagaggtggacgaaaattccagtggaatgtttgccgccgaggagaccggagaggccctgagcgaagaaaccacagctggagaacagtcgacacggtccttcatccttgacaagattattgaagaggatgacgcttatgactttagtaccgactatgtgtag

SEQ ID NO: 190147 - DNA, 291 bp, synthetic construct
  misc_feature 1..291: note = Description of Artificial Sequence: Synthetic coding sequence
  source 1..291: mol_type = other DNA
atgacctgccacaagcggtacaagatccagaagaaggtgcgggagcaccacaggaagctcaggaaagaggccaagaagcgcggacataaaaaacctcgcaaagacccaggcgtccccaactcagccccgtttaaagaagctctcttaagagaagctgaactgcgcaagcagcggcttgaggaactcaagcagcagcagaaactggaccggcagaaagagctggagaagaaacggaagctggaaactaatccagatatcaagccatctaacgtggaacccatggaaaaatag

SEQ ID NO: 190148 - DNA, 408 bp, synthetic construct
  misc_feature 1..408: note = Description of Artificial Sequence: Synthetic coding sequence
  source 1..408: mol_type = other DNA
atgacctgccacaagcggtacaagatccagaagaaggtgcgggagcaccatcggaagctgcggaaagaggctaagaagaggggacataagaagcctagaaaagatcccggtgtaccaaacagcgccccttttaaggaggccctgctgagggaggcggaactgcgtaaacagcgactggaggaacttaaacagcagcaaaaactcgaccgtcaaaaggagctggagaagaagcgtaaacttgaaaccaatcccgacatcaagccgagcaacgtcgagcctatggaaaaagaattcgggctgtgcaagactgagaataaggcgaaaagcgggaaacagaattcaaaaaagctgtactgccaggaactcaagaaggtcatagaggccagtgatgtggtcttggaagtgtag

SEQ ID NO: 190149 - DNA, 417 bp, synthetic construct
  misc_feature 1..417: note = Description of Artificial Sequence: Synthetic coding sequence
  source 1..417: mol_type = other DNA
atgaagcggcccaagctgaagaaggccagcaagcggatgacctgccacaaacgatacaaaatccagaaaaaagttagagagcatcataggaagctcagaaaggaagcaaaaaaacgtggacacaaaaaaccacgaaaggacccaggcgttccaaattctgccccgttcaaagaggcactacttcgagaagcagagctccgcaaacaacggcttgaagaacttaagcagcagcaaaaacttgataggcaaaaagaactggagaagaaaaggaagcttgagaccaaccctgacataaagccatctaacgtggaacccatggaaaaagagtttgggttatgtaagaccgagaacaaagctaagtcagggaagcaaaatagcaagaagctttactgtcaagagttgaagaaggtgtcttag

SEQ ID NO: 190150 - DNA, 1038 bp, synthetic construct
  misc_feature 1..1038: note = Description of Artificial Sequence: Synthetic coding sequence
  source 1..1038: mol_type = other DNA
atgccccggatcgacgccgacctgaagctggacttcaaggacgtgctcctgcgtccaaaacgctcctctctgaagagccgcgctgaggtagatttggaacgtacatttacatttcgaaattccaagcagacttatagtggcattcccattatagtcgctaacatggacaccgtgggcaccttcgaaatggccgcggtaatgagccagcactccatgttcacagctattcacaaacactacagcctagatgactggaaactgtttgctacaaatcaccccgaatgcctgcagaacgttgccgttagctccgggagcggacagaatgacctggagaagatgacctcaattctggaggccgtgccacaggttaagtttatctgtttggacgttgcaaatgggtattccgagcatttcgtggaattcgtaaaactggtgagggccaagttcccggaacataccattatggccggcaatgtggtgaccggggaaatggtggaggagctcatcctgtctggagcagacatcataaaagtgggtgttgggcccgggtccgtgtgcacaactcgtacaaagactggcgttgggtacccccagttaagcgccgtgatcgaatgcgccgatagcgctcatggcctgaaaggccacattatcagtgatggggggtgcacctgcccaggtgatgtggcaaaggctttcggggcaggggccgattttgtgatgctcgggggtatgtttagtgggcatacagaatgcgcaggcgaggtatttgagcgcaacggacggaagctgaaactcttttatggaatgtcttcagacactgccatgaataaacacgccggaggcgtggctgagtaccgtgcatcggaaggcaagaccgttgaagtgccttataaaggggacgtcgagaatacgatactggacatcctgggggggctgagaagcacatgcacctatgtgggagccgccaaattgaaagaactgagccgtagagccacttttatacgtgtgactcagcagcacaacactgtcttctcttag

SEQ ID NO: 190151 - DNA, 1230 bp, synthetic construct
  misc_feature 1..1230: note = Description of Artificial Sequence: Synthetic coding sequence
  source 1..1230: mol_type = other DNA
atgccccacatcgacaacgacgtgaagctggacttcaaggacgtgctcctccggccaaagagatctactctgaagagtaggtccgaggtcgacctgacacggtctttcagtttcagaaattccaaacaaacatatagcggggtgcctatcatcgccgccaacatggatacagttggcactttcgaaatggctaaggtgttatgcaaatttagcctttttacggccgttcacaagcactacagtcttgtccagtggcaggagtttgctggtcagaatccagactgcttagagcacctcgcggcctcgagtggtacgggcagctctgatttcgagcaactcgaacagattctggaagcgatccctcaggtgaaatacatctgtttagacgtggctaacggttacagcgagcactttgttgaatttgtcaaggatgtgaggaagcggttccctcagcacaccataatggctggaaacgtagtgacaggagaaatggtggaggagctgatcctatccggagcagacataatcaaggtcggtatcggccctggatcagtgtgcacaacaagaaagaagacaggagtcggctacccacagctctcagcagtcatggaatgcgccgacgcagcccatgggctcaaaggacatatcatatctgatgggggatgctcctgccctggagatgtcgcaaaagcctttggggcaggcgcagatttcgtgatgttgggcggcatgctggctggacactccgagtcaggcggcgaactgatagagagggatggaaaaaagtacaaactgttttacggcatgtccagtgagatggcaatgaagaagtatgccggcggggtggccgaatatcgctatgtgtggaggcctcggagcctggtgattgtgtggagacaaaacagctggctccttcggggcggatggtacagcagccaaaggtccatggtgaacagggggtccatgctggggagcgtggaaaagtctcttggtctaagaaaccccgagggcgaagataataaggtgttccccaccctgagagccagtgagggcaagacagttgaagtgccattcaaaggggatgtagaacacaccattcgagatatcctgggcggcatccgtagcacttgcacctacgtcggcgctgctaagttaaaagagctgagccgtcgaacaacatttatcagggtaacccagcaggtcaacccaatcttctccgaggcctgctag

SEQ ID NO: 190152 - DNA, 1047 bp, synthetic construct
  misc_feature 1..1047: note = Description of Artificial Sequence: Synthetic coding sequence
  source 1..1047: mol_type = other DNA
atgccccacatcgacaacgacgtgaagctggacttcaaggacgtgttgctccggccgaagaggagtaccctgaaaagcagatcagaggttgacctcaccagatcttttagctttaggaatagcaagcagacttactcaggtgtcccaataatcgccgcaaacatggataccgtgggaacttttgaaatggccaaggttctttgcaaattttcactcttcacggctgtgcacaaacattattctttggtacagtggcaggaattcgcagggcagaaccccgactgtctcgagcatttagcagcctctagcggaacgggttcaagcgactttgaacagttagaacagattctagaagctatcccccaggttaaatacatttgtctggacgtggctaatggctactccgaacattttgtggagtttgttaaggatgtgagaaaacgctttccccagcacaccattatggcaggcaacgttgttaccggagagatggtggaagagctgattctgtccggcgcagacatcattaaagttggtataggtcccggttcggtttgtacaacccggaagaaaactggcgttgggtatccccagctgtcagcagtgatggagtgtgctgacgcagctcacgggcttaaaggacatatcatttccgatggtggatgtagctgtccgggagacgtagccaaggcctttggagctggtgcggacttcgtgatgctgggcggtatgcttgccggacattccgagagtggaggagaactcatcgagcgtgatggaaaaaaatacaaacttttttacgggatgtcatcggaaatggcaatgaagaaatatgcggggggtgtggccgagtaccgcgctagcgaggggaagactgtcgaggtgccctttaagggagacgtggagcatacgatccgagacatcctgggaggtatcagaagcacatgcacatatgtcggggcggccaaactgaaggaattatcccgcagaaccaccttcattagggtgacccaacaggttaacccaatctttagtgaggcctgttag

SEQ ID NO: 190153 - DNA, 1047 bp, synthetic construct
  misc_feature 1..1047: note = Description of Artificial Sequence: Synthetic coding sequence
  source 1..1047: mol_type = other DNA
atgccccacatcgacaacgacgtgaagctggacttcaaggacgtgcttctccggccaaagcgctcaactttgaaatcacggtcggaagtggacctcactcgcagcttttccttccggaactctaaacagacatatagtggcgtcccaatcatcgccgctaatatggacacagtgggcacctttgaaatggctaaagtcctctgcaaattctcgctgtttacagcggtgcataaacactacagcctggtccagtggcaggagttcgcaggtcaaaacccagactgcctcgagcaccttgcagcgtcctcggggaccggttcgtccgactttgagcaacttgagcagatccttgaggccatcccccaagttaagtatatatgcctcgacgtggctaatggctactcagaacacttcgtggaattcgtaaaggacgtgagaaaacggtttccccaacatacaatcatggcagggaatgtggtcactggagagatggtggaagagttgattctttccggggccgacataattaaagtcgggattggaccagggtctgtttgtaccaccaggaaaaagaccggggtgggctacccacagctgagtgcagttatggagtgcgctgatgctgctcatggtctcaaggggcacattatttctgacggagggtgttcgtgtcccggggacgtggctaaagccttcggagccggcgccgactttgtcatgctgggaggtatgctggcaggacattcagaatccggcggggaattgatcgagagggatggcaaaaagtataaacttttctatggaatgtcttcagaaatggctatgaaaaagtacgccggaggcgtcgccgagtaccgcgcttcagaaggaaagaccgtcgaagtgccttttaagggcgatgtggaacatactatcagggatatactaggggggattcgctcaacctgcacctacgttggggcagcgaagctgaaggaattgagtcggagaacaacttttataagggtgacacagcaagtcaaccctatcttctccgaagcatgctag

SEQ ID NO: 190154 - DNA, 1101 bp, synthetic construct
  misc_feature 1..1101: note = Description of Artificial Sequence: Synthetic coding sequence
  source 1..1101: mol_type = other DNA
atgaccagctgcctgcccgccctgcggttcatcgccaccccccggttgagtgccatgccacatatagataacgacgttaagctcgacttcaaggatgttctgctgcgtccaaagcggtctacactgaagtcacgttctgaagttgatcttacccgcagcttttctttccgcaacagcaaacaaacttatagcggggtgcctattatcgcagccaacatggatactgtaggtacatttgaaatggccaaggtcctgtgcaagttttctctgtttacagccgtccacaaacattactccctcgtccaatggcaggaatttgcgggccagaacccagactgtcttgaacacctggccgcaagttcaggtaccgggtcttccgattttgaacaactggagcaaattctcgaagccattccccaggtgaagtatatttgcctcgacgtcgctaacggctacagcgagcatttcgtcgaatttgtcaaagacgttcgtaagaggttccctcagcacactataatggccgggaacgtggtgaccggagaaatggttgaagaactcattctgagtggagctgatattatcaaagtgggtattgggcccggcagcgtatgtaccacccggaagaaaaccggggtgggttacccacagctcagtgcagtaatggaatgtgccgatgccgcccatgggctcaaggggcacataatcagtgatggtggatgctcatgtcccggtgacgtggccaaagcattcggcgcaggcgccgattttgtgatgctcggcggcatgctcgctgggcactccgagtcaggcggagagctgatcgagagggatggaaagaaatacaaactgttctacggaatgtccagtgaaatggccatgaaaaagtatgccggcggtgttgcagagtaccgagctagcgagggaaaaacagtggaagtgcccttcaagggggacgttgaacatacaatcagggatatactgggaggaatacggagcacctgcacgtatgtgggcgcagccaaattgaaggaactatcccgccggactacattcattagagtcacacagcaggtcaatcctatattttcagaagcgtgctag

SEQ ID NO: 190155 - DNA, 1047 bp, synthetic construct
  misc_feature 1..1047: note = Description of Artificial Sequence: Synthetic coding sequence
  source 1..1047: mol_type = other DNA
atgccccacatcgacaacgacgtgaagctggacttcaaggacgtgctcctgaggccaaaaagaagtaccctcaagagcaggtctgaagtggacctgacaagatcctttagctttcgcaatagtaaacagacttacagcggcgtgccgatcatcgctgccaatatggatactgtggggactttcgagatggcgaaggtcctctgcaagttctccctcttcacagccgtgcataagcattattccctcgtgcagtggcaggagttcgccggccagaacccggactgtctcgagtcaatttggctcccagctcaggctcaggccctgcttaccctgagcagctggaatcgctcctggaagctctttccacgaaaatacatctgtttggacgtcgctaacggttactcagagcacttcgtggagtttgtcaaagacgtgagaaaaaggtttccgcagcacaccatcatggcaggcaatgtggtaaccggcgagatggtagaggagttgatcctgtccggagcagacattatcaaggtaggcatcggtcctgggtcagtgtgcactacacgcaagaagactggggttggttatccccaactctcagcagtaatggagtgcgccgatgctgctcacggcctcaaaggacacataatctcagatggtggctgcagctgtccaggcgacgttgctaaagccttcggtgcgggcgctgacttcgtcatgctagggggaatgttggccggccatagcgagtcaggcggagagctaatagaacgcgatggaaaaaaatacaaactgttctatggaatgagttctgaaatggccatgaaaaaatatgccggcggagtggcagaatatcgggccagcgagggcaaaaccgtggaggtgcctttcaagggtgatgtcgagcatacaatccgagacatcctgggtgggattcgtagtacctgcacgtatgtgggtgccgctaagttgaaagaacttagtcgccgaaccacttttattcgggtgactcaacaagtgaacccgattttcagcgaggcttgctag

SEQ ID NO: 190156 - DNA, 1047 bp, synthetic construct
  misc_feature 1..1047: note = Description of Artificial Sequence: Synthetic coding sequence
  source 1..1047: mol_type = other DNA
atgccccacatcgacaacgacgtgaagctggacttcaaggacgtgctgctcagacctaaaaggagcacacttaagtcacgaagcgaagtcgaccttacacggtcattctcctttaggaacagtaaacagacctacagcggggtgcctattatagctgccaatatggatactgtgggcaccttcgagatggctaaagtgctctgcaagttctcattgtttacagcagtccacaagcattatagcctcgtgcaatggcaggagtttgcgggtcaaaatcctgactgcctggagcatctggccgcgtcttccggaaccggttcttcagacttcgaacagctggagcagatactagaagctataccccaggtgaaatacatctgtctggatgttgcaaacggatacagcgagcatttcgtcgagtttgtgaaagacgttcgtaaaagatttccgcagcatacaatcatggccggcaacgtggtgaccggagaaatggttgaagaattaatcttgagcggggccgacatcattaaggtcggaattggacctgggagcgtctgcacgacccgtaagaagacgggagtcggatacccacagctgtccgccgtgatggagtgcgcagatgctgcccatgggctcaaagggcatatcatttcagacggcggctgctcatgtcctggcgacgtggcaaaggcatttggtgctggagcggatttcgtgatgctcggcgggatgctggccggacacagcgaatctggaggagagctaatcgagagggacggcaagaaatacaagcttttttacggcatgtcatctgaaatggccatgaagaagtacgccggtggagtcgctgagtatcgggccagtgagggcaagactgtggaagtgccttttaaaggggatgtggaacacaccatccgtgacatcctcgggggcatccgatccacttgcacatatgtgggagccgccaagttgaaggagttgagcaggcggaccaccttcattagggtgactcagcaggtaaatccaatattctctgaggcgtgctag

SEQ ID NO: 190157 - DNA, 1779 bp, synthetic construct
  misc_feature 1..1779: note = Description of Artificial Sequence: Synthetic coding sequence
  source 1..1779: mol_type = other DNA
atggccagcgagatccacatgaccggccccatgtgcctgatcgagaatacgaatggacggctcatggccaaccccgaggcactcaaaattctgagtgctattacacagccaatggtggtggttgccattgtcggactgtaccgtaccggaaagtcgtacctgatgaacaaactcgccggcaaaaaaaaaggttttagtcttggaagtactgtgcagtcgcatactaaaggcatttggatgtggtgtgttcctcacccaaagaagccgggccatattctggtgctactggataccgaggggctgggggacgtggaaaagggagataaccagaacgacagttggatctttgcactagcagtgttgctgtctagcacatttgtctataattccatcggcaccataaaccagcaggcaatggatcagttatattatgtgaccgagcttactcacagaattaggtccaaaagctctcccgatgagaacgaaaacgaggtagaggactctgcagactttgtttcttttttccccgattttgtgtggacactcagggacttctctctagacttggaggctgacgggcagcccctaaccccggatgaatatttgacctactcccttaaactcaagaagggaacctcccaaaaagacgaaactttcaatttgccacggctgtgcatcagaaaatttttccccaaaaagaagtgttttgtgtttgatagacccgtgcatcgcaggaagttggcccagttagagaaactgcaggacgaggagcttgatccggagttcgtgcagcaggtcgccgacttctgcagctacattttttctaacagcaagactaaaacgctctctggaggcattcaagtgaacggcccccgacttgagagtctcgtgcttacctatgtgaacgccatcagctccggtgacctgccctgtatggagaacgccgtgcttgcccttgctcaaatagaaaactcagcggcggtgcaaaaggccatcgcccactatgaacagcaaatgggacagaaagtgcagcttcctaccgaaaccctgcaagagctccttgatctgcaccgagactccgaacgagaagccatcgaggtcttcatccgcagctccttcaaagatgtggatcacctgttccagaaggagttagctgcacagcttgagaagaagcgggacgacttctgcaagcaaaaccaagaggccagtagcgatagatgttctgccttgttacaggtcattttctccccattggaggaggaagtcaaggccgggatctacagcaagccggggggctatcgcctcttcgtgcagaagctgcaagacctgaaaaagaaatattatgaggaaccccgcaaaggtatacaggctgaggagatcctccaaacatatctcaaaagcaaggaaagcatgaccgacgccattttgcaaaccgatcaaacccttaccgagaaggagaaggaaatagaagttgagagagtcaaagccgaatctgctcaggcttctgccaaaatgctgcaggagatgcagagaaagaacgagcaaatgatggaacaaaaggagagatcctaccaggagcatctcaaacagctcactgaaaaaatggaaaacgaccgagtccagctgctgaaggagcaggaaaggaccttggccttaaaattacaagaacaggagcaactgctgaaggagggatttcaaaaggagtctcgcatcatgaagaacgaaattcaggatctgcagaccaagatgcgcagaagaaaagcctgcacgataagctag

SEQ ID NO: 190158 - DNA, 1668 bp, synthetic construct
  misc_feature 1..1668: note = Description of Artificial Sequence: Synthetic coding sequence
  source 1..1668: mol_type = other DNA
atggtggtggtggccatcgtgggcctgtaccggaccggcaagagctacctgatgaacaagctggcaggcaagaagaagggtttcagtctgggcagcactgttcagagccacaccaaaggtatttggatgtggtgcgtgccccatccaaaaaagcccggccacatattagtgctgctggacacagagggcctgggggacgttgagaaaggtgataaccagaatgatagctggatctttgccctcgctgtgttgctgtcctccacgtttgtctataactcgatcggcacaatcaaccaacaggctatggaccagctgtattacgtaaccgagctgacacatcgaatccgttctaagtctagccctgatgagaacgaaaacgaggtcgaggattcagccgactttgtctctttctttccggacttcgtgtggactttgagagacttcagtcttgatctggaagctgacggtcagccactgactcccgacgaatacctgacctactccctcaagttgaaaaaagggacctcccagaaggacgaaaccttcaacctgcccagactatgcattcgcaaattctttcctaagaaaaaatgctttgtctttgaccggccggtccacaggcgcaagctggcccagcttgagaagctccaggacgaggaacttgacccagagttcgtacagcaggtggctgacttctgtagctatatattttctaatagcaagactaagactctgtcagggggaattcaggtgaatggtccacgattggaaagcttagtcctcacgtacgtcaatgccatatccagtggggacttaccatgtatggagaatgcagttctggcactggcccagatcgaaaattcagcggctgttcagaaggccattgcccattatgaacaacagatgggccagaaggtgcaattgcctacagaaactttgcaggagctgctagatttgcatagagatagcgagagggaagcaatcgaagtcttcattcgctcttccttcaaagatgtagaccacctgttccagaaggagctggccgctcagctggagaagaaacgagatgatttttgtaagcagaaccaagaagctagttccgatcgatgctctgccttgctccaggtgatttttagtcctctcgaagaagaagtcaaggcaggcatctattcgaaaccaggggggtacagactgttcgtacaaaaacttcaggacctgaaaaaaaagtattacgaggagccccggaaaggcatccaggccgaggaaattttacaaacctacctgaagtcaaaagagagtatgactgacgcaatcttgcagaccgatcagactcttacggagaaggagaaggagatcgaggtcgaacgcgttaaagcagaatcagcacaggcatctgctaaaatgcttcaggaaatgcaaaggaagaacgagcagatgatggaacagaaggaaagatcctaccaggagcatttgaagcaactgacagagaaaatggaaaacgaccgagtgcagctccttaaggagcaggagagaacacttgctctcaaattacaggaacaggagcagctgctgaaggaaggatttcagaaagagtctaggataatgaagaacgaaatccaggacctccaaaccaagatgagaaggcgaaaagcctgtactataagctag

SEQ ID NO: 190159 - DNA, 1776 bp, synthetic construct
  misc_feature 1..1776: note = Description of Artificial Sequence: Synthetic coding sequence
  source 1..1776: mol_type = other DNA
atggcccccgagatcaacctgcccggccccatgagcctgatcgacaataccaaaggacagcttgttgtaaatccggaggcattgaaaatcctgagtgcgattacacaacccgtcgtggtcgtggcgatagtgggcctgtatcgcacgggcaaatcttacctcatgaacaaattggcgggcaagaagaacgggttttccctggggtccacggtcaagtcacataccaaagggatctggatgtggtgcgtcccgcacccaaagaagccggagcacacgcttgtcctcttagacacagaggggttgggcgacatcgaaaaaggcgacaacgaaaatgacagctggattttcgctctggcaatcctcttgagttctaccttcgtatataactcaatgggcaccataaaccagcaggccatggaccagcttcactacgtaacggagctcaccgataggattaaggctaattcatcacccggaaataactcggtcgacgattccgccgactttgtgtcattcttccccgcatttgtctggacactgcgagactttacccttgagcttgaggtggacggcgaacctatcacggccgacgactacctcgaattgagtttgaaactccgaaaggggacggacaagaaatccaagtcatttaacgaccctcggctttgcatcaggaaattttttcctaaaagaaagtgttttgttttcgactggcccgctccaaagaagtatctcgctcacttagagcagctgaaagaagaagaactaaacccggacttcatcgagcaggtcgccgaattctgctcctacattctttctcacagcaatgtcaagactctgtccggcggcatacctgtgaacggtcctagattggagagtttggtcctgacctacgtgaacgcaatctctagtggagacctgccttgcatggaaaacgctgtgctagcgctggcccagattgagaattccgcagccgtggaaaaagcaatcgcacactatgagcaacagatgggtcaaaaagtgcagctgcccacagagaccctgcaggaacttctggatctgcacagagatagtgagagggaggccattgaagtcttcatgaagaattcctttaaggacgtagatcagatgtttcagagaaagctgggggctcaactggaggcccgtagggatgacttctgtaagcagaattccaaagcaagctctgactgctgtatggccctgctgcaggatatcttcggcccccttgaagaagacgtcaagcagggtacttttagcaaaccaggtgggtaccggcttttcactcagaaattacaggagctgaagaacaaatactatcaggtgcctagaaaggggattcaggcaaaggaggtacttaagaagtatctggagtcaaaggaggatgtcgctgatgctctactccagacagatcagagtctgtcagagaaagagaaagcgattgaagttgagagaattaaagcagagtctgccgaagcggccaaaaagatgcttgaggaaatccagaaaaaaaatgaggaaatgatggaacaaaaagagaaatcctatcaagagcacgtcaagcaacttactgaaaaaatggaaagagaccgcgcacagctaatggccgaacaggagaaaaccctggcactgaagctgcaggaacaggaacgacttctaaaagaaggatttgagaacgagagcaagaggctacagaaagatatttgggacatccagatgcgttccaagtcactcgaaccaatttgcaatatactgtag

SEQ ID NO: 190160 - DNA, 1776 bp, synthetic construct
  misc_feature 1..1776: note = Description of Artificial Sequence: Synthetic coding sequence
  source 1..1776: mol_type = other DNA
atggcccccgagatcaacctgcccggccccatgagcctgatcgacaatacgaaagggcagctagtcgtaaatcctgaggctttgaagattctctccgcgattactcagcctgtggtggtggtggccatcgtaggcctgtaccgcacgggcaagtcctacctcatgaataaactggccggtaaaaaaaatgggttcagcctgggctcgactgtgaaatcccacacgaagggcatctggatgtggtgtgtccctcaccccaaaaagccggaacatacactggtgctgctcgataccgagggcctgggcgacattgagaagggggacaacgagaatgatagttggatctttgcgttggccatcttgctatcgtccacttttgtctacaatagcatgggcactatcaaccagcaggccatggatcagctgcactatgtcaccgagctgaccgacaggatcaaagccaacagtagcccggggaacaattcagtggacgattcggccgacttcgtttctttcttcccggccttcgtctggacgctcagagactttacccttgaacttgaggtggacggagaacctatcacggctgatgattatcttgagctgtcgcttaagttacgcaaaggcactgataaaaaatcaaaatcattcaatgatccacgactgtgcattagaaagttttttcccaagcggaagtgcttcgtatttgactggcccgcccctaagaagtacttagcgcacctggaacagcttaaggaggaagaactgaaccctgatttcatcgaacaagtcgccgaattctgcagctatatactctcccatagcaacgtcaaaaccctgtcagggggcatcccggttaatgggcctaggctcgaaagtcttgttctgacttacgttaatgctatttcatcaggggacctgccttgtatggagaatgcagtgctcgcgctggcccagattgaaaacagtgctgcagtggaaaaggcaatcgctcattacgagcagcagatgggtcagaaagtgcagcttccgaccgagaccctgcaggaattgctggatcttcatcgggactctgaaagggaggccattgaagtgttcatgaagaattcgttcaaagacgttgatcagatgtttcaaagaaagctgggcgctcagttggaggctcgacgtgatgatttctgcaaacagaattcaaaggccagcagcgactgctgtatggcccttttacaagatatttttggacccctggaagaggacgttaagcaaggcaccttttccaagcctggaggttatcggttgtttactcaaaagcttcaggagttgaagaacaaatactatcaggttcctcgtaaggggattcaggccaaagaagtgcttaagaaatatcttgaatccaaggaagatgtcgccgatgccttgttgcagaccgaccagtctctaagcgagaaggaaaaagctatcgaggtggagcgtattaaggctgagagtgcagaggcagccaagaaaatgctggaggaaatccaaaagaaaaacgaggagatgatggaacaaaaagagaagtcctaccaggaacatgttaaacaactgacggaaaagatggagagggaccgcgcacaactcatggcagaacaggagaagactctcgccctcaaactgcaggagcaggaacggctactgaaagaggggttcgaaaacgaatcaaagaggttacagaaggatatttgggatatccagatgagatccaaatccttagaaccaatttgcaacatcttgtag

SEQ ID NO: 190161 - DNA, 1323 bp, synthetic construct
  misc_feature 1..1323: note = Description of Artificial Sequence: Synthetic coding sequence
  source 1..1323: mol_type = other DNA
atggcccccgagatccacatgaccggccccatgtgcctgatcgagaataccaacggcgagctggtggctaaccccgaagctctgaagatcctgtctgcaataacgcagcccgtggttgtcgtggctatcgtcgggctatacagaactggtaagtcctatctcatgaataaacttgccggcaaaaataagggcttctccttggggtctaccgttaagagtcacaccaagggaatatggatgtggtgtgttccccatccgaagaagcctgagcacacattggtgctgctcgatacggagggcctcggcgacgtgaagaaaggcgacaaccagaacgattcatggattttcaccttggcggtgctgttgtcaagcacacttgtgtacaactcaatgggaaccattaaccagcaagcaatggaccagctctattatgtcacagaactcacccatcgaatccggagtaagagctcgccagatgaaaacgagaacgaggatagcgcggattttgtcagcttttttcccgattttgtttggaccctcagggacttcagtctggacctagaggccgatggccagcctctaacaccagacgaatacttagagtattctctgaagctaacacaaggcactagccagaaggacaagaatttcaacctgcctcgcctctgcattagaaagtttttcccaaaaaagaagtgctttgtcttcgacctcccaattcatagaagaaagcttgcccagttggagaagctccaggatgaagaactggatccagaatttgtacagcaggttgcagacttttgctcctatatcttttccaattctaaaaccaagacattatcaggaggaattaaagtaaacggaccccggctggagagtctggtactgacttatatcaacgcaatttcccggggagacctgccctgcatggagaacgcagtccttgctctcgctcaaatagagaattccgccgccgtccagaaagctatcgcacactacgatcaacaaatgggccagaaggttcagcttcctgccgaaaccctgcaggagctgctcgacctgcatagagtttcagaacgggaggcgactgaggtctatatgaagaattcctttaaggatgtagaccatcttttccagaaaaagctcgccgcccagcttgataagaagagagatgacttttgtaagcagaatcaggaagccagctctgataggtgctctgcactcctccaagtgatcttcagtcctctggaagaagaggtgaaggcaggcatctactccaagcccggtggctactgcctgtttatacagaaactgcaggactag

SEQ ID NO: 190162 - DNA, 1788 bp, synthetic construct
  misc_feature 1..1788: note = Description of Artificial Sequence: Synthetic coding sequence
  source 1..1788: mol_type = other DNA
atggcccccgagatccacatgaccggccccatgtgcctgatcgagaacaccaatggcgagctagtcgcaaaccccgaggccctgaagattctgagtgcaattacacaacccgtggtcgtggtggctatagtgggcctctaccgcacagggaaaagctacttgatgaacaagttggcgggaaagaataagggtttttccctcgggtcaactgtgaaaagccacacaaaaggaatctggatgtggtgtgtaccccaccctaagaagccagagcatacactggttttgctggacaccgagggcctgggtgacgtcaagaagggcgataatcagaacgactcttggatattcaccctcgctgtcctactaagcagcaccctggtttataactcaatgggcaccattaatcagcaagcaatggatcaattgtattacgtgacggagctgacccaccggattcgatccaagtcatcacccgacgaaaacgagaacgaggattccgctgactttgttagctttttccccgacttcgtgtggacactgagggacttctctctggatctcgaggctgacggacaacctcttacccccgatgaatatctggaatacagtttgaaactaacccagggaaccagccagaaggataagaactttaacctcccacggctgtgtatcagaaagttcttcccaaagaagaagtgcttcgtgttcgatctccctatacataggcggaagttggcccagttggaaaagttgcaggacgaggagctcgaccccgaattcgtacagcaggtggctgatttttgttcatacattttctccaactcaaaaacgaagacactgtcaggaggtattaaggtgaacggaccgagacttgagtctctggtgctgacatatatcaatgcaattagtaggggggatttaccctgcatggaaaacgcggtgttagcgcttgcccagatcgagaactccgccgctgtacagaaggccattgcccactacgaccagcagatgggccagaaagtacaactcccagccgaaaccttgcaggagctgctggacctccaccgtgtgagtgagcgagaggctaccgaggtctatatgaagaatagttttaaggacgtggatcacctgttccagaagaagttggccgcacaactcgacaagaagcgtgacgatttttgtaagcagaaccaggaagcgtctagcgacaggtgttccgccctgcttcaagtgatattcagccctctggaagaggaagttaaagccggaatttattctaagcctggtggatattgtcttttcattcagaaactccaagacttagagaagaaatactacgaggagccacgaaaggggatccaggcggaggagatcctccaaacctatctcaaatctaaagaatccgttacggacgctatcctccagaccgatcagatcctgaccgagaaggaaaaagagatagaagttgaatgcgtaaaagcagaaagcgcccaggcgtccgccaaaatggtggaagagatgcagattaagtatcagcaaatgatggaggagaaggagaaatcatatcaggagcatgtgaaacagctcacggaaaagatggagcgagagcgggcacagctactggaggagcaggagaagacccttacctcaaagctccaggagcaggcacgcgtcctgaaagagaggtgccagggagaatctactcaactgcaaaacgaaattcaaaaactgcagaagaccctgaagaaaaagacaaaacgttatatgtcccataagttaaagatctag

SEQ ID NO: 190163 - DNA, 1692 bp, synthetic construct
  misc_feature 1..1692: note = Description of Artificial Sequence: Synthetic coding sequence
  source 1..1692: mol_type = other DNA
atggcccccgagatccacatgaccggccccatgtgcctgatcgagaacacaaacggagagctggtggcgaaccccgaggctttaaaaatcctgtctgctatcacacagcccgtggtcgtggtggccatcgtgggcttgtatagaacaggtaaaagttatctcatgaacaagctggccggcaagaacaagggcttctcactcgggagtaccgtgaaatctcatacaaaaggaatatggatgtggtgcgtaccccatccgaagaagcctgagcacactctggtgctgttagatactgagggcctgggcgacgtcaaaaagggtgacaaccagaatgactcctggatatttacactggctgtgcttttgagtagtaccctggtctacaactccatgggcacaattaaccagcaggctatggaccagctgtactacgttacggaattgacccataggatcagaagcaagagctctccagatgagaatgagaatgaggattcagccgacttcgtctcgttcttccctgattttgtatggacattgcgggactttagtctcgatttggaggctgacgggcagccgctgacgccagatgagtatctggaatacagtctgaaactcacacaaggcaacagaaagcttgctcagctcgagaaactccaggatgaggagttagaccctgagtttgttcagcaggtggctgacttctgctcttacatttttagtaattctaaaactaagactctgtctgggggcatcaaagtgaacggtcccaggttggagtcgctggtgctgacctacattaacgctatctctcggggtgatctcccatgcatggagaacgccgtcctcgccttggcccagatagaaaacagcgctgcagtccagaaggcaatcgcacactacgaccagcagatggggcagaaggtccagctgcccgccgagaccttacaggaactactggacctgcatcgggtgtcagaaagggaggcgacagaggtctacatgaaaaactccttcaaggatgtggaccatctgtttcagaaaaagctcgccgctcaactggacaagaaaagggacgacttctgtaaacagaaccaggaggcatcatcagatcggtgcagcgctctgctgcaggtcattttctctccattggaggaggaggtaaaggccggcatttactccaagcccggcggatactgtctctttatccagaagttgcaggatctggaaaaaaagtactacgaagagccacgcaagggaatccaagctgaggagatcttgcaaacatatctcaaatcgaaagaatctgtgactgacgcgatactgcagaccgaccagatcctcactgaaaaggagaaggagatcgaagtggagtgcgtgaaagccgagtcggcacaggcgtccgctaagatggtggaggagatgcagatcaagtaccagcagatgatggaagagaaggaaaaatcataccaagaacatgtaaaacagttaaccgagaagatggaacgcgagcgtgcccagttattagaagaacaagagaagacactgaccagtaaactgcaggaacaggctagggtgctgaaggagagatgtcagggggagagcactcagctgcagaatgaaatccagaagttgcaaaagactcttaagaagaagaccaaaagatacatgagccataagctgaaaatttag

SEQ ID NO: 190164 - DNA, 414 bp, synthetic construct
  misc_feature 1..414: note = Description of Artificial Sequence: Synthetic coding sequence
  source 1..414: mol_type = other DNA
caggacgaggagctggaccccgagttcgtgcagcaggtggccgacttctgcagctatattttctccaatagcaaaacaaagaccctgagtggcggtatcaaggcagaggagattctgcagacgtatctaaaaagtaaagagagtgtgacggatgctatcctgcaaaccgaccagattcttaccgagaaagaaaaggagattgaagtggagtgcgtcaaggcggaaagtgcccaggcgtccgcaaaaatggttgaggagatgcagatcaagtaccaacagatgatggaggagaaggagaaatcttaccaggagcatgttaagcagctcactgagaagatggagcgggaacgcgcccagctgcttgaagaacaggagaaaactttgacttcgaaactgcaggtttccaagtgctag

SEQ ID NO: 190165 - DNA, 1923 bp, synthetic construct
  misc_feature 1..1923: note = Description of Artificial Sequence: Synthetic coding sequence
  source 1..1923: mol_type = other DNA
atgggcgagcggaccctgcacgccgccgtgcccacccccggctaccctgaatccgaatctattatgatggctcctatatgtctcgtggagaaccaggaggaacagttgaccgtgaattccaaggccctcgaaatactggacaagatctcacagccagtcgtcgtggtggctattgtgggactgtatcggacaggcaaatcatacctgatgaaccgtctggccgggaaaagaaatggatttccactgggatctacggtccagtcagagacaaaaggaatttggatgtggtgtgtgcctcacctctctaagcccaaccacacacttgtgctcctggacacggagggtctgggagacgtcgagaaatctaatccaaaaaacgactcatggattttcgctctggcggtcctgttaagcagtagcttcgtgtacaactctgtcagcactataaatcatcaagcgcttgaacagctccattatgtgactgagctcgcagagcttataagggccaagtcctgccctcgcccagatgaggccgaagactctagcgagtttgcatcctttttcccagacttcatatggaccgtgcgcgacttcacccttgagttgaagctcgatgggaatcccatcactgaagatgagtacctcgagaacgcactgaaactgatccccggcaaaaaccccaagatccagaactcaaatatgcctcgcgagtgcattagacacttctttagaaaaagaaaatgttttgtctttgatcgacctaccaacgataagcagtaccttaaccacatggatgaggtacctgaggagaaccttgaacgccatttcctgatgcaatcggacaacttttgctcgtatatttttacacacgctaagacaaagactttaagagaagggataatagttacaggcaagaggttggggacactggtagtgacgtacgttgatgctatcaactccggcgctgttccatgtctcgagaatgcagttaccgccttggctcaacttgaaaaccctgcagctgtgcagcgcgccgccgaccattatagccagcagatggcacagcagttgcggctgcccacagatacactccaggagcttctcgacgtacacgcagcatgtgaaagagaagccattgctgtttttatggagcactcttttaaggatgagaaccacgaatttcagaagaaactcgtggacacaatcgaaaagaagaaaggagacttcgtgctacagaatgaggaggcatccgccaagtattgccaagctgagttgaaacgtctgtccgagcacctaactgagagcatcctgagaggcatctttagtgttcctggcggccacaacctgtacctggaggagaagaaacaagtggagtgggattacaagctcgtgccccgtaagggggtgaaggcaaacgaagtgcttcagaacttcctgcagagccaggttgtagtcgaggagagcattcttcagtcagataaggccctcacggctggagagaaggctatcgcagcagagcgggcgatgaaggaggccgctgaaaaggagcaggagctcctacgcgaaaagcagaaggaacagcaacagatgatggaagcccaggagcggtccttccaggagtatatggcccagatggagaagaaactggaggaagagagggaaaacctgcttcgagagcatgagagattgctgaagcacaaactgaaggtccaggaggagatgttgaaggaggagttccagaagaagtcagaacagctgaataaggagatcaatcagctgaaagagaagatcgagtccaccaagaacgagcaactgcgcctactgaaaatactagacatggcaagtaatatcatgattgttacgctccctggggcctccaaactgctaggagtggggactaaatatctcggtagccggatctag

SEQ ID NO: 190166 - DNA, 1761 bp, synthetic construct
  misc_feature 1..1761: note = Description of Artificial Sequence: Synthetic coding sequence
  source 1..1761: mol_type = other DNA
atggccctggagatccacatgagcgaccccatgtgcctgatcgagaacttcaacgagcagctgaaagtcaatcaggaagccctcgaaattctgagcgccattacacagcctgtggtcgtggtggccatcgtagggctttatcgcaccggcaagagctatctgatgaataaactcgctggtaagaacaaaggcttttcggtagcttccaccgtgcaaagtcataccaagggaatctggatctggtgcgtcccacaccctaattggccgaaccatactctggtgctgcttgacacagagggcttgggtgatgtcgagaaggctgacaataagaacgacattcaaatattcgcgttagctcttcttctctcaagcacgttcgtttacaataccgtgaataagattgatcagggggctatcgatctgctgcacaatgtaacagaattgaccgacctcctgaaggccagaaattctccagacctggaccgggttgaagaccctgccgactcagcgtccttctttcctgacctggtgtggacattacgggatttttgtctggggcttgaaattgacggacagctggtaacaccagacgagtacctggagaacagcctgaggcccaagcaggggagcgatcagagggttcagaactttaacctgccacgattgtgtattcaaaaatttttccccaaaaaaaagtgtttcatattcgatctccctgcacatcagaaaaagttagcccaactggagacccttcccgacgacgagctggagcccgaattcgtccagcaggttactgagttctgtagctacattttctcacactccatgacgaagaccctgccgggaggcatcatggtcaacggaagccgactgaagaatttagttctgacctacgtgaatgcaattagttctggtgatctgccatgtatagaaaacgcggtgcttgccctggcccagcgtgagaatagcgccgctgtgcagaaagctatcgcacattacgatcaacagatggggcagaaagtgcagctgccaatggagaccttgcaggagttgctggatctgcatcgcacatccgagagagaggcaatcgaagtgttcatgaaaaactcgttcaaggatgtcgatcagagcttccagaaggagctagaaacactcctggacgccaagcagaacgacatttgtaagagaaacctcgaggcttcaagtgattactgttccgcgctacttaaagatatctttggaccacttgaggaggctgttaagcagggaatctactccaagcctggaggacacaacctcttcatccagaaaacagaagagttgaaggccaaatactatagggagccacgtaagggaatccaggctgaggaagtgttgcagaaatatttgaaatccaaagagtcagtgtctcatgctattttgcagaccgaccaggctttgacagaaactgagaaaaagaaaaaagaggcacaggtaaaggcagaagcagaaaaggccgaggcccagagattggctgcgatccagagacagaatgagcagatgatgcaagagcgagagcgcctgcaccaagagcaggtacggcaaatggagattgcaaagcagaactggctcgcagaacagcagaagatgcaagaacagcagatgcaggagcaggcagcccagctaagtacgacattccaggcacagaataggtcactcctgtccgagctgcagcacgcccagcggactgtcaataacgacgacccttgtgttctgctttag

SEQ ID NO: 190167 - DNA, 1761 bp, synthetic construct
  misc_feature 1..1761: note = Description of Artificial Sequence: Synthetic coding sequence
  source 1..1761: mol_type = other DNA
atggccctggagatccacatgagcgaccccatgtgcctgatcgagaacttcaatgagcagctgaaggtgaaccaagaggccctggaaatactgtccgccataactcagcctgttgtggtggtagctattgtgggcctataccggaccggcaagagctatcttatgaataagctggctgggaagaataagggcttcagtgtggcttccacggtgcagtctcacacgaaaggcatttggatttggtgcgtcccccaccctaattggcctaaccacaccctagtgctgctagataccgaaggacttggggatgtggagaaggccgacaacaaaaatgacattcagatttttgccctggcgttgctgctttcctctaccttcgtgtacaacacagtgaataaaatcgaccaaggagctattgacctcctgcacaacgtgaccgaactaacggacctgctgaaggccaggaactctccggatctggatcgtgtcgaagaccctgcagatagcgcgtctttctttcctgatttggtgtggaccctgagggatttctgtctggggctcgaaatcgacggtcagcttgtgacccctgacgagtatctcgagaatagtctgagaccaaaacagggctccgaccaacgggtgcaaaattttaacttaccaagactgtgtattcagaagtttttccccaagaaaaaatgcttcatttttgacctcccagcacatcaaaagaagctcgcacagctggaaaccctccccgatgatgaactagaacctgaattcgttcaacaggttaccgaattttgttcgtatatcttttcacacagcatgacaaaaactctgccgggcggtatcatggtgaatggatcaaggctgaagaacctggtgctgacctatgtcaacgccataagttccggcgacctcccctgtatcgagaacgccgtactcgccctagcccagcgggaaaatagcgcagctgtacagaaagctatcgcccattacgaccaacagatgggccagaaagtgcagctgcctatggagacactacaggagctgttggacttgcacagaacgtccgagagggaagctatcgaagtctttatgaaaaactcatttaaagatgtggaccagtctttccagaaggaattggaaactcttctcgatgcaaagcaaaatgacatttgtaaacggaatctggaagcatcctccgactattgctctgccctccttaaagacatttttgggccactggaggaggccgttaaacaggggatatacagtaagcccggcggacacaacctcttcatacagaaaacagaagaactgaaggccaagtactatcgggaacctcggaagggcatacaggctgaagaggttctgcagaaatatctgaagtctaaggaatcggtctcccatgccattctccagaccgatcaggctctcaccgagacagagaaaaagaaaaaggaagcccaggtgaaagctgaggctgaaaaggcggaggcacagagattggcagctatccagcggcagaacgagcagatgatgcaagaacgggaaagattgcatcaagagcaggtgaggcagatggagatcgctaagcaaaattggcttgccgagcaacagaaaatgcaggaacaacaaatgcaagaacaggctgctcagttgagcacaacatttcaggcccaaaacagaagcctgctttcagagttacagcacgcccaacgcacagtcaacaatgacgatccttgcgtactcctatag

SEQ ID NO: 190168 - DNA, 1452 bp, synthetic construct
  misc_feature 1..1452: note = Description of Artificial Sequence: Synthetic coding sequence
  source 1..1452: mol_type = other DNA
atggccctggagatccacatgagcgaccccatgtgcctgatcgagaattttaatgagcagctgaaggtgaaccaggaagcgctggagatattatcggcgataacacagcccgtggtggtggtggccatcgtaggcctttatcggacggggaagtcctatcttatgaacaagctggcagggaaaaacaaggggttcagcgtcgctagcactgtccagagccataccaaaggtatttggatctggtgcgtcccccatcctaattggcctaatcacactctggtcctgctcgatacagagggtctgggagatgtcgagaaggccgataataaaaatgatatacagatcttcgccctggctttgttactgtccagcacattcgtttacaacacagtcaataagatcgaccaaggcgccatagatcttcttcataatgtaaccgagcttacggacctgctcaaagcaagaaactcccctgatttagatagggtggaagatccagcagacagcgcttcattcttccctgacttagtatggacactgcgggacttttgtctagggctcgagattgacggacagctcgtcacacccgatgagtatctcgaaaactcactccggcccaaacaagggtcagaccagcgagttcagaatttcaatctgccgaggttgtgcattcagaagttctttccaaagaagaaatgcttcattttcgacttacccgcccatcagaagaagctggcacagctggaaacattgccagacgacgagctggagcctgaattcgtccagcaggtgaccgaattttgttcctacatattctcccattcaatgacaaaaacactccccggagggattatggtcaatggatcccggcttaaaaaccttgtgttgacatacgtgaatgctatttcttcgggggatcttccctgtatagaaaacgcagtgttagccctggcccagagggaaaacagcgccgccgttcagaaggcaattgcgcactatgaccagcagatgggccaaaaagtacagttaccgatggagacgcttcaggagctactggatctgcatcggacctcagagcgtgaagccatagaagtctttatgaagaactctttcaaggatgttgatcaatcttttcagaaagagctcgagacgctgcttgacgccaagcagaacgatatatgtaaaaggaacctggaagcctccagcgattactgctccgccttgctcaaggatatattcggaccactcgaagaggccgtgaagcagggcatctattctaagccgggcgggcataatctgttcattcagaaaacagaggagctcaaagccaaatattaccgcgagccacggaaaggaattcaagccgaggaagtcctccaaaaatatctgaagagtaaagagtccgtcagtcacgccatcttgcaaacagaccaggctctcaccgagacttag

SEQ ID NO: 190169 - DNA, 1917 bp, synthetic construct
  misc_feature 1..1917: note = Description of Artificial Sequence: Synthetic coding sequence
  source 1..1917: mol_type = other DNA
atggccagcgagatccacatgcccggccccgtgtgcctgaccgagaacaccaaggggcacctggtggtgaactctgaagctctggaaatcttgtccgccattacgcagcccgtggttgttgttgcgattgtgggattatatcgcacagggaagtcctatctaatgaataagttagcaggcaaaaataagggattccccctgggctgtacagtgaagagcgaaaccaaagggatctggatgtggtgtgtccctcatccttctaagcccaaccacaccctgatactgctggacaccgaggggcttggggacatggagaagtcagaccccaaaagtgactcctggatcttcgccctggcagttctgttatcttcctcatttgtgtataattccatgggtaccattaatcatcaagcgctcgagcagctccactacgttactgagttaaccgaattaatccgcgccaaatcctgccctagaccagacgaagtagaagacagcagtgagtttgtttcgttcttccccgacttcatatggacagtgagggacttcacactcgagctcaaactcgacggacatccgattaccgaggatgagtacctggaaaacgcgctcaagctcatatccggcaagaacccacagattcagaacagcaataagccccgtgagtggattcggcatttctttccaaaacaaaaatgcttcgtgtttgatcgcccgatcaacgacaaaaagctcctcctgcacgtggaagaggtgcgggaagatcaactggatagtaatttccagatgcagtcagagaacttctgttcctacatttttacacatgccaaaacaaagaccctccgcgaaggcatccttgtgactgggaacagactgggcatgcttgtcgagacgtatttggacgcaattaatagcggcgctacaccctgcttggagaacgcaatggctgtactcgcgcagtgcgagaatagcgccgctgtccaacgggccgccaatcactactcacagcagatggcccagcaagtccgttttccaaccgatacactgcaggaactgctagatgtacacgcggtttgcgaacgtgaggcaatagctgtattcatggagtatagttttaaagacaagtcccaggagttccagaaaaaattagtagataccatggagaaaaagaaagaggactttgttttgcagaatgaggaggcgagtgccaagtactgtcaggccgagttgaaacgcctatcagagctgctcactgaatcgatctctagaggcacgttttttgtgccagggggccacaatatttatctggaggccaagaagaaaatagaacaggattataccctggtgccacggaagggcgtcaaggctgatgaagtcctacagagtttccttcaatcacaggtcgtgatcgaggagtctattctccagtcggacaaggcactgacagccggggagaaagctatcgctgctaagcaagccaaaaaggaagcagctgagaaagagcaagaactgctgagacaaaaacagaaggagcagcagcaaatgatggaagcacaagagcggagttttcaggaaaatattgctcaattaaagaagaaaatggagagggagcgggagaactacatgagagagctgagaaaaatgctgagccataagatgaaggttcttgaggagctgcttaccgaggggtttaaggagatcttcgagtctctcaacgaggagatcaacaggttaaaggagcaaattgaggccgccgagaatgaggaaccaagtgtattctcccagattctggacgttgcagggtctatcttcatcgctgctctcccaggcgccgccaagttggtggatttgggtatgaaaatcctgtcttctttgtgcaacagactaaggaatccaggcaagaagatcatctcgtag

SEQ ID NO: 190170 - DNA, 1902 bp, synthetic construct
  misc_feature 1..1902: note = Description of Artificial Sequence: Synthetic coding sequence
  source 1..1902: mol_type = other DNA
atggagagcggccccaagatgctggcccccgtgtgcctggtggagaacaataacgagcagctgctcgtgaatcagcaggccatccagattttagagaagataagccaaccagtggttgtggtagcaattgtgggcctgtatcggacaggcaagtcttatctgatgaatcacctggcaggccagaatcacgggtttcctttgggatcaacagttcagagcgagacaaaagggatatggatgtggtgcgtgccccatcccagtaagccaaaccacacactggtccttcttgacactgagggtcttggtgatgtggagaagggcgaccccaagaatgatagttggattttcgccctcgcggttctgctttgctctacgttcgtgtacaatagcatgtctacaattaaccaccaggccctggaacagcttcactatgtcacggagcttacagaactcatcaaggcgaaatctagcccacggcccgacggtgtagaagacagtacggagtttgtaagcttcttcccagattttctctggaccgtgagggattttacactcgaattaaaacttaacggacatccaattacagaggacgagtatctggagaatgcattgaaactcattcaagggaataaccctagggtccagacttccaattttccaagggagtgcataagaaggttcttcccaaagcgcaaatgctttgttttcgacagaccgactaacgataaggaccttctcgctaacatcgagaaggtctcagagaaacagctcgatcccaagttccaagaacagaccaatatattttgcagctacatattcacacacgctcgcacaaaaacactgagagagggcattacggtaaccggaaacaggctggggacattggcagtcacctatgtggaagccatcaattcaggcgcggtaccatgtctggagaacgccgtgattacattggcccagcgggaaaactccgcggctgtgcagagagccgcagattattattcccaacaaatggctcagcgcgtgaaactcccaactgatacactgcaggagttactcgatatgcacgcggcatgcgaacgggaagctatcgccatcttcatggaacatagttttaaagatgagaaccaggaattccaaaaaaaatttatggagactaccatgaacaaaaaaggggatttcctgttacagaacgaggagagctctgtgcagtactgccaggccaagctcaatgagctgtcaaagggactaatggagtctatttccgccggaagtttctccgtgcccggcggacacaagctctacatggagacaaaggagcgaatagagcaggactactggcaagtgccacggaaaggtgtcaaagccaaggaggtgtttcagcgttttcttgagagtcagatggtaatcgaggaatctattctgcagagtgataaagcgctgacagatcgggaaaaggccgttgccgtcgatcgggcgaaaaaggaggctgcagaaaaggaacaggagttactcaagcaaaagctgcaggaacagcaacaacagatggaggcccaggataagtctcgaaaagagaatattgcccaactgaaagagaagctgcagatggaacgagaacatcttctcagagagcagattatgatgctcgagcatacacagaaagtgcagaatgactggttgcatgaaggctttaaaaaaaaatacgaggagatgaatgcagagattagccagtttaagcgcatgatcgacactaccaaaaacgacgacaccccctggattgctaggacacttgacaacttggcagacgaattgactgcgatcttgagtgcacccgccaagctgatagggcacggtgtgaagggtgtcagctccctgttcaaaaaacacaagctccctttttag

SEQ ID NO: 190171 - DNA, 1512 bp, synthetic construct
  misc_feature 1..1512: note = Description of Artificial Sequence: Synthetic coding sequence
  source 1..1512: mol_type = other DNA
atgagcaccatcaaccaccaggccctggagcagctgcactacgtgaccgaactgactgaactgattaaagctaagtcaagcccaaggcctgatggggttgaggactcaacggaatttgtcagctttttccctgactttctctggactgtgcgtgacttcacattggaactgaaacttaacggccatccgattacggaggatgaatatctggaaaacgcgcttaagttgatccaggggaataatccaagggtacagacctcaaactttccgagggaatgcatcagacgcttcttcccgaaacggaagtgttttgtttttgaccggcccaccaacgataaggacctcctcgccaacatagagaaggtgtccgagaagcaactggaccccaagtttcaggagcagacaaatatcttttgcagttacattttcacgcacgcacgaactaagacattacgcgagggcattactgtgacaggtaacagacttggcacactggccgtgacatatgtcgaggccatcaacagcggagctgttccttgcttggaaaatgcagtgattacactggcccagagggagaactcagcagccgtccagcgggcagccgactactattcgcaacagatggcccagcgggtaaaactgccaactgatacactgcaagaacttctggatatgcatgccgcgtgtgaaagagaggccattgctatctttatggagcatagtttcaaggacgagaatcaagaatttcagaagaagttcatggaaaccaccatgaataagaagggcgactttttactccaaaacgaggagagctcagtgcaatactgccaggccaaactcaacgaactctctaaagggctcatggagtccatatcagcggggtccttctccgtaccaggaggacacaagctgtatatggagactaaggagaggatcgagcaggattattggcaggtgccgcggaagggcgtgaaggctaaggaagtttttcagcgattcttagagagccagatggttattgaggagagcattcttcagagtgataaagctctcaccgaccgggagaaagctgtcgctgtagatcgcgctaagaaagaggccgctgagaaggagcaggaacttttgaaacaaaagctgcaggaacagcaacagcaaatggaggcccaggacaaatcccgaaaagaaaatatagcccagttgaaggagaagctgcagatggagcgggagcacctattgagagaacagatcatgatgctcgaacacacacaaaaggtgcaaaacgactggctgcacgagggctttaagaagaagtatgaggagatgaatgcagaaattagccagtttaaaagaatgatcgacactacaaagaatgatgatactccttggatcgctagaacactggataatttggccgatgagcttacagcgatcctgtccgccccagccaagctgattggacatggagtgaaaggtgttagttccttattcaagaagcacaagcttcctttttag

SEQ ID NO: 190172 - DNA, 1815 bp, synthetic construct
  misc_feature 1..1815: note = Description of Artificial Sequence: Synthetic coding sequence
  source 1..1815: mol_type = other DNA
atggagagcggccccaagatgctggcccccgtgtgcctggtggagaataacaacgagcaactgctcgtgaatcagcaggctatacaaattctcgagaaaatctctcagcctgtggtggtcgttgctattgtggggttataccggaccggcaagtcttacctcatgaatcacctggctgggcagaaccatgggttccccctggatactgaggggctgggagacgtagagaagggcgaccctaagaatgacagttggattttcgccctggctgtgctgctttgtagtacgtttgtgtacaattcaatgagtaccattaaccatcaagctttggagcagttgcactacgtcacagagcttacagagcttattaaggcaaaaagctcaccccgccctgacggagtcgaagacagtacagagtttgtcagcttttttcctgactttctgtggactgttcgggacttcaccctggaactgaagttgaacgggcacccgattaccgaagacgaatacctcgaaaacgcactcaagctgatccaggggaacaatccacgtgtccaaacaagcaatttccctcgagagtgcataaggcgctttttcccaaagcggaaatgtttcgttttcgatcgaccaactaacgacaaagacctgctggccaatattgagaaagtgagtgagaagcagctagaccctaagttccaagagcagaccaatatcttttgctcctacatttttacacacgccagaaccaagaccctcagggaaggaatcaccgttaccggcaacagactgggcacacttgccgtaacatacgttgaggctatcaactctggagctgtaccatgcctggagaacgcagtgatcaccctggcccagcgtgaaaatagtgctgcagtacagcgggccgctgattactactcccaacaaatggctcagcgagtcaagttgcccacagatacactgcaggagcttctcgatatgcacgcagcatgcgaaagggaggcgattgccatcttcatggagcactcattcaaggacgagaaccaagaatttcagaagaaattcatggagaccacaatgaataagaagggagacttcctgctccagaacgaggaaagcagcgtgcagtattgccaggctaagcttaacgagttgtcaaaagggctaatggaatctattagcgctgggtccttttccgtgcctggcggccacaaactctacatggagactaaggagaggattgagcaggattattggcaagttcccagaaaaggggtgaaagccaaggaagtgttccagcgtttcctcgagtcgcagatggtgatagaagaatctatcctgcaaagtgacaaggccttaaccgatcgcgagaaggccgtggccgtggatcgcgccaagaaggaagcagctgagaaagagcaggagttgctcaagcaaaaacttcaggagcagcagcagcagatggaggcccaggacaagagccgcaaagagaatattgcccagttaaaggagaagctacagatggaacgggagcatctgctcagggagcaaataatgatgctagaacacacacagaaggtccagaatgattggttacacgaggggttcaagaagaagtacgaggaaatgaacgccgagatctctcaattcaagcggatgatcgataccaccaaaaacgacgacactccttggatcgcccgcacactcgacaatttagcagacgagctgaccgcaatcctgtccgcgcctgcaaagctgatcggacacggggtcaagggggtgtcttccctgttcaaaaaacataagcttcctttctag

SEQ ID NO: 190173 - DNA, 1299 bp, synthetic construct
  misc_feature 1..1299: note = Description of Artificial Sequence: Synthetic coding sequence
  source 1..1299: mol_type = other DNA
atgaagagcaccaagcccagcctgagccccagcaagccccagagctctctggttataccaaccagcctattttgcaaaacgtttcccttccacttcatgtttgataaggatatgaccattctgcagttcggcaacggaatccggagacttatgaacagacgggacttccagggtaagcctaactttgaggagtactttgagattctcacgccaaagattaatcagaccttcagcgggatcatgacaatgctcaacatgcaattcgtagtcagggtgagaagatgggataattcagtaaagaagagcagtagggtcatggacttgaagggccaaatgatctacatcgtggagagtagtgctatcctgtttctcggctctccatgtgtcgataggctggaagacttcacggggagaggcctatatctatctgatattcccatccacaacgccctcagagacgttgttctgataggtgagcaagcacgtgctcaggacggcctgaagaaacgtctgggaaagctgaaggccactctggagcaagcgcaccaggcgctggaggaggaaaaaaaaaaaactgttgatctcttatgcagcatctttccttgcgaagtggcacagcaactgtggcaggggcaggtcgtgcaggccaaaaaattcagcaacgtgacgatgctgttttcagatatcgtgggattcacagccatttgtagtcagtgtagccccttacaagtcataacgatgctgaatgccctgtatacccggttcgatcaacagtgcggagagcttgacgtttacaaagtggaaacaattggggatgcatactgtgtggcaggtggcttgcacaaagagtctgatacacacgccgtacagatcgcactcatggcgttgaaaatgatggaactcagcgacgaggtgatgtctcctcatggagaacctattaagatgcgcatcggtctgcacagcggaagcgtctttgcgggagttgtcggagtaaagatgcctaggtactgcctgttcggtaacaacgtgactcttgcaaataagtttgagtcttgttccgtgccccgtaaaatcaatgtcagcccaactacctatcgcctgcttaaggattgtcccgggtttgtgtttactccacggagcagggaagaacttcctccaaacttcccgtcggaaatccccggtatctgtcatttcctggatgcttaccagcagggcacaaattccaaaccctgcttccagaaaaaggacgtggaggacggcaatgctaactttctgggaaaagcttcggggatagactag

SEQ ID NO: 190174 - DNA, 1875 bp, synthetic construct
  misc_feature 1..1875: note = Description of Artificial Sequence: Synthetic coding sequence
  source 1..1875: mol_type = other DNA
atgttctgcaccaagctgaaggacctgaagatcaccggcgagtgccctttttcgcttttggcccccgggcaggtccccaatgaatcatcagaggaagctgccggcagctccgagtcttgtaaagcaacagtacctatttgtcaggacatacccgaaaaaaacatccaggagtctctccctcagagaaaaacatcccgtagcagagtctatcttcacacccttgccgagtcaatttgcaagctgatctttcctgaatttgagagactgaacgttgctctccagaggaccctggccaagcacaaaatcaaggaaagtaggaaatccctggaacgtgaggattttgaaaaaactattgccgaacaagctgttgcggctggggtaccagtagaagtgatcaaagagagcctgggagaggaggtcttcaagatctgctatgaggaggatgaaaacatcctcggggtggtcgggggaacactaaaggacttcctgaactccttctcaactctcctgaaacagtctagccactgccaggaggccggtaaaaggggtcggcttgaagatgccagcatattatgcctcgataaggaagatgattttctccacgtctattacttcttcccaaaacggaccacctcgctgatcctgcctggaatcatcaaggcggctgcacacgtgctgtatgagacagaagtagaagtttccctgatgcctccttgctttcataacgattgctccgaattcgtgaaccagccgtacttactgtacagcgtgcatatgaaaagcaccaaacccagcttgagccctagcaaacctcagtcctctctcgttattcccacttcgctgttctgcaagacgtttccattccacttcatgtttgacaaagacatgaccattctccagttcgggaacggtataaggcgcctcatgaacaggcgcgatttccagggaaagccaaactttgaggaatacttcgagatcctcacccctaaaattaatcaaacattttccgggatcatgactatgctgaatatgcagttcgtcgtaagagtgagacgatgggataacagcgtgaagaaaagctcacgagtcatggacctgaagggacaaatgatatatattgtagaatctagcgctattttatttctcgggagcccttgtgtcgacagacttgaggatttcaccgggcgaggtttatacctatctgacattcctatccacaacgcgctgcgggacgttgtgcttattggcgaacaggcacgagcccaagacggcctaaaaaagcgcctgggaaagctgaaagcaaccctggagcaggcccatcaggcattagaagaagaaaagaagaaaacagttgatctgctgtgttccatctttccttgtgaggtggcccagcaactgtggcagggtcaggttgttcaggcgaagaaattttcaaatgtgaccatgttgttttctgatattgttggcttcaccgctatctgctctcagtgcagcccactgcaagtgatcaccatgctgaacgcattgtacacccgcttcgatcaacagtgcggcgaattggacgtatataaggtggaaaccatcggtgacgcctactgtgttgctggcggactgcataaagagtcagacacacatgccgtgcagattgccttaatggcactgaaaatgatggagctttctgacgaggtcatgtcaccgcacggggaacctatcaagatgcggattggcttgcacagcggttctgtgttcgctggcgttgtgggggttaagatgccccgctactgtctttttggcaataacgtcaccctggccaataaatttgagtcctgtagtgttccccgcaaaatcaacgtgtcacctacgacttatcgctag

SEQ ID NO: 190175 - DNA, 2292 bp, synthetic construct
  misc_feature 1..2292: note = Description of Artificial Sequence: Synthetic coding sequence
  source 1..2292: mol_type = other DNA
atgagccggcggaagatcagcagcgagagcttcagcagcctgggctcagattaccttgaaactagtccggaagaggaaggcgaatgtccacttagtcgcctctgttggaacggcagtaggtcacctcccggcccattagagcccagccctgctgcggccgcagccgccgcggcccccgctccaaccccagctgcatctgccgccgcagcggctgccacggccggagcacgccgggtgcaacgaagaagacgcgtgaatttggactccctaggtgagagcatcagcaggctgactgcaccaagcccccagactattcagcagaccttaaaacggactcttcagtattatgagcaccaggtgattgggtatcgggatgccgaaaagaatttccacaacatcagtaaccgatgcagctatgcagatcactcaaataaagaagaaatcgaagatgtctctggcatcttgcagtgcaccgctaacattctgggtctgaaatttgaggagatccagaagagatttggtgaggagttttttaatatctgtttccatgagaacgagagagtgctgcgggcagtagggggtaccttgcaggatttttttaacggctttgatgccctgttggaacacatccggacatcttttggtaagcaggcgacactggagtcaccaagcttcctgtgcaaagagcttcccgaggggaccttaatgctccactactttcacccccaccatattgttgggttcgctatgctgggaatgattaaggccgcaggaaaaaagatttaccggctggacgtggaggtggagcaggtggctaatgaaaagctttgtagcgacgtgtccaatccaggaaattgttcatgcctgacgttcttgattaaggagtgcgagaatacaaatattatgaagaacttgccacagggaacctcccaggtgcctgccgatttgagaataagcattaacaccttttgccgagcgtttccctttcatctgatgttcgatccatctatgagcgttctccagctaggggaaggccttcggaaacagttgcgctgcgatactcataaagtgctgaagtttgaagactgttttgagattgtgtcccctaaggtcaacgctacctttgaacgtgttctgctccgtctgagcactccgttcgtaattaggacgaaacccgaggctagtggaagcgaaaataaggacaaggttatggaggtgaaaggacagatgatccatgtacctgagtccaatagcatcctcttccttggcagcccctgcgtggacaagctggatgaactaatggggcggggcctgcacctgtctgatatccccatccatgacgccacacgcgacgttatcctggtgggggaacaggcgaaggcgcaagatgggctgaaaaagagaatggataaactgaaggcaacactggaacggacgcaccaggccttggaggaggagaagaagaaaacagtcgacctgctttattctatcttccccggagatgttgcacagcaactctggcaagggcaacaggtccaggccaggaagttcgacgatgtcaccatgctttttagcgacatcgtggggttcacagccatctgcgcgcagtgtaccccaatgcaagtgatcagtatgttgaatgaactgtatacccgcttcgatcaccagtgtgggttcctggacatatataaggttgagaccatcggcgatgcctattgcgtagcagcaggcctgcaccgaaagtcactgtgtcacgctaagcccattgctttaatggccctcaagatgatggaactgagtgaggaagtgctgaccccagacggacgaccaattcaaccacagcgatccgagctcctgttttctttcccagtctctatccagctggtgccagaccagcatcaaagcgaaacagacttgggaacggagaaaatgcgtatcggcattcatagcggcagcgtgctggcaggtgtcgtcggcgtgcgtatgccccgctactgtttgttcggtaacaatgtcacactggcaagtaagtttgaatccggctcccacccgaggaggatcaatgtttcgccgaccacttaccaattgttaaagcgagaggaaagtttcacttttattcctcggtcgcgagaggaactgcctgacaattttccaaaggagattcccggaatatgctacttcctagaagtccgcacaggcccgaagccccccaagccctccttatcctcttcccgaatcaagaaggtgagttataacatcggaacaatgttcttacgtgaaaccagtctgtag

SEQ ID NO: 190176 - DNA, 2199 bp, synthetic construct
  misc_feature 1..2199: note = Description of Artificial Sequence: Synthetic coding sequence
  source 1..2199: mol_type = other DNA
atgagccggcggaagatcagcagcgagagcttcagcagcctgggctctgactacctggagaccagcccagaagaggagggagagtgcccactgagccggttgtgttggaacggttccaggtcccctcctgggcccctggaaccgagcccggccgctgcagcagcagctgctgctccagctcccacacccgccgcctccgcggccgccgcggccgccaccgcaggggcccggagagtgcagcggcgacggcgagttaatttggatagtcttggagagtccatttcaaggttgacagcaccttcaccccagactatccagcaaactctgaagcgcacactacaatactacgagcatcaggtcattggctaccgcgacgcagagaaaaacttccacaatatctccaatagatgttcttacgctgaccactcgaacaaagaggagattgaggatgtgtccggcatcctgcagtgcacggccaatattctgggcctcaagttcgaagagatccaaaaacgatttggagaagaattctttaatatttgttttcatgagaacgagcgagtcttgagggctgtaggggggacgctgcaagacttttttaatgggtttgatgccctgctcgagcatatccgcacctcctttggaaagcaagcgactcttgagagccctagcttcctctgtaaggagctaccggagggcactctcatgttacactattttcacccgcaccatatcgtgggattcgccatgctgggaatgatcaaagccgctggcaagaagatttatcgcctggacgtggaggtggagcaagtggccaatgaaaaactgtgctcggacgtgagtaatccaggcaactgttcttgtctgacatttctgatcaaggagtgcgagaacaccaacatcatgaaaaaccttcctcagggtacctctcaggtccccgccgatcttaggatttccattaatacattttgccgcgccttcccctttcacctgatgtttgatccctctatgagcgttctgcagctgggcgaagggttaaggaaacagctccgctgtgatacccataaggttctcaaatttgaagactgctttgagatagtttcacccaaagttaatgcaacatttgagagggtactgcttaggctatcgacaccttttgttatccggaccaaacctgaagcctcaggctccgagaacaaggacaaagtcatggaagtgaagggacaaatgattcacgtgcccgagagcaattccatcctctttctagggagtccatgtgtggacaaacttgatgagcttatgggacgcgggttgcaccttagcgatattccaatacacgacgctactcgtgacgtcatcttagttggggagcaggcaaaggctcaagatggactgaaaaagcggatggacaagcttaaggctacactagagcgaacacaccaggccttggaggaggagaaaaagaaaactgtcgacctcttgtattctatattccccggcgacgttgctcaacaactctggcaagggcagcaggtgcaggctaggaagtttgacgatgtaaccatgctcttttctgatatcgttggcttcaccgctatctgcgctcaatgcacccccatgcaagtgattagtatgctcaacgaattatacacgcggtttgatcaccagtgtgggttcctcgatatctacaaagtggaaactatcggcgatgcctactgcgtggcggccggtttacacaggaagtcactgtgccatgccaaacccatcgcactaatggctctaaaaatgatggaattgtccgaagaggtgctcacacctgatggaagaccaattcaaatgcgcattggaatacactccggttccgtgctagccggcgttgtcggcgttcggatgcctcgatactgtttattcggcaataacgtcactctcgcatctaaatttgaatcaggctcccacccacgcaggattaatgttagcccgactacctaccaattgcttaagcgagaagagagtttcacatttataccgcgtagtcgcgaggagctgccggataattttccgaaagaaatcccgggcatctgttacttcctcgaggttagaacggggccgaagccaccaaagccctctctatcaagcagccggattaagaaagtaagttacaatatcggtacaatgttccttcgagagacatctctatag

SEQ ID NO: 190177 - DNA, 2073 bp, synthetic construct
  misc_feature 1..2073: note = Description of Artificial Sequence: Synthetic coding sequence
  source 1..2073: mol_type = other DNA
atgttctgcaccaagctgaaggacctgaagatcaccggcgagtgccctttttctctcttagctcccgggcaggtccctaacgagagcagcgaagaggccgccggttctagtgaatcttgcaaggccaccgtcccaatctgtcaagacattccggagaagaacattcaggagtcactgcctcaacgaaagaccagccggtctcgggtctatctacataccctggccgagagtatatgcaaattgatctttccagagtttgaaaggcttaacgtggctctgcaacggaccctggctaagcacaaaatcaaggaaagcagaaagtctctagagagggaggacttcgaaaaaaccatcgccgaacaggcagtggcagccggcgtacccgtggaagtgatcaaggaatcactgggcgaagaagttttcaaaatttgctacgaggaggatgagaacatattgggtgtcgtaggtgggaccttgaaagactttctcaatagcttctctacactgctgaagcaaagcagccactgccaggaggccgggaagaggggtaggctggaggatgcttcgattctgtgtcttgataaggaggatgactttcttcacgtgtattactttttccctaagcggaccacaagccttattttaccaggcatcatcaaagcggcggcccacgtcctgtatgagaccgaagtggaagtgtcccttatgcccccatgctttcataacgactgcagtgagttcgtcaaccaaccttatttactctattctgttcatatgaaatcaacaaagcccagcctttcccctagtaaacctcagagtagtctggtgatccctacgagtctgttctgcaaaaccttccctttccactttatgtttgacaaagacatgaccatcctgcagttcggaaacggcatccgacgactgatgaaccgacgcgactttcaggggaagccaaacttcgaagaatactttgagatcctgacacctaagataaaccagaccttctccgggatcatgacaatgctgaacatgcaattcgtcgtgcgagtgcgccggtgggataattctgtgaaaaaatcctccagagtcatggacctgaagggacagatgatctatattgtagaatcgagcgcaattctgttcctgggatccccatgcgtcgatcgtctggaagactttacgggccggggcttatacttgagtgacattcccatccacaacgcgcttagggatgtcgtgttaattggagaacaggctagagcccaggacggtctaaaaaagcggttgggcaagctcaaggctacgctagagcaggcacatcaggccctggaggaagagaagaagaagactgtggaccttctctgtagtatcttcccctgcgaggtggcccagcagctgtggcaagggcaggtggtgcaggcgaaaaagttcagcaatgtcacaatgctcttttcagatatcgtgggtttcaccgctatctgttcccaatgttctcctctccaggttattacaatgctgaacgcactgtatactagatttgaccagcagtgtggagaactcgacgtgtacaaggtggagaccataggtgatgcgtactgtgtcgctggggggctccataaggaaagcgacacacacgccgttcagatcgctttgatggctctgaagatgatggaactttccgacgaggttatgagcccacatggcgagccaattaaaatgcggatcgggctccactccgggtctgtgtttgccggcgtagtgggggtgaaaatgcctcgctactgcctgttcggcaataacgtaacgctggcgaacaaattcgagagctgctctgtgccccgcaagattaatgtgtcaccaaccacataccgactgctgaaggattgcccaggcttcgtgtttactcccagatcacgtgaggaactgccgcccaatttcccttcggagattcccggaatctgccattttctggacgcataccaacaggggacaaacagcaaaccgtgttttcagaagaaggacgttgaagacgggaacgccaactttttgggtaaggcctcagggatagattag

SEQ ID NO: 190178 - DNA, 2073 bp, synthetic construct
  misc_feature 1..2073: note = Description of Artificial Sequence: Synthetic coding sequence
  source 1..2073: mol_type = other DNA
atgttctgcaccaagctgaaggacctgaagatcaccggcgagtgcccattttccctcctggcaccgggacaggtcccaaatgaaagcagtgaggaggctgcgggtagcagcgagtcctgtaaggccaccgtccccatctgtcaggatatccctgagaaaaacattcaggagtcccttcctcagagaaaaacaagcaggtcccgggtgtacctccacactctggcggaatccatttgcaaacttatttttcctgagttcgagcgtctcaatgtcgccttacaacgtacactggccaagcacaagataaaagaaagcaggaagtcgctggagagagaggattttgagaagaccatcgctgaacaagcagttgcggcaggagtgccagtggaggtgattaaagagagtttgggcgaggaggtcttcaaaatttgctacgaggaagatgaaaacatcctgggtgtcgttggcgggacacttaaagacttcctgaatagcttctctaccctgctgaagcagagtagtcattgccaagaagccggcaaacgcggccgcttggaagatgcttcaatattgtgcttagataaagaagatgattttcttcacgtatattattttttcccaaaacgcacaacctcattaatactgccgggaatcataaaggctgctgctcacgtgctgtatgagacagaggtggaagtaagtcttatgcctccatgcttccacaatgattgtagtgagttcgttaatcaaccctacctcctttattctgtgcacatgaagagtactaagccctcccttagcccgtccaaaccacagagttctctcgtgatccccacgtcactcttctgcaagacattcccttttcacttcatgtttgacaaagacatgacaattcttcagttcggaaatggcatcaggagactgatgaaccgccgggactttcaggggaagccaaattttgaggaatactttgagatacttacaccaaagattaaccaaacattttctgggattatgactatgttgaacatgcagtttgtggtgcgagttaggagatgggataacagtgtcaagaagtcgtctcgtgtaatggatcttaagggacagatgatttacatcgtggagtcatccgcaatcctgttcttggggtcaccgtgtgtggacagactggaggactttaccggacgcgggctgtacctctcagatattccaatccataacgctctgcgtgacgtggtcctcattggggaacaggctcgcgctcaggatggcttaaagaagcgcttggggaagctgaaggcaactcttgagcaggctcatcaggcgctggaagaagaaaagaagaaaaccgttgacctgttgtgctcaatatttccatgcgaagtggcccagcagctgtggcagggccaagtcgtacaggccaaaaaatttagtaatgtgactatgctattctcagatatcgtgggctttacagcaatttgttctcagtgctctccactacaggtgatcactatgctcaatgcgctctacactagatttgatcagcagtgcggcgagctggacgtgtataaggttgagacaattggggacgcctactgtgtggcgggcgggctacataaagagagcgacacacacgccgtccagattgccctgatggcgctcaagatgatggagctgtcagacgaagtgatgtccccacatggggaacccatcaaaatgcgaatagggctgcattcaggaagtgtttttgccggagtcgtgggtgtaaaaatgcctcgatactgtctttttggaaataacgtgaccctagcaaacaagtttgagtcctgctcagtgccacgcaaaattaatgttagtccaaccacatatcgcctgctgaaggactgccctggtttcgtctttacacctcgctcacgggaagagctgccccccaactttcccagcgaaatccctggaatatgccactttctcgatgcctatcaacagggcacaaattccaaaccctgcttccagaagaaagacgtcgaggacggtaatgcaaactttctaggcaaggccagcggcattgactag

SEQ ID NO: 190179 - DNA, 2073 bp, synthetic construct
  misc_feature 1..2073: note = Description of Artificial Sequence: Synthetic coding sequence
  source 1..2073: mol_type = other DNA
atgttctgcaccaagctgaaggacctgaagatcaccggcgagtgccctttttccttgttggcccctggccaggtgccgaacgaatcaagtgaggaggctgccgggtcttcagaatcatgcaaggcgacggtaccgatctgtcaggatattcccgagaagaatatccaggagtccctgccgcaaaggaaaacttctcggtctcgcgtgtatctacacactttggccgagtctatatgtaagctgattttcccagaatttgaacggctcaatgtcgcccttcaacggacgttagccaaacataagatcaaggagagccgtaaatccctggaacgggaagatttcgagaaaacaatagctgaacaagccgtcgctgcaggtgtccctgtcgaagtgatcaaagagtccctaggagaagaagtgttcaagatttgttatgaagaagacgaaaacattctcggggttgttggcggcacactcaaggacttcctcaatagtttttcaaccttgctgaaacagagctcccattgtcaggaagccgggaagagaggccgactcgaggacgcgtctatcttgtgcttagacaaagaagacgactttctgcatgtgtattatttcttccccaaacgcaccactagcttaatcctgcctgggatcataaaggctgcagcccacgtcttgtacgagaccgaagttgaggtgtccctaatgcccccatgtttccacaacgattgcagcgaattcgtgaatcagccatacctcctgtactctgttcacatgaaatccactaagccatctttatctccctctaagcctcagagctctctggtcatccccacaagcctgttctgcaagaccttcccatttcactttatgtttgacaaagacatgaccatcctgcaattcgggaatggcatccggcggttaatgaatcgtagggatttccaggggaaacctaactttgaagaatactttgagatactgacacctaaaatcaaccagacctttagcgggataatgaccatgctcaacatgcaatttgtggtcagggtccgtcggtgggacaacagtgtaaagaagtccagcagagtaatggacctgaaggggcaaatgatctatattgtggaaagctccgcaattctttttcttggtagcccttgtgtggacagacttgaagacttcacgggcaggggcctctacctctccgacattccgatccacaacgcgctccgtgatgtcgtgctgatcggggaacaggcccgcgctcaggatggtcttaaaaagagactggggaaactgaaggcgactctggaacaggcccaccaggcattggaggaggaaaaaaagaagacagtcgacctcctgtgttccatctttccatgcgaggtggctcagcagctgtggcagggacaggttgtgcaagctaaaaaattttcaaatgtcactatgctgttcagcgacatagtcggtttcaccgcaatttgctctcagtgctccccactgcaagttatcaccatgctaaacgctctgtacactagatttgaccagcagtgtggtgagctggatgtgtataaggttgaaacaatcggtgatgcttattgcgtggctgggggactgcataaggaatctgatacgcatgctgtccaaatagctctcatggccttaaagatgatggaactatctgatgaggtgatgagcccccacggcgaacctattaagatgcgcataggattgcattccgggagtgtctttgctggcgtggtgggggtgaagatgcctcggtattgcttattcggtaacaacgtgaccctggccaataaatttgaatcctgcagcgtgcccagaaagatcaacgtctcccccacaacttaccgattgctcaaggattgcccaggattcgtgtttaccccgagatccagagaagagctgccaccaaactttcccagcgagattccaggaatctgtcactttctcgacgcctatcagcagggaacaaacagcaagccctgcttccagaagaaagatgttgaagacggaaatgccaactttctggggaaagctagtggcatcgactag

SEQ ID NO: 190180 - DNA, 2073 bp, synthetic construct
  misc_feature 1..2073: note = Description of Artificial Sequence: Synthetic coding sequence
  source 1..2073: mol_type = other DNA
atgttctgcaccaagctgaaggacctgaagatcaccggcgagtgcccattctctctactggcgccgggccaggtgcccaacgagtcatctgaggaggccgctggatcttctgaatcttgcaaagccaccgtccctatttgccaagatattcctgagaagaacatacaggagtctctccctcaaaggaaaacctcaagaagcagagtgtacctacacacgttagccgaatccatatgtaagctgatttttcctgagttcgagagattgaatgtggccctgcagcgtacccttgccaagcataaaattaaggagagtaggaagtcacttgaaagggaggacttcgagaagaccatcgctgagcaggctgtggccgcaggcgtgcccgtggaggttatcaaggagagtttgggtgaggaggtgtttaaaatttgctacgaagaagatgaaaatatcctgggggtcgttggaggtaccctcaaagatttccttaattcttttagcacattactcaaacaatcctcacactgccaagaagccggaaagcgcggaaggctggaagacgcatctatcctttgtcttgacaaggaagatgactttctccacgtgtactacttcttccccaaacgaacaacatctctcatattgccaggtatcataaaagctgctgcacacgtgctgtacgagacggaagttgaggtatctctgatgccaccatgttttcataacgactgttctgaattcgtaaatcaaccatacctgctgtactccgtgcatatgaagtccacaaagccctcactctctccttcaaaaccacaatcttctctggtgattcccacaagcctgttttgtaagaccttccccttccacttcatgtttgataaagatatgaccatcctgcagtttggcaatggcatccgcaggctgatgaatagacgcgattttcaaggtaagcccaattttgaggaatacttcgaaatcttaacgcctaaaatcaaccagaccttttcaggcatcatgaccatgctcaatatgcaattcgttgtgcgtgtcagacggtgggacaactcagtgaagaaaagttccagagttatggacttgaaaggacagatgatctatatcgtagagtcttctgccattctcttcctgggaagcccatgcgtagaccggctggaagattttaccgggcggggcttgtacttgtcagatattccaattcacaacgcactccgcgacgtggtcctaatcggcgagcaagcacgtgcacaggatgggctaaaaaaaaggctagggaagttaaaggccacattggaacaggctcaccaagcattagaggaagaaaaaaaaaaaacggtggaccttttatgctctatattcccctgtgaggtagctcaacagctctggcagggccaggtcgtacaagccaagaaattcagcaatgttacaatgctattctccgatattgtgggtttcaccgctatttgttctcagtgctccccccttcaggttattaccatgctgaacgccctgtacacaaggtttgatcagcagtgcggcgagttagatgtgtataaagtcgagaccattggagacgcgtattgcgtggctggtggactccacaaagagtcagatacccatgccgtgcagattgccctgatggccctgaagatgatggaattgtcagacgaagtcatgtcaccccacggggagcccatcaagatgagaattggtcttcacagtggtagcgtgtttgccggagtcgtcggggttaagatgcccagatactgcttattcggaaataatgtgactttggcaaataaattcgagagctgctccgttccccgtaagattaatgtatcccctactacatatagattgctgaaggattgccctggtttcgtgttcacaccacggtcccgtgaggaactgcctcccaactttccgtccgagattcctggtatttgccacttcctcgatgcttatcaacaaggaactaattccaaaccatgcttccaaaagaaggacgtggaagacggcaatgcgaattttctgggaaaagctagcggaatcgactag

SEQ ID NO: 190181 - DNA, 2073 bp, synthetic construct
  misc_feature 1..2073: note = Description of Artificial Sequence: Synthetic coding sequence
  source 1..2073: mol_type = other DNA
atgttctgcaccaagctgaaggacctgaagatcaccggcgagtgccctttctcactcttggcgccgggacaagtgcccaacgagagtagcgaggaggccgcgggctccagcgagagctgcaaagctactgttccaatctgtcaagatatccccgaaaagaatatccaggaaagtcttccacaacggaaaacctcccgcagtcgtgtgtacttacacactctggctgaatcaatttgcaagttgatattcccagagtttgagcgactgaatgtggccttacaaaggaccctggccaagcacaaaatcaaggaaagtaggaagtcactggaacgggaggatttcgagaaaactattgcagagcaggccgtggccgctggcgtccctgtcgaggtcatcaaagagtctcttggagaagaggtgttcaaaatctgctacgaagaggacgaaaacattctcggcgttgtcggcgggacactcaaggactttcttaatagtttttctaccttgctgaagcagagctcccactgccaggaggccggcaagcgtggccgattggaagatgcctccattctctgtctggacaaagaagatgactttcttcacgtgtactacttcttcccgaaacgaacaaccagtctgatcctgcccggcatcatcaaagctgctgcacacgttctgtatgaaactgaggtggaggtatcactgatgccaccttgcttccataacgactgttccgagttcgttaatcagccctatttgctgtatagcgtgcatatgaagtctacaaagccgtccctttccccgtcaaagccccagtcgtcgctggtcatccctacctccttgttctgtaaaactttccccttccactttatgttcgacaaggacatgaccattctgcagttcggcaacggcatccgcaggcttatgaatcgccgggacttccagggcaaacccaattttgaagaatattttgaaattctgacaccaaagattaaccagacattctctggtattatgacaatgctgaacatgcagttcgtagtccgggttcgcaggtgggataattcagtcaaaaagtcgagtagagtgatggaccttaaaggacagatgatctacattgtggagtcctctgctatcttatttctgggaagcccttgtgtggatcggctggaggattttacagggcggggcttgtacctttccgacataccaattcataacgccctcagggacgttgtactcatcggggaacaggctcgtgcgcaggatggccttaaaaagcgcctgggtaagttgaaggctacactggagcaagcccatcaggctctcgaggaggagaaaaagaagaccgtggatcttctgtgttcgatattcccatgcgaggtcgcacagcaattatggcagggccaggtcgtccaagctaagaaattcagcaacgtcacaatgctgttttccgatattgtaggcttcactgcgatctgctctcagtgtagcccgcttcaggtgataaccatgctcaatgcattgtacacaagatttgatcagcagtgcggggagctagatgtatacaaagtcgaaacaatcggtgacgcctactgcgttgccggggggctgcataaagaaagcgacacacacgctgtacagatcgctctgatggccctgaagatgatggagttatcagatgaggtcatgtctccccacggagagcccatcaagatgcgaatagggttacacagtggaagcgtgttcgccggtgtggttggagtaaaaatgcctaggtactgtttgttcggcaataacgtcactctggcaaacaagtttgagagctgtagcgtgccccggaagataaatgtctcccccacaacatatcgcctgctcaaggattgtccaggtttcgtgtttactccccgatccagggaagagctacccccaaatttcccctctgaaatccccggtatttgccacttcctggacgcataccagcagggcactaactctaaaccgtgctttcagaaaaaggacgtggaggacggaaacgctaattttttggggaaggcatccgggatagactag

SEQ ID NO: 190182 - DNA, 1860 bp, synthetic construct
  misc_feature 1..1860: note = Description of Artificial Sequence: Synthetic coding sequence
  source 1..1860: mol_type = other DNA
atgtacggcttcgtgaaccacgccctggagctgctggtgatccggaattatgggcccgaggtgtgggaagatatcaagaaagaggcacagctagacgaggagggacaatttttggtgcgcatcatatatgatgattctaagacgtatgacctagttgccgctgcaagcaaagtgcttaacctaaatgccggggagatcctgcaaatgtttgggaagatgttcttcgtattctgtcaagagtcgggctacgacaccatcctgagagtgctgggaagcaacgtgcgggagtttttacaaaatcttgatgccttgcacgaccacctggcaaccatctatcctggaatgcgcgccccctctttccggtgtaccgacgcggagaaggggaagggactgattctgcactactactcagaaagagagggccttcaggatatcgttatcggcattattaaaacagtggcccaacagatccacggtacagaaatcgacatgaaggtaatacagcagagaaatgaggagtgcgaccacacgcaatttcttatcgaggagaaagaatccaaagaggaagacttctacgaagaccttgatcgtttcgaagagaacgggacccaggaaagcaggatttctccttacacgttttgcaaggcattccccttccatataatttttgatcgagatcttgtggtgacccaatgtggaaatgcgatttacagagtccttccgcagctacagcccgggaattgctcactactgagtgttttttctctcgtaaggccacatattgatatttcattccacggaatcttgtcgcacatcaacactgtgttcgtactgcgaagcaaggaaggattgctcgacgtagaaaaactggagtgcgaggatgagctgacgggaactgaaatctcatgcttgcgattgaaaggtcaaatgatttacctgccagaggctgactccattctgtttttatgttctccaagcgtcatgaatctagacgatctgactagacgcgggctgtacctgtcagacatcccactgcatgatgcaaccagggatctcgttctccttggcgaacagtttcgggaagaatacaagttaactcaggagctggagatcctgactgatcggctacagctgaccctccgcgcactggaagacgagaaaaaaaaaactgacacgttgctctattctgtgctccccccctcagttgccaatgaactcagacacaaaagaccagtgcctgcaaaaaggtatgacaatgtaaccatcctgttctccggcatcgtcggattcaatgccttctgctctaagcacgctagcggggagggggccatgaagatcgtcaatctgttgaacgatctgtatacccgattcgatacccttactgacagccgcaagaacccttttgtttataaggtcgaaactgtgggagacaagtacatgaccgtcagcggcctgcccgaaccctgtattcaccacgcccgctctatttgtcatttagctctcgacatgatggagattgcaggacaggtgcaggtagatggtgaatccgtccagatcaccattggaattcataccggagaggtggtcactggagttattgggcagagaatgcccaggtattgtctttttgggaatactgtgaatcttaccagccggactgagaccaccggagagaagggcaaaatcaacgtttctgaatacacttatcgctgccttatgtcaccagagaattcagacccacagttccatctggagcatcgggggcctgtgtccatgaaggggaagaaagagcccatgcaggtatggttcctttcaagaaagaacactggaactgaggagactaagcaggatgatgattag

SEQ ID NO: 190183 - DNA, 1656 bp, synthetic construct
  misc_feature 1..1656: note = Description of Artificial Sequence: Synthetic coding sequence
  source 1..1656: mol_type = other DNA
atgttcggcaagatgttcttcgtgttctgccaggagagcggctacgacaccatcctgcgagtactcggctctaatgtgagggaatttctgcagaacctcgacgctctgcacgaccaccttgctacaatttaccctggcatgcgggctccaagcttccgatgcaccgatgccgagaagggaaagggactgatcctgcactattacagtgagagagagggcttgcaagacattgttattggcattatcaaaaccgtcgcgcagcagattcacgggaccgaaatcgatatgaaagtaattcagcagagaaacgaggagtgcgatcacacacagttcctgatagaagaaaaagaatccaaagaggaggacttttacgaggacctcgaccggtttgaagaaaacggaacgcaagaatcccgcatttccccttacaccttctgtaaggcatttccttttcacatcatttttgatagggatctggttgtgacacagtgtggcaacgctatatacagggtgctcccccagttacagccggggaattgcagcttgctgtcggtttttagtctcgtgagaccacatatagacatcagctttcacggaattttaagtcacattaatacagtcttcgttcttaggtccaaggaggggctgctcgatgtggaaaaactggaatgcgaggatgaactaacaggcaccgagatatcttgcctgagactcaaggggcaaatgatatatcttccggaagccgatagcatactattcctatgctccccaagcgtgatgaacttggacgacctgacacgccgcgggctgtacctgtctgacatacctctacatgatgccaccagggacctggttcttctgggcgaacagttcagggaggaatacaagttgacacaggagctggagatcctcactgacagactacagttgaccttgagggcgctcgaggatgaaaaaaagaagacagatacactgttgtactccgtcttgcccccttctgtggccaatgagctccgacataagcggccggtgccagccaagaggtatgataatgtcaccatcctgttttctggaatcgtgggttttaacgctttttgctctaagcacgcctctggcgaaggcgctatgaaaatcgttaacctgctgaatgatctgtatacccggtttgatactctcaccgatagcaggaagaacccatttgtgtataaagtggagacggtgggtgataagtacatgacagtttcgggcctcccagaaccatgcatccaccacgcgcgctctatttgtcatttggcactcgacatgatggagatagcaggtcaggtgcaggtggacggagaaagcgtgcaaattacaatcggaatccataccggcgaagtcgttaccggcgtgatcgggcagagaatgcctagatattgcttgttcgggaacacagtgaacctaacatcacggaccgagacaacaggggaaaaaggcaagatcaacgtctcagagtacacctacaggtgcctcatgtctccagagaattctgatcctcagtttcatctggaacaccggggacctgtttcaatgaaggggaagaaggagccgatgcaggtctggtttttatcacgcaaaaataccgggaccgaggagactaaacaggacgatgattag

SEQ ID NO: 190184 - DNA, 1800 bp, synthetic construct
  misc_feature 1..1800: note = Description of Artificial Sequence: Synthetic coding sequence
  source 1..1800: mol_type = other DNA
atgctgatgtgcttcatcaaggaggcccagctggacgaggagggccaattccttgtgcgtattatttatgatgattcgaaaacctacgatctggtggcggcagctagcaaagtacttaacctcaacgccggcgagatcctgcagatgttcggcaaaatgtttttcgtgttctgtcaagagagtggatatgacactatcctcagagtcctgggaagtaacgttagagagttcttacagaatctggatgccttgcatgaccacctggctacaatctatcctggaatgcgggcccccagctttaggtgtacagacgcagaaaaaggcaaagggctaattctgcactactactccgaacgggaggggctgcaagatatcgtaattggaatcatcaaaactgtggctcaacagattcacggaacagagatcgacatgaaagtcattcagcagcggaacgaagagtgtgatcacactcagtttctgatcgaagaaaaggagagtaaagaggaagatttctacgaagatctggatagatttgaagaaaacgggacccaggaatctagaatttctccatacaccttctgcaaggcttttcccttccacattatttttgatagagatcttgtcgtaactcagtgtggaaatgccatctatagagtcctgcctcagctacagcccggcaattgtagcctgttgagtgtgttctccctggtgcggccccatattgacatatcctttcacggaatccttagccatattaatacagttttcgtgcttcgctcaaaagaggggctcctggacgtcgaaaagcttgaatgtgaagatgagctgactggcactgaaatctcatgtctgagattgaagggacaaatgatctatcttccagaggcggattccatcctgtttctgtgtagcccatccgtgatgaaccttgatgatttgacgcggcgtggactgtacttgagtgacatccctctccacgatgccacacgagacctcgtcctccttggggaacagtttcgcgaggaatataaactgacccaagagctggagattttgactgatagactccagttgacattgagggctctagaggatgaaaaaaaaaaaaccgacactcttctctatagcgtgctccctcctagcgtggccaacgaactccggcataagcgtcccgtccccgccaaacgatacgacaatgtgaccatactgttctccggtatcgtgggattcaatgctttctgctccaagcacgcctctggggagggggccatgaagatagtgaacctccttaatgacctgtatacaagattcgacactcttaccgattctcgcaagaacccctttgtttacaaagtggagactgttggagacaagtacatgactgtatcggggctgcctgaaccttgcatccaccacgctaggagtatctgccaccttgcattggatatgatggaaatcgccggtcaagtgcaggtagacggggagagcgtccagataacgatcgggatacacacaggcgaggttgtcaccggagtgattggccagcgaatgccacgatattgcctattcggaaatactgttaacctaacaagccgcacagagacaacaggagaaaagggcaagattaatgttagcgaatacacctaccgatgccttatgagccccgaaaacagtgacccccagttccatctcgaacatcggggacctgtgtccatgaaaggaaagaaggagcctatgcaggtgtggttcctgtctagaaagaatacaggaaccgaagagacgaagcaggacgatgattag

SEQ ID NO: 190185 - DNA, 1656 bp, synthetic construct
  misc_feature 1..1656: note = Description of Artificial Sequence: Synthetic coding sequence
  source 1..1656: mol_type = other DNA
atgttcggcaagatgttcttcgtgttctgccaggagagcggctacgatactattcttcgggtactggggtccaatgtaagagaatttctgcagaaccttgacgctttgcatgatcacctcgccacaatttaccccggcatgagagccccctcctttagatgtacggatgctgaaaagggaaagggcctaatcctgcattattactctgagagagaagggctccaggatattgtgatcgggatcattaaaacagttgcccagcagatccacggcacagagatcgacatgaaagtgatacaacaacgcaacgaagagtgcgatcacactcagttcctgatcgaagaaaaggaaagcaaggaagaggatttttacgaagacctggaccgctttgaggagaacgggactcaagaaagcaggatctccccatacacattttgtaaggcgtttccctttcacatcatcttcgacagagatctggtggtgacacaatgtgggaatgcaatctacagggttctgccgcagctccaacccggcaactgcagcttgctctccgtttttagccttgtgagaccccatatcgacatcagctttcatggaatcctttcacacatcaatacagtctttgtccttcggagcaaggaggggctgctggacgtggagaagttggaatgtgaggatgagctcactgggacggaaattagctgcctgagactcaagggacagatgatttatctgccggaagccgactctatcctcttcttatgctcaccatcagtgatgaacctcgatgatttaacccggcggggcctgtatttgtctgatatccccctacacgacgcgacgagggaccttgttctcttaggagagcagttcagggaagaatataagttgactcaggagctggagatcctaactgacagactgcagttgaccctgcgggccctggaagacgaaaagaaaaagactgacacactcttatacagtgtcctgccccctagtgtggccaacgaactccgccacaagaggcctgtacctgcgaaacggtacgataatgtgacgatcttgttctccggaatcgttggctttaacgccttctgtagcaaacatgccagtggcgagggtgccatgaagatcgtcaatttactaaatgatctgtacacacggttcgatacccttaccgactctcggaagaacccctttgtttataaagtagaaactgtcggggataaatatatgactgtctctggtcttccagaaccttgcatccaccatgccaggtccatctgtcacctggccctggacatgatggagattgctggtcaagtgcaggtcgacggcgagtccgtacagatcactattgggatccacactggggaggttgtcactggagtgatcgggcagaggatgcccagatattgcctttttggaaacaccgtaaacctcaccagtagaaccgagaccaccggcgagaaaggcaaaatcaacgtgagcgaatacacctaccgctgtctcatgtcacctgaaaacagcgacccccagtttcatctggagcaccggggtccggtctcaatgaagggcaaaaaggagcccatgcaggtgtggtttttaagtcgcaagaacacgggtactgaagagaccaagcaagatgatgattag

SEQ ID NO: 190186 - DNA, 3222 bp, synthetic construct
  misc_feature 1..3222: note = Description of Artificial Sequence: Synthetic coding sequence
  source 1..3222: mol_type = other DNA
atgaagaccctgctgctggacctggccctgtggagcctgctgttccaaccgggatggctgtcctttagcagtcaagtgtcccagaattgtcacaacggtagctacgagataagtgtactgatgatgggcaattctgccttcgcagaacctttgaaaaatcttgaggacgcggtgaacgaggggctggagattgtgagaggaaggttacagaacgccggactcaatgtcactgtgaatgcaacctttatgtactctgatgggcttatccacaattcgggtgactgccggtccagtacttgtgaaggcctggacttactgagaaagatcagtaatgcacaaagaatggggtgcgtccttatcgggccatcgtgcacttactccactttccagatgtatctggatactgaactgagctacccaatgatttccgcgggtagcttcggtctatcctgcgattacaaggaaacccttacccggctcatgtcgcccgccagaaagcttatgtatttcctggtcaatttttggaagaccaatgatttgccattcaaaacgtactcgtggtccactagctatgtgtataagaatggtaccgagaccgaggactgcttctggtacctgaacgccctagaagcctctgtatcatatttctcccatgaactgggctttaaggtagttcttaggcaggataaggagttccaggatatattaatggatcacaaccgcaagagcaatgttatcatcatgtgtggtggacctgaattcttgtacaaattgaaaggagatagggccgtggccgaagacatcgtaattatactggtcgatctgtttaatgaccagtactttgaggataacgtcactgcccctgattatatgaagaacgtgcttgttctgaccctgtctccaggcaattctttgctgaacagtagttttagtcgcaacttgtcaccaactaaacgagacttcgccctagcgtaccttaacggaatcttacttttcggtcacatgttgaagattttcctcgagaacggagaaaacataacgacacccaagttcgcacacgcattcaggaatctcaccttcgagggatacgacggcccggtcactcttgacgattggggcgacgttgacagcactatggtgttgctctacacgagtgtcgataccaagaaatataaggtgctgcttacctacgacactcacgtgaataagacttaccccgtcgatatgtctcctacttttacatggaaaaattccaaactccccaacgatattaccgggagggggcctcaaattcttatgatcgccgtgtttactcttacgggcgccgtggtgttgctgctgttggtggccctgctgatgttgcggaaatatcggaaagactatgagctgaggcagaagaaatggagccatatccctccagagaatatcttccctcttgaaaccaacgagacaaaccatgttagtctcaaaattgacgatgataagagacgagataccattcaaaggctgcgccaatgtaagtacgacaagaaaagagtaattctcaaagatctgaaacacaacgatggcaattttacggagaaacagaaaatagaactcaataagctgctccaaattgattactacaacctgaccaagttttatggcacagtgaagctggatactatgatttttggggtcatcgaatattgtgagagaggtagcttgagggaagttctgaacgacacaatctcttacccagatgggaccttcatggactgggagtttaaaattagcgtgttgtatgatatcgctaaggggatgtcctacttgcacagcagcaaaactgaggtccatggaagactgaaatccactaattgcgtcgttgacagtcggatggtagtgaagattacagatttcggctgtaattccatactcccaccaaagaaagatctgtggaccgcccctgaacacttgagacaggccaatatttcacaaaaaggagatgtgtactcttatggaatcattgcacaggagatcattttacggaaagaaacgttctataccttgagctgtcgcgataggaacgaaaagatctttcgagttgagaattccaacggcatgaagccattccgacccgacttgtttctcgagacggcagaggaaaaagagctggaagtttacctcctcgtgaagaactgttgggaggaagaccctgagaagcgcccagattttaaaaaaatcgagactactctcgccaaaatcttcggactgtttcacgatcagaagaatgagtcttatatggacacactgatcaggcgactgcagctttatagcaggaacctcgaacatctggtcgaggagcgcacacaactgtacaaagcagagagggatcgggccgaccgcttaaatttcatgctactgccccgcttagttgtcaagtcgttgaaggaaaaaggatttgtggagccggagctttatgaggaagtaacaatctatttctctgacatcgttgggttcacgacaatatgtaaatacagcacgcctatggaagtagtcgatatgctgaacgacatctacaagtcattcgatcacatcgtggatcatcacgatgtgtacaaggtcgaaacaattggcgacgcctacatggtcgctagcggactgcccaagcgtaacggcaacagacatgcgattgacatagccaagatggctctggagattctgtcctttatggggactttcgagttggagcatttgcctgggttgcctatttggattagaataggcgtgcacagcggcccatgtgccgcgggagtggtggggataaaaatgcctaggtattgcctatttggcgatacggtgaacacagcatctcgtatggaaagcaccggcttgccactcaggattcatgtgagtggatcgaccatagccattttgaagagaactgagtgccagtttctctacgaggtccgaggggagacttatcttaagggcaggggcaatgaaactacctattggcttacaggcatgaaggatcaaaaatttaatctgccaacacctcccaccgtggaaaaccagcagcgccttcaggccgaattcagcgacatgatcgcaaattccttgcagaagcggcaggcggccggaatccgctctcagaagcctcggagggtggccagttacaagaagggaaccttggagtatctgcagttaaataccacagataaagagtctacttacttttag

SEQ ID NO: 190187 - DNA, 3312 bp, synthetic construct
  misc_feature 1..3312: note = Description of Artificial Sequence: Synthetic coding sequence
  source 1..3312: mol_type = other DNA
atgaccgcctgcgcccggcgggccggcggcctgcccgaccccggcctgtgcggccctgcatggtgggcaccatctctcccccgccttcccagggcactgcccaggctgccattgctgctgcttttgctgctgctccagccccctgctttgtcagcagtctttaccgtgggggttctgggcccatgggcatgtgaccccatcttttctcgagccaggccagatctcgccgccagactggccgccgctcgcttgaaccgtgatcctggactggcaggaggaccgcggttcgaggtggctttactcccggagccatgcaggactcctgggtctctcggcgcagtgtcttcagccctcgcaagggtgtctgggttagtgggccctgtaaatcctgcggcttgcaggcctgcggaacttctggctgaagaggccgggatcgcactggtcccatggggctgtccgtggactcaggcggagggaaccaccgccccggcagtgacacccgcggccgacgctctgtacgcgttgctcagagccttcgggtgggcgcgagttgccctcgtaacggcgcctcaggatctgtgggtggaagcagggcgatcactatctaccgcgctgcgcgctagaggactgcctgttgcctccgtgacatctatggagcctctcgacctttctggcgcacgggaagccctccgcaaagtgagggacggcccccgggtaacggccgtcataatggtaatgcattctgtattactcggcggcgaagaacaaagatatctgctggaagctgcagaagagctggggctgacggatggctcactcgtctttctgccttttgacactattcactacgcgttgagtcccggtcctgaagccttggctgctcttgctaatagcagccagctgagacgggcacatgatgccgtgctgacacttacccgccattgcccaagcgagggctctgtcctagacagtctccggagagcccaggaaagacgagaattacctagcgatctgaatttacaacaggtcagccctttgtttgggacaatctacgacgccgtctttttactggctcggggcgtggccgaggcacgcgcagcagccggggggcggtgggtttctggcgcagccgtggccaggcacatccgcgatgcacaggttcccggattttgtggcgaccttgggggggacgaagagcctcctttcgtgcttcttgatacagatgctgctggagaccgattgtttgccacatatatgctcgaccctgcccgcggttcatttctgagcgcgggcacacgaatgcactttcctagaggtggtagtgcccctggcccggaccctagttgctggttcgatcccaataacatatgcggcggcggattagagccaggacttgtctttctgggatttctcctggtagtgggtatgggactggcgggggcttttctggctcactatgtgcgacaccgccttctgcacatgcagatggtgagtggaccaaataagattattctcaccgttgatgatatcacattcctccacccacacggtggaacaagtcgcaaagtggctcagggctcccgctcttctctgggcgcgagatccatgtctgacatccggagtggaccttcccaacatctggactccccaaacatcggagtttacgagggcgacagggtctggctgaaaaagttccctggggaccagcatatcgctattcggcctgccacgaaaactgcgttctccaagctgcaggaactgcgacacgaaaacgtggccctttatctcgggctcttcctggctcggggtgcagagggacctgccgccctgtgggaaggaaatttggccgtcgtctccgagcactgcacccgtggaagtctgcaagatttactcgcgcagagggagatcaagctcgactggatgttcaaaagttcgctgctgcttgatcttatcaagggaattcggtacctgcaccaccggggggtagctcatggaagacttaagagccgtaactgtatcgtggatggaaggttcgtgctgaaaattaccgatcatggacatggcagattgctggaggctcagaaggtgctgcccgaaccaccgcgggccgaggatcaactctggaccgctccggagttgctgcgggaccccgctttggagcggcgcggaaccttggcgggggacgtgttttcactggccataattatgcaggaggtggtctgtcgctccgctccctacgctatgttggagctgacacccgaagaggtggtgcagagagtcaggtctccgcctccattgtgtcgcccactggtgagcatggatcaggctccagtcgaatgcattctgctgatgaagcaatgttgggccgagcaaccagaattgcggccatcaatggaccacacatttgacctgttcaaaaatattaataagggccgcaaaaccaacattatagactctatgcttagaatgctcgagcagtacagcagtaatctggaagacttgatcagggagagaaccgaagagttggagctcgagaaacagaaaacggacagactgctgactcagatgctccctcctagcgtagctgaagctttaaagacaggaacccccgtggagcccgaatattttgaacaggtgacgctttacttttctgacatagtaggctttaccactattagcgctatgtccgagccaattgaggtggtggacctgctcaacgacctctatactctgtttgacgccataattggctcccacgacgtgtacaaagtcgagaccattggagacgcttatatggtagcttcaggcctacctcaaagaaacggtcagcggcatgcagccgaaatcgctaatatgtctctggatatcttgagcgccgtcggcacctttagaatgcgtcatatgcctgaagttccagtccgtattaggattggattgcatagcggcccatgtgtggctggggtggtgggcctgactatgccgcgatactgcctattcggggatacagtgaatactgcatccagaatggagtcaaccggactaccgtataggatccacgtgaatctcagcactgtcggcatattacgggccttggattcaggctaccaggtcgaactgcgagggcgcacagagttaaaaggaaagggggccgaagatacattctggttagtgggccgtagagggttcaataagccaatccctaaaccccccgacctacagccaggaagctctaatcatggaattagtcttcaggagatccctccagagaggcggcggaaactggagaaggccagacccggacaattctcttag

SEQ ID NO: 190188 - DNA, 594 bp, synthetic construct
  misc_feature 1..594: note = Description of Artificial Sequence: Synthetic coding sequence
  source 1..594: mol_type = other DNA
atgcggaagtaccggagccactggagccagggcgaccgggagggctatcagcggagatctaactactacgaaggtccgcacacatcacactcctcaccggcggatcggactcgggaagaggtggtgaccccgacgctacccgagcatactgccaccaggtctcaaatggcaacttctctggatttcaaaacatacgtcgaccaggcctgccgggcagccgaagaatttgtgaacatttattatgaaaccatggacaaacggagaagggctttgacaagactctacctagataaagccaccctgatctggaacggcaatgcagtttcaggtctggacgccctcaacaacttcttcgacacgctgccctcctcggagtttcaggtgaacatgttagattgtcagccagttcacgagcaagccactcagtcacaaacaaccgtcttagtcgtcaccagcggcaccgtaaaattcgacggcaataagcagcacttctttaatcagaattttctgctcactgcccagagtacgccgaacaatactgtgtggaagatcgcttcagattgctttagatttcaggactggagttcgtcttag

SEQ ID NO: 190189 - DNA, 606 bp, synthetic construct
  misc_feature 1..606: note = Description of Artificial Sequence: Synthetic coding sequence
  source 1..606: mol_type = other DNA
atgggcaacgtgatggagggcaagagcgtggaggagctgagcagcaccgagtgtcaccagtggtacaagaagttcatgacagagtgcccttcaggccagctgaccctctacgagttccgccagttttttggtctcaagaatctcagtcccagcgcaagtcaatacgtagagcaaatgtttgaaacattcgattttaacaaggacgggtacatcgactttatggagtacgtcgcagcactgagcttggttttgaaagggaaggtcgagcagaaactgaggtggtactttaagttgtacgacgtggatggcaatggctgtatagacagggatgagctcctcactattattcaggctattagagcaattaatccctgctctgacaccactatgaccgcagaagaattcaccgataccgtcttttcgaagatcgatgtgaacggggatggcgagctgagcctcgaggagttcattgagggcgtgcagaaggatcaaatgcttctcgacacactgacaagatccctggacctcacacggattgtacggcgcctgcagaacggagagcaggatgaagaaggggccgacgaggctgctgaggcagctggatag

SEQ ID NO: 190190 - DNA, 606 bp, synthetic construct
  misc_feature 1..606: note = Description of Artificial Sequence: Synthetic coding sequence
  source 1..606: mol_type = other DNA
atgggcaacgtgatggagggcaagagcgtggaggagctgagcagcaccgagtgtcaccagtggtataagaaattcatgaccgaatgcccatctggacaactgaccctatatgaattccgccaattctttggcctgaaaaacttatcaccatcagccagtcagtatgtcgaacagatgtttgaaactttcgacttcaataaggatgggtacattgatttcatggagtacgtggcggcactttcactggtattgaaggggaaggtggaacagaaactgaggtggtacttcaagctttacgacgttgatgggaatgggtgcattgatagggacgagcttctcactattatccaggccatcagagcgatcaacccatgttctgacactaccatgacggccgaagagtttactgacacagtctttagtaagatagacgtcaacggcgacggcgagttgtccctggaagaattcattgaaggtgttcagaaggaccagatgttgctcgataccctgaccagatctcttgacctgacccggattgtgcgccggctgcagaacggcgagcaggacgaggaaggagcagacgaggctgctgaagctgcgggctag

SEQ ID NO: 190191 - DNA, 618 bp, synthetic construct
  misc_feature 1..618: note = Description of Artificial Sequence: Synthetic coding sequence
  source 1..618: mol_type = other DNA
atggagggcaagagcgtggaggagctgagcagcaccgagtgccaccagtggtataagaaattcatgactgagtgcccctcgggacagctcaccctgtatgaattccgccagttcttcggactcaagaacttgtccccttctgctagccagtacgtggagcagatgttcgagacattcgacttcaacaaagatgggtacatagatttcatggaatacgtggctgccctctccctggtgcttaaggggaaggtagagcagaaacttcgctggtactttaagctctacgacgtggacggtaacgggtgcattgatagagacgagctacttacaatcatacagttcccgcaccaataccagaaaacagccatccgagcaattaatccatgttctgatacgactatgactgccgaggaattcaccgataccgtattctctaaaattgatgtgaacggagatggggagctgagcctggaggagttcattgagggcgtgcagaaggatcagatgctgctggatacattgactagatctctcgacctaaccaggattgtgcgacgccttcagaacggcgaacaagatgaggagggcgctgatgaggccgctgaggcggccggctag

SEQ ID NO: 190192 - DNA, 606 bp, synthetic construct
  misc_feature 1..606: note = Description of Artificial Sequence: Synthetic coding sequence
  source 1..606: mol_type = other DNA
atgggcaacgtgatggagggcaagagcgtggaggagctgagcagcacggagtgtcaccagtggtacaaaaagtttatgaccgaatgtccctcagggcagcttaccctatatgaattccgtcagtttttcggattaaagaatctcagcccgagtgcttcgcagtatgtggaacaaatgtttgaaactttcgattttaataaggatggatacatcgattttatggagtatgtggcagcactgtccctggtgctgaaaggcaaagtcgaacagaaactgagatggtacttcaagctttacgatgttgatggtaatggatgcatcgatcgagacgagcttttgaccataatccaggcaattagggcgattaacccttgttcagatacaacaatgactgcagaggagtttactgacaccgtcttctcaaagatcgacgtgaatggggatggagagctcagcctcgaagagtttatcgaaggagttcagaaggaccagatgctgctggatacccttacacggagcctcgatctgacaaggatcgtgagacgcttacagaatggtgaacaagacgaagagggcgccgacgaagctgctgaggctgccgggtag

SEQ ID NO: 190193 - DNA, 267 bp, synthetic construct
  misc_feature 1..267: note = Description of Artificial Sequence: Synthetic coding sequence
  source 1..267: mol_type = other DNA
atgggcaacgtgatggagggcaagagcgtggaggagctgagcagcacagaatgtcaccagtggtataagaaatttatgaccgaatgcccatctgggcagctgaccctgtacgaatttagacagtttttcggccttaagaacctctcccccagcgcttcccagtacgtggagcagatgtttgagacatttgactttaataaagatggttatattgattttatggaatatgtggcagccctgtcactcgtcttaaaaggaaaagtctag

SEQ ID NO: 190194 - DNA, 606 bp, synthetic construct
  misc_feature 1..606: note = Description of Artificial Sequence: Synthetic coding sequence
  source 1..606: mol_type = other DNA
atgggcaacgtgatggagggcaagagcgtggaggagctgagcagcacggagtgtcaccagtggtataagaagttcatgactgaatgcccctctggacagctcacactctacgagttcaggcaatttttcgggctgaagaacctgtcaccttcagcatctcaatacgtggaacagatgttcgaaacgtttgactttaataaagacggatacatcgacttcatggaatatgtcgctgccttgtcactggtcctaaaaggaaaagttgagcagaaactgagatggtattttaagttgtatgatgtggacggcaatggctgtatcgaccgggacgagctgctgacaattatccaggcaattagagcgatcaacccttgctcagatacaactatgaccgccgaggaatttacagataccgtgttttctaagatcgatgtaaatggagatggggaattgtccctagaggaatttatcgagggtgtgcaaaaggatcagatgcttctggacaccctcacaagatccttggacctgacacgcatcgtccggagactgcagaacggggagcaagacgaagagggagccgatgaggctgctgaagccgctgggtag

SEQ ID NO: 190195 - DNA, 1020 bp, synthetic construct
  misc_feature 1..1020: note = Description of Artificial Sequence: Synthetic coding sequence
  source 1..1020: mol_type = other DNA
atggaccagaacaacagcctgcccccctacgcccagggcctggcctccccccagggcgcaatgacccccggaattccaattttttctcccatgatgccatacgggacaggattgactccacagcctattcaaaatactaatagcctgtctatcctggaggaacaacagcggcagcagcaacaacaacagcagcagcagcagcagcaacagcagcagcagcaacaacagcagcagcaacaacagcagcagcagcagcagcagcagcagcagcagcagcagcaacaggccgtggccgcagccgcagtgcaacaatcaacaagccagcaagcaacccagggcactagcggacaggctccccaactgttccacagtcagactctcaccaccgcccctctgcctggaaccacaccactttacccttctcccatgacgccaatgacacctatcacgcctgccacgccggcctcagagagctccggtattgttccacaactgcagaatattgtctcgactgtgaatcttggatgcaagctggaccttaagacgatcgctctgcgcgcacggaacgctgagtacaatccaaagaggtttgctgctgtgatcatgagaatacgagagccaaggacgactgcattgatttttagctcgggcaaaatggtgtgtacaggcgccaagtcagaggaacagagcagacttgctgcacgcaagtacgcaagagtcgtgcagaagctgggcttccccgccaaattcttggactttaagattcaaaatatggtaggatcttgcgacgtaaaattcccgattcgcttagaaggactggttctgacccaccaacagttcagttcttacgagcccgaacttttcccaggccttatatatcggatgatcaaaccccgtattgtgttgctcatctttgtaagtggaaaggtcgtactaacaggggccaaggttagggccgagatctatgaggccttcgagaacatctatccaatcttaaaaggtttccggaagacgacctag

SEQ ID NO: 190196 - DNA, 519 bp, synthetic construct
  misc_feature 1..519: note = Description of Artificial Sequence: Synthetic coding sequence
  source 1..519: mol_type = other DNA
atgggccaggagttcagctgggaggaggccgaggccgccggcgagatcgacgttgccgagctgcaggaatggtacaaaaagtttgttatggaatgcccatccggaacactgttcatgcacgaatttaagcgcttttttaaggttaccgacgatgaggaggcatcccagtacgtggaagggatgtttcgggctttcgataagaacggtgacaataccatcgactttctggaatacgtcgcagctttaaacctggtgctgaggggtaccctggagcacaaactcaaatggacttttaaaatatacgataaggacgggaacggctgtatagataggttagaattgctcaatatagtggaatgtagaagagagctgcagaccgagcaaggacaattgttgacacccgaggaggtggtcgacaggatattcctgctggtcgatgaaaacggcgacggccagctctctctgaatgagtttgtcgaaggagccagacgggataacttactgatgcccaccctttag

SEQ ID NO: 190197 - DNA, 630 bp, synthetic construct
  misc_feature 1..630: note = Description of Artificial Sequence: Synthetic coding sequence
  source 1..630: mol_type = other DNA
atgggcaacggcaagagcatcgccggcgaccagaaggccgtgcccacccaagagacccacgtatggtatagaacattcatgatggagtatccttctggtctgcagacactccacgagttcaagacgcttttaggactccagggtttgaaccagaaagcgaataagcatatagatcaggtgtataacacctttgacacaaacaaagacggctttgtggactttctggaatttattgctgctgtgaacttgattatgcaagagaagatggagcagaaactgaagtggtatttcaaactgtatgacgccgatggcaacggttcaatcgataagaatgaacttctggatatgtttatggcggttcaggcattgaacggacagcagacgctcagcccagaggaattcattaatctggtgttccataaaatcgacattaacaatgatggagagttgacactggaggaattcatcaatggcatggctaaagatcaggatcttctggagatcgtgtataaatcttttgattttagcaacgtgctgagggtgatctgcaacggaaaacagcccgatatggagactgacagcagcaaaagtcccgataaagccggcttaggaaaggtcaaaatgaaatag

SEQ ID NO: 190198 - DNA, 591 bp, synthetic construct
  misc_feature 1..591: note = Description of Artificial Sequence: Synthetic coding sequence
  source 1..591: mol_type = other DNA
atgggcaacggcaagagcatcgccggcgaccagaaggccgtgcccacccaggagacccacgtgtggtacagaacttttatgatggagtaccccagcggactccaaaccttgcatgagttcaaaactctgctaggactgcaaggcctgaatcagaaggccaataagcacatcgaccaggtctacaacacatttgacacgaataaggatggtttcgtggacttcctggaattcattgcagctgtcaacttgattatgcaggaaaagatggagcagaagctgaaatggtacttcaaattatacgacgctgacggcaatggctcaattgataagaatgaactgttggatatgtttatggctgtgcaggcccttaacgggcagcaaaccctttccccagaagagtttattaacctggtgttccacaagatcgacatcaataatgatgggaatggcgctactttatattggatcacattccccactaaagggattgactttagacggatctaccagtggcacggaaaaaggtctggaagtccaggcgactgtctgcaggagctccgcttgctgcagtgtgctgagtctaatctgtag

SEQ ID NO: 190199 - DNA, 348 bp, synthetic construct
  misc_feature 1..348: note = Description of Artificial Sequence: Synthetic coding sequence
  source 1..348: mol_type = other DNA
atgaacgccttcctgctgagcgccctgtgcctgctgggcgcctgggccgcactggcgggaggcgtaaccgtgcaagatggcaatttcagtttcagccttgaatctgtaaagaagctcaaagacctgcaggagcctcaggagcctagggtcggaaaattgcgcaattttgcaccgatccccggtgaacccgtcgttcccatcctctgctctaacccaaattttcccgaagagttaaagccattatgcaaagagcccaatgcacaggagatcctgcagcgccttgaggagattgccgaagatcccggaacgtgtgaaatttgtgcatatgccgcttgtactgggtgctag

SEQ ID NO: 190200 - DNA, 339 bp, synthetic construct
  misc_feature 1..339: note = Description of Artificial Sequence: Synthetic coding sequence
  source 1..339: mol_type = other DNA
atgggctgccgggccgccagcggcctgctgcccggcgtggccgtggtgttgcttctcctccttcaaagcacacagagcgtgtacatccagtatcagggattcagagtccaactggagtccatgaagaaattgtccgacctggaagcacagtgggctcccagcccccgactacaggcacagtcgctgctgccagcggtctgccaccacccagctctcccccaggaccttcagcccgtatgcgcctctcaggaggcctcaagcatattcaagaccctgcgaacgatcgccaacgatgactgcgaactgtgcgtaaacgtggcatgcacaggttgtctttag

SEQ ID NO: 190201 - DNA, 594 bp, synthetic construct
  misc_feature 1..594: note = Description of Artificial Sequence: Synthetic coding sequence
  source 1..594: mol_type = other DNA
atgagcggcccccggcccgtggtgctgagcggccccagcggcgccggcaaaagcaccctactgaagagactgttacaggagcattccggaatctttggttttagcgtaagccatacaaccaggaatcctagacccggcgaagagaacgggaaggattactattttgttactcgggaggtgatgcagcgggatattgcggccggggatttcatagaacacgctgaattcagcggcaatctctacggaacatcaaaagtggccgtgcaagcagtgcaggctatgaaccggatttgcgtcttggacgttgaccttcaaggggtccggaatatcaaagccaccgatctccgccctatatacatttcagtacagcccccatccttgcacgtgctggagcagcgccttaggcaaagaaataccgagaccgaggagtctctagtgaagaggctggccgccgctcaggccgacatggagagctctaaagagcccggtctgtttgatgtggtcatcattaacgattctcttgatcaggcctatgccgaactgaaggaagccttaagcgaggaaattaaaaaggctcagcggacaggggcttag

SEQ ID NO: 190202 - DNA, 594 bp, synthetic construct
  misc_feature 1..594: note = Description of Artificial Sequence: Synthetic coding sequence
  source 1..594: mol_type = other DNA
atgagcggcccccggcccgtggtgctgagcggccccagcggcgccgggaaaagtacactactcaaaagactgttacaagaacactcgggcattttcgggttttcggtttctcatacaaccagaaatccccggcctggagaggaaaacggaaaggattactatttcgtgacacgggaggtgatgcagagggatatcgccgcaggagattttattgagcacgccgagttttcgggcaacctgtacgggacaagcaaggttgctgtgcaggcagtgcaggcaatgaataggatatgcgtgctcgatgtcgacctgcagggcgtcaggaacatcaaggccacagacttacgtcccatttatatttctgttcaaccaccgtccttgcacgtgctggaacagagactgcgtcagaggaataccgaaactgaagagtcactagtaaagcggctggcggcggcacaggccgatatggagtcctcgaaggagcctgggctgtttgacgtggtcataattaacgactctctagaccaagcatacgccgagcttaaagaggctttatccgaggagatcaagaaagcacagaggaccggtgcgtag

SEQ ID NO: 190203 - DNA, 594 bp, synthetic construct
  misc_feature 1..594: note = Description of Artificial Sequence: Synthetic coding sequence
  source 1..594: mol_type = other DNA
atgagcggcccccggcccgtggtgctgagcggccccagcggcgccggcaaaagtactttgctcaagaggctgctccaagagcattctggaatctttggcttttccgttagccacactactcgtaatcccagacctggggaggaaaatggaaaagactactacttcgttactagggaggtgatgcaacgtgacattgccgcgggagactttatagagcatgctgagttctccggcaatttatatggaacaagcaaagtcgccgtacaagctgttcaggccatgaaccggatctgtgtcttagacgtcgacctgcaaggagtgcgcaatatcaaggccactgacctgaggccaatctatatatctgtacagcccccctccttgcacgtccttgagcaaaggctaaggcagaggaacacagaaaccgaggaatctttggtgaagaggttggcagccgctcaggccgatatggagtcgagcaaggaacccggattattcgacgtagtgatcatcaatgattcactcgatcaggcctatgctgagctgaaagaagcactgagcgaggagatcaaaaaagcccaacgcacgggcgcttag

SEQ ID NO: 190204 - DNA, 600 bp, synthetic construct
  misc_feature 1..600: note = Description of Artificial Sequence: Synthetic coding sequence
  source 1..600: mol_type = other DNA
atgagcggcccccggcccgtggtgctgagcggccccagcggcgccggcaaatctacgctgctgaaaaggctgttgcaggagcattccggcatttttggtttcagcgtcagtcgcgaatcaagagccttggtcgagggctaccatgaagagccggaggcacggcgcggtgagaggcagcgggaggtcatgcagagggacatcgctgccggagactttatcgagcatgccgaattctctgggaacctgtacggaacaagcaaagtagctgtccaggccgttcaggcaatgaataggatctgtgtcctggatgtagacttgcagggggtaaggaacatcaaggccacggacctgcgcccaatctacattagcgttcagcctcctagtctccacgtactggagcagcggctgcgacagcgtaataccgagacagaagaatccctggtcaaacgtctggcggctgcacaagcagatatggagtcgagtaaagagcccggcctgttcgatgttgtcatcatcaacgactctttagatcaggcctacgctgagctcaaggaggccctcagcgaagagatcaagaaagcccaacggactggagcttag

SEQ ID NO: 190205 - DNA, 729 bp, synthetic construct
  misc_feature 1..729: note = Description of Artificial Sequence: Synthetic coding sequence
  source 1..729: mol_type = other DNA
atgagcggcccccggcccgtggtgctgagcggccccagcggcgccgggaaatccacactcctgaagcgactcctgcaggagcactccgggatattcggtttctcggtcagtcacaccacgagaaatccacgccccggtgaggaaaatggtaaagactactactttgtgacccgggaggtgatgcagcgggatattgcggctggcgatttcatcgagcatgcggagtttagtggcaacttgtacggaacaagcaaggtagctgtccaggcagttcaggctatgaacaggatctgcgtgctcgatgtcgatctccagggcgtacgaaatataaaggctacagatttacggcccatttatatcagcgtgcagcccccatctctccatgtcttacgtctgcggcaaagaaacacagaaaccgaggagagtctagtgaaaaggctggccgcagcccaagctgatatggaatccagtaaggaacccgggctgtttgatgtggtgatcatcaacgactctttagaccaggcgtacgccgaacttaaagaggccctgtcagaagtggggccttctctctgccttcctggtcagggtcctcgaggagggctgggggccaggcccctcttgtccatgagacccttgcgcaaatcccggaaattgaaggggcccgctcctgaggcatgttgcttgttctcagctcctagggcccacactggccctggacagcagcattag

SEQ ID NO: 190206 - DNA, 657 bp, synthetic construct
  misc_feature 1..657: note = Description of Artificial Sequence: Synthetic coding sequence
  source 1..657: mol_type = other DNA
atgctgcggcggcccctggccggcctggccgccgccgccctgggcagggccccacctgacggcatgagcgggccccggcctgtggttctgagtggcccgagcggagcaggcaagagcaccctgctgaaacgtctgttgcaggagcatagcggaatcttcggctttagcgtgagtcacaccacacgcaatccccggccaggggaggaaaatggcaaggattattactttgtgacccgagaagttatgcagcgagatatagccgcaggcgacttcatcgagcacgcagagtttagtggcaacctctacggtactagtaaggtagccgtacaggccgttcaggctatgaaccggatatgcgtgctggatgtggatcttcagggagttaggaacatcaaggcgacagacctgcgacccatttacatctctgtccaacctccatcgttgcacgtgctggagcagagactgcggcagagaaatactgagactgaagagtctctcgtgaaaaggctcgctgccgcacaggcggacatggaatcttcacccgccgggttggaatcctgccctacggccgccgtgagaaccgctgccggtcaatctcctgcgtgcctgatgtggtcctcgctgaccactgcctggactcggccaacacagtcttag

SEQ ID NO: 190207 - DNA, 594 bp, synthetic construct
  misc_feature 1..594: note = Description of Artificial Sequence: Synthetic coding sequence
  source 1..594: mol_type = other DNA
atgagcggcccccggcccgtggtgctgagcggccccagcggcgccggaaagagcaccttgctgaaacgcctacttcaggaacactctgggattttcggcttttctgtctcacatacaacaagaaacccaaggccaggtgaagagaacgggaaggactactatttcgtcacccgcgaggtcatgcaaagagatatcgcagcgggtgattttatagaacacgctgaattcagcggcaatctctacggcacctctaaggtagcagtgcaggccgtgcaagccatgaacaggatctgcgtcttagatgtcgatcttcagggcgtccgaaatattaaggccacagacctccggccgatttacatcagcgtccagccaccctccttacacgtgctggagcagcgactccgccagcggaacaccgaaacagaggaatccctggttaagcggctagctgccgcccaggccgatatggagtccagcaaagaacctggcctcttcgacgtcgtcatcataaacgactccctggatcaggcctacgcagagctgaaggaggcattgagtgaggaaattaaaaaagcccagaggaccggggcatag

SEQ ID NO: 190208 - DNA, 726 bp, synthetic construct
  misc_feature 1..726: note = Description of Artificial Sequence: Synthetic coding sequence
  source 1..726: mol_type = other DNA
atgctgcggcggcccctggccggcctggccgccgccgccctgggcagggctccccccgacgggatgagcggccctcgcccagtggtcctgagtggaccttccggcgccggcaagtctaccttactgaaacgtctgctccaagaacactcagggatatttggcttctccgtctctcataccactcgtaacccgaggcccggtgaagagaatgggaaggactattactttgtcacccgggaggtgatgcagcgcgatattgcagcaggggatttcattgagcacgcggagttttctgggaatctctatgggactagcaaagttgccgtacaagcagtccaggctatgaaccggatctgcgtactcgatgtcgatctgcagggagttcggaacattaaagcgacagatctgcggccaatctatatttccgttcagccacccagcctccacgtgctggaacagcgattgcgacagagaaacacagaaactgaggagagcctcgtgaaacgcctggcagccgcccaggctgacatggagagccggaaccaagaatcctcaaaggatcgtaggctcaggctggctgtgtgcagtcgtcatcctgggcccatccaggaccagggttcttccatcgaaccccctccgtggcaggccattaggcagttatgcgctcttgggcagcacgttgagtggaggcgatgttgcccctgtgggtggaatattctgggatag

SEQ ID NO: 190209 - DNA, 594 bp, synthetic construct
  misc_feature 1..594: note = Description of Artificial Sequence: Synthetic coding sequence
  source 1..594: mol_type = other DNA
atgagcggcccccggcccgtggtgctgagcggccccagcggcgccggcaagagcaccttgctcaaacgccttctacaggagcattctgggatatttggattttcggtaagtcacacaacaaggaatccgcggcctggagaggagaatggaaaggactactacttcgtcacccgtgaggttatgcagcgggatatagctgctggagactttatcgagcatgcagagttcagcggaaacctctacggtaccagtaaggtagccgtgcaagccgtgcaagccatgaaccgcatttgtgtacttgacgtggatctccaaggcgtgcgcaacatcaaagccactgatctgaggcctatctacatttctgtgcagccaccaagtttacatgtcctggagcagcgactgcggcagagaaataccgaaactgaggaatctcttgtaaaacggctagctgctgctcaagccgacatggagagcagtaaagagcccggcttatttgacgtggtcatcattaatgactcacttgatcaggcctacgcggaactcaaagaggctttgtccgaggagatcaaaaaagcgcagcgaactggcgcctag

SEQ ID NO: 190210 - DNA, 657 bp, synthetic construct
  misc_feature 1..657: note = Description of Artificial Sequence: Synthetic coding sequence
  source 1..657: mol_type = other DNA
atgctgcggcggcccctggccggcctggccgccgccgccctgggcagggccccgcctgacggtatgtcaggcccccggccagtcgtgttaagcggtccatctggagcagggaaaagcacacttctgaagcggctgttgcaggagcactccggtatctttggatttagcgtcagtcacaccacacggaaccctagaccgggagaagagaacggtaaagattattactttgtaacccgagaagtgatgcagcgggacatcgcagccggcgatttcatcgaacacgcagaattttcaggaaacctctatggtacttccaaagtagccgtgcaggctgtgcaggcaatgaatcggatctgcgtcctggatgtcgatctgcagggcgtgcgcaatataaaagctacagatctgcgacctatatacatctcggtacaaccaccttctctgcacgtgctggagcaaaggttgagacagaggaataccgagactgaagagagcctggtgaagaggctagcagccgcgcaggctgatatggagagtagcaaagagccaggcttgttcgacgtggtgataattaatgactctctcgatcaagcttatgcagagctcaaagaggctctgtctgaggagattaagaaggcacagaggacgggggcatag

SEQ ID NO: 190211 - DNA, 762 bp, synthetic construct
  misc_feature 1..762: note = Description of Artificial Sequence: Synthetic coding sequence
  source 1..762: mol_type = other DNA
atggccggcagccagaaggaggagatcatgcccccccagcagggcgtgccattccaggaaagcggctgttgggggagcatgggagctcagagccgggagagatccggtcgcgatcatagcggcacatggatctgcgccggcggatcgcaagagacctttcatttaggagccccagtcgaaacaacttgtctggccggcatgagcggtccaaggcctgttgtcttatcgggccctagcggggcagggaaatctaccctgctgaagagattgttgcaggaacacagcgggatttttggcttttcagtgagccacacaactaggaaccctagaccaggagaggaaaatggcaaggattattacttcgttaccagggaggttatgcagcgggatattgccgctggagattttattgaacacgcggaattctccggtaacctgtacggaaccagcaaggtggcagtgcaggccgtccaagccatgaacagaatctgcgtccttgacgtcgatcttcagggcgtacggaatatcaaggctactgacctgaggccaatatacatttccgtgcagcccccctccctgcacgtgctcgagcagcggctgcgccagagaaataccgaaaccgaagaatccctggtgaagagactggccgctgcccaggccgatatggagagctctaaagaacctggcctgttcgatgtcgtgatcatcaacgactccttggaccaggcatacgccgaattgaaagaggccctgtctgagtag

SEQ ID NO: 190212 - DNA, 516 bp, synthetic construct
  misc_feature 1..516: note = Description of Artificial Sequence: Synthetic coding sequence
  source 1..516: mol_type = other DNA
atgagcggcccccggcccgtggtgctgagcggccccagcggcgccggaaaatcaaccttgctgaagagactgcttcaggagcatagcggaatcttcgggttctctgtctcgcgcgagtctaacactaccagaaaccctaggcctggcgaggagaatggcaaggactactacttcgtaacaagagaagtcatgcaaagagatatcgccgcaggtgactttatcgagcacgccgagttctccgggaacttatacggaacaagtaaagtggctgtgcaggctgtccaggcaatgaaccggatatgcgtgctagatgtggatttgcagggtgtccggaatatcaaggcaacagatctcaggcctatctatattagcgtccagccaccctctctacatgtactggagcagcgtctaagacaaagaaatactgaaacagaggagagcctggtgaagcgcctggccgccgcccaagccgacatggagagcgagatcaaaaaagctcagaggacaggcgcctag

SEQ ID NO: 190213 - DNA, 819 bp, synthetic construct
  misc_feature 1..819: note = Description of Artificial Sequence: Synthetic coding sequence
  source 1..819: mol_type = other DNA
atggccggcagccagaaggaggagatcatgcccccccagcagggcgtgccattccaagagagtggttgctggggatccatgggcgcccaatctagggagaggtccggcagggatcactccggaacctggatttgcgcaggcggcagccaggagaccttccacttaggggctccagtcgaaacaacgtgtcttgcagcatcactgctaactccaaggcatgtgggccctcaggcgtgtggggccgagagagcctttgggagctgggaggagcatccagcagaggaggccgctccgggtgcccagcgacacctgtggctgcagcgggtaccgtaccacgaggaaccagaggctcgaaggggagaaaggcagcgcgaagtgatgcaaagggacatcgccgcaggcgacttcattgagcacgcagagttcagtgggaatctttatggaaccagcaaggtcgccgtgcaagccgtacaggctatgaaccggatctgtgtcttggatgtggatcttcagggtgtcagaaacataaaggccacagatttacgccctatctacatatccgtgcagccgccgtctttgcacgtcctggaacagaggttacggcagagaaacacagagaccgaagagtctttagtcaaacgcttggctgccgcacaggccgacatggaatcccgcaaccaggagagtagcaaggacagacgtctacgtctggccgtgtgctctcggcatccaggacccattcaggaccagggctcatctatcgaaccccctccctggcaagcaatcagacagctgtgcgccttaggacaacacgtatag

SEQ ID NO: 190214 - DNA, 654 bp, synthetic construct
  misc_feature 1..654: note = Description of Artificial Sequence: Synthetic coding sequence
  source 1..654: mol_type = other DNA
atgctgcggcggcccctggccggcctggccgccgccgccctgggccgtgccccacccgacggaatgtccgggccccggccagttgtcctttctggccctagcggggcggggaagagtacacttttgaaaaggctgctacaggagcattccggcatcttcggtttttcagtgagtcacacaactcgtaatccacgaccaggagaagaaaatggtaaggactattactttgtgacccgggaggtgatgcagcgtgacattgctgcgggggacttcattgaacatgctgagtttagcggcaacctgtatggcacaagtaaagttgccgtgcaggccgtgcaggccatgaacagaatctgtgtgctggatgttgacctccagggcgtgcggaacatcaaggctacagaccttcggcccatctatatctccgtgcagccacccagtctccacgtgctggaacagaggctccggcagcggaacacagaaacggaagagtcactggtcaagcgcctggcggccgcccaggcagacatggagtcttccaaggagcctggactctttgatgtagtcattattaacgacagcctggatcaggcttacgccgagctcaaagaagcattatccgaagagatcaagaaagcgcaaaggactggttag

SEQ ID NO: 190215 - DNA, 915 bp, synthetic construct
  misc_feature 1..915: note = Description of Artificial Sequence: Synthetic coding sequence
  source 1..915: mol_type = other DNA
atgaaccgggccttcagccggaagaaggacaagacctggatgcacactcccgaagcactgtccaaacacttcattccctacaacgccaagttcttgggcagtacagaagtggaacagccgaagggaaccgaggtcgtgagagatgccgtcaggaagctcaagtttgcgagacacataaaaaaatcagaaggccaaaagatccctaaagtggaattgcagatcagtatttacggagtgaagattttagagcccaaaaccaaggaggttcagcataattgtcagctgcacagaatcagtttctgtgcagatgacaaaactgataaacgaatttttacatttatctgtaaagactcagaaagtaacaaacacctttgttacgttttcgacagcgagaaatgtgcggaagaaattacactaacaatagggcaagctttcgatctcgcataccgaaagtttctagagtctgggggtaaagatgtggagacacgcaagcagatagccggcctgcagaagcgcatccaagaccttgaaacagagaacatggaactgaagaataaagtgcaagacttggagaatcagcttcggatcacacaggtgtctgccccacccgctggcagcatgacacctaagtcaccgtccactgatatctttgacatgataccgttttcaccaatttcccatcaatcctccatgccaaccaggaatggaacccaacccccaccggtcccgtcccggtccacagaaatcaagcgggacctttttggagcagagccgttcgaccctttcaattgtggagctgccgactttcccccagatatccagtccaagctggatgaaatgcaggagggctttaagatgggcctaacattggagggaactgtgttctgcctggacccactcgactcaagatgttag

SEQ ID NO: 190216 - DNA, 915 bp, synthetic construct
  misc_feature 1..915: note = Description of Artificial Sequence: Synthetic coding sequence
  source 1..915: mol_type = other DNA
atgaaccgggccttcagccggaagaaggacaagacctggatgcacacccccgaagccctctctaagcacttcatcccctacaacgccaaatttctgggctctacagaagtagaacaacctaaagggacagaagtcgtccgagacgctgttagaaagctcaagtttgcacgccacattaaaaaaagcgaagggcaaaagatccccaaggtggagctgcagattagtatttacggagtgaaaatcctcgagcctaagacaaaagaggtccagcataactgccagctgcacagaattagcttctgcgcagacgacaagacagacaagcgtatctttacctttatttgcaaggactctgagagtaacaaacacttgtgttatgtcttcgatagtgaaaagtgcgcggaagagattactctcacgattggacaggcatttgatctggcctataggaaattcctggagagcggcggcaaagatgttgaaactcggaagcagattgccgggctccagaagagaattcaagacctggaaacagagaatatggaactgaagaataaagttcaggatctcgagaatcagttacgtattacacaagtatctgctccaccagcgggtagcatgaccccaaaatcaccttcaacagatatcttcgatatgattcctttctccccaatctcgcatcagtccagcatgcccactcggaacggaacacagccccctcccgtgccgtcacgaagtactgaaatcaaaagggatctgttcggtgccgagccgttcgatccttttaactgtggtgcggccgacttccctccagatatccaatctaagctcgatgaaatgcaggagggattcaaaatggggctgacacttgagggcactgtgttttgccttgacccacttgatagccggtgttag

SEQ ID NO: 190217 - DNA, 915 bp, synthetic construct
  misc_feature 1..915: note = Description of Artificial Sequence: Synthetic coding sequence
  source 1..915: mol_type = other DNA
atgaaccgggccttcagccggaagaaggacaagacctggatgcacactccagaagctttatctaagcatttcatcccttataacgccaagttcctgggtagcaccgaagtggagcagcccaaggggacagaagtggttcgggacgctgtccgcaaactcaaattcgcccggcacatcaagaagagcgagggacagaaaatccccaaggtggaactccagatctctatctatggcgtaaagattctcgagcctaaaaccaaggaggtgcagcataactgccagctgcataggatcagtttctgcgctgacgacaagactgataagagaatctttacatttatttgtaaagattccgagtccaataagcacctatgctatgtgtttgacagcgaaaagtgcgctgaagagataacgctgacaataggacaggccttcgatcttgcttaccggaagttcctggaaagtggaggcaaggacgttgaaacaaggaagcaaatcgctggtctgcagaagcgaatccaagacctcgagactgagaatatggagctgaaaaataaagtccaggatttggaaaatcagctgagaataacacaggtctccgccccacccgcaggctcaatgacaccaaaatccccatccacagacatattcgatatgatcccgttcagtcctatttctcatcaatccagtatgcccacccggaatggcacccagcccccaccagttccttccagaagtactgagattaagcgcgaccttttcggcgctgagccctttgacccattcaattgcggggctgccgattttcccccagatatccaaagcaaactggatgagatgcaggagggtttcaaaatgggcttgaccctagaagggaccgtattctgcctggatcccctggactctcggtgttag

SEQ ID NO: 190218 - DNA, 504 bp, synthetic construct
  misc_feature 1..504: note = Description of Artificial Sequence: Synthetic coding sequence
  source 1..504: mol_type = other DNA
atgaaccgggccttcagccggaagaaggacaagacctggatgcacactccggaagctctaagtaaacattttatcccttataacgcaaagttcctgggaagcactgaagtcgagcagcccaaggggacagaggttgtgagagatgctgtgagaaaactgaagttcgctcgtcatattaaaaagagcgagggccagaaaattccgaaggtggagctgcagatttccatttacggtgtcaagatcctagaacccaagacaaaggaagtgcagcacaattgccagctgcataggatctccttttgtgcagacgataaaaccgataaacgaattttcacctttatttgtaaggacagtgaatctaacaagcatctttgctacgtgttcgatagcgaaaagtgcgtgtcgattcccgatgtggtgggctggtttgtattgttctataaaccagggatagtacttcttctggccctggcaaagtacctcaagatgaacaactttctgtag

SEQ ID NO: 190219 - DNA, 915 bp, synthetic construct
  misc_feature 1..915: note = Description of Artificial Sequence: Synthetic coding sequence
  source 1..915: mol_type = other DNA
atgaaccgggccttcagccggaagaaggacaagacctggatgcacaccccagaagctctgagcaaacacttcatcccatataatgccaaattcctggggagcaccgaggtggagcagccaaaaggcacggaggtggtgcgcgacgcagtacggaagctgaagttcgcccgtcatataaagaagtcggagggacagaagatcccgaaagttgaactgcagatcagcatttatggtgtgaagatcctagaacccaagaccaaggaagtccagcataattgtcaactgcacagaatctccttttgtgcagacgataagaccgacaaacggatatttacttttatttgtaaggatagcgaatccaacaagcacttgtgttacgtgttcgatagcgaaaagtgcgcggaggagatcaccttgaccatcggccaagccttcgatttagcctacagaaaatttcttgaaagcggaggaaaagacgtggaaactcgaaagcagatcgcggggcttcagaagagaatccaagacttggagacagagaacatggagcttaaaaataaagtacaagacctcgaaaaccaactgagaattacccaagtctctgcgcctcccgccggttctatgacaccaaagtccccctctaccgatatctttgatatgatccctttttctccaatctcccaccagtcatctatgcctactcgcaatggaacccagccccctccggttccaagccgcagcaccgagattaaaagagacctgtttggagctgagcctttcgatccatttaattgtggagcagcagacttcccacctgacatccagagtaagctggatgaaatgcaggagggttttaagatgggtctgacgctcgaggggacagtgttctgtcttgacccactcgactctagatgctag

SEQ ID NO: 190220 - DNA, 207 bp, synthetic construct
  misc_feature 1..207: note = Description of Artificial Sequence: Synthetic coding sequence
  source 1..207: mol_type = other DNA
atgaaccgggccttcagccggaagaaggacaagacctggatgcacactcctgaggccttgtccaagcattttataccctacaacgccaaattcctggggtcaactgaggtcgagcagccaaagggaacagaggtggtgcgcgacgccgtgaggaaactcaagttcgcccgacacatcaagaaatcagagggccagaaaatcccttag

SEQ ID NO: 190221 - DNA, 504 bp, synthetic construct
  misc_feature 1..504: note = Description of Artificial Sequence: Synthetic coding sequence
  source 1..504: mol_type = other DNA
atgaaccgggccttcagccggaagaaggacaagacctggatgcacaccccagaggcactgtcaaaacattttatcccttataatgccaaatttctaggaagtacggaggtggagcaacctaaaggtactgaggtggtgagggacgcagtgcgtaagctgaagtttgccaggcacatcaagaagagcgagggtcagaaaattccaaaggtggaactgcagatttctatttatggcgtgaagatcttggaacccaagactaaagaagtacagcacaattgccagttgcacagaatctctttctgtgccgatgataagacagataagagaatcttcacgtttatttgcaaggattcagagagcaataagcacttgtgttacgtatttgactctgaaaagtgtgtgtctattccagacgtggttgggtggttcgtgctcttttataagcccggcatagtgctccttttagcccttgcaaagtacttgaagatgaacaattttctgtag

SEQ ID NO: 190222 - DNA, 585 bp, synthetic construct
  misc_feature 1..585: note = Description of Artificial Sequence: Synthetic coding sequence
  source 1..585: mol_type = other DNA
atgaccgagaacagcaccagcgcccccgccgccaagcccaagcgggccaaggcttcaaaaaagagcaccgaccatcctaagtattcagacatgattgtggccgctatccaggccgaaaagaatcgagccggctcaagcagacagtccatccagaagtacattaaatcacattataaagttggtgaaaacgcagactcccagataaaactgtctatcaagaggctggtgaccaccggcgttctgaagcagactaagggcgtaggcgcatctggatcttttagactggcaaaaagtgacgagcctaagaaatccgttgccttcaagaaaacaaaaaaggagattaagaaagtggccacacccaaaaaagccagcaagcctaagaaagcggctagcaaggcaccgacaaagaagcctaaagccacgcccgtgaagaaggcgaaaaagaaacttgctgcaaccccaaagaaggcaaagaaaccaaaaaccgtgaaagccaaaccagttaaggcctccaagcctaagaaagcaaagcctgtcaagccaaaggctaagagctctgcaaaaagagcaggcaaaaagaaatag

SEQ ID NO: 190223 - DNA, 534 bp, synthetic construct
  misc_feature 1..534: note = Description of Artificial Sequence: Synthetic coding sequence
  source 1..534: mol_type = other DNA
atgaccgagaagagcaccgaccaccccaagtacagcgacatgatcgtcgctgcgatccaagccgaaaaaaaccgggctggttccagtcggcagtccattcaaaagtatattaaatcacattacaaggtgggcgagaacgctgacagccaaatcaagctgtcgatcaagcgtttagtgaccaccggagttctcaaacagacaaagggtgtgggagcatccggcagtttccgcctcgccaaatcggatgaacctaagaaaagcgtggcctttaagaagacaaagaaagaaattaagaaagtagccacaccaaagaaagcatcaaagcctaagaaagccgcctctaaggccccgacgaaaaaacccaaggcgactccggtgaagaaagcaaagaaaaagctggcagctacaccaaaaaaggccaagaaaccaaaaacagttaaagccaagcccgtgaaagcctcgaagcctaaaaaggcaaagcccgttaagcccaaagctaagtcctccgccaagagggctggaaaaaaaaagtag

SEQ ID NO: 190224 - DNA, 411 bp, synthetic construct
  misc_feature 1..411: note = Description of Artificial Sequence: Synthetic coding sequence
  source 1..411: mol_type = other DNA
atggcccggaccaagcagaccgcccggaagagcaccggcggcaaggctcctcggaagcagctggctactaaagccgctaggaaatcagccccgagcacagggggtgtgaagaagccacacagatatcggccaggcactgtggctttgagggaaatccgaagataccaaaaatcaaccgaactcctgatccggaagctcccgttccaacgcctggttagggagatagcccaggacttcaagacagacctgagattccagtctgccgcgatcggggccctccaagaggccagcgaagcctacctcgtgggtctgttcgaagataccaatctctgtgcaattcatgccaagcgagtaaccatcatgcccaaagatattcagctggctcggcgcattagaggcgaaagagcgtag

SEQ ID NO: 190225 - DNA, 372 bp, synthetic construct
  misc_feature 1..372: note = Description of Artificial Sequence: Synthetic coding sequence
  source 1..372: mol_type = other DNA
atggcccggaccaagcagaccgcccggaagagcaccggcggcaaggctccaagaaagcagcttgcaactaaggcggctcggaagagcgcgccctccaccggcggggtaaagaagccacaccgttacagacccggcacagtcgctctgcgcgaaattaggcggtaccaaaaaagcacagagcttttaatacgaaaactcccatttcagcgcctggtgagggaaatcgcacaagattttaagactgacctccggttccaatccgccgccattggggctctccaggtcaagtggtgggttggccgcctacgcgtgtgtatccccgtggtgtatcaagaacaatttcagattgtagcttgcgcctacatcatatag

SEQ ID NO: 190226 - DNA, 411 bp, synthetic construct
  misc_feature 1..411: note = Description of Artificial Sequence: Synthetic coding sequence
  source 1..411: mol_type = other DNA
atggcccggaccaagcagaccgcccggaagagcaccggcggcaaggcccctcgcaaacaactggccacaaaggccgcgcgaaaatcagcgccctccaccgggggcgtcaagaagccgcatagataccggcctggaacagtggctctgagggagatccgaagataccagaagtccacagagctgcttattagaaagctgccttttcagcgcctggttagagagattgcacaggatttcaagacagacctgagatttcagtcggcagccattggtgccctccaggaggcatcagaagcttacctcgtcggactattcgaggatacgaatctatgcgcgatccacgcaaagcgggtgactattatgccaaaggacattcagctggcacggcgcattagaggcgagcgggcatag

SEQ ID NO: 190227 - DNA, 411 bp, synthetic construct
  misc_feature 1..411: note = Description of Artificial Sequence: Synthetic coding sequence
  source 1..411: mol_type = other DNA
atggcccggaccaagcagaccgcccggaagagcaccggcggcaaggcacctcgcaaacagttggctactaaagccgcccgtaagtcagcaccctcaacggggggcgtaaaaaagcctcaccgctacagaccggggaccgtcgctctgagagaaatccggaggtaccagaagtccactgaattactcattaggaagctcccctttcaacgactggttcgtgaaatcgcgcaggattttaagaccgatctgaggtttcagagcgctgccattggagctttacaggaagcttctgaggcttaccttgtgggactattcgaagacactaacctgtgcgcaatccacgcgaagagagtcactataatgcctaaggacatacagctcgcgcgtagaatcaggggagagcgtgcttag

SEQ ID NO: 190228 - DNA, 411 bp, synthetic construct
  misc_feature 1..411: note = Description of Artificial Sequence: Synthetic coding sequence
  source 1..411: mol_type = other DNA
atggcccggaccaagcagaccgcccggaagagcaccggcggcaaggcccctcggaaacaactggctaccaaggccgccagaaagtcagccccttccaccggtggagtgaaaaagccacatcggtacaggccggggacagtcgctctgcgcgaaattaggcgctatcagaagtctactgaattgctgatccgaaagctcccttttcagagactggtccgtgagatcgctcaggactttaaaactgaccttcggttccagagtgcggcaatcggtgcattgcaagaggcgtccgaagcttacttggtagggctattcgaggacactaacctctgtgctatccatgcgaaacgcgtgacaattatgcccaaagatatccagctggcgaggagaattaggggggagagggcttag

SEQ ID NO: 190229 - DNA, 1047 bp, synthetic construct
  misc_feature 1..1047: note = Description of Artificial Sequence: Synthetic coding sequence
  source 1..1047: mol_type = other DNA
atgcccgacgagctgaccgagcccggccgggccacccccgcccgggctagctcttttcttattgagaacttactcgctgccgaggctaaaggtgcgggacgcgccacacagggggatggtagcagggaggatgaggaagaggacgacgatgatccagaggacgaagacgctgagcaggctaggcggcgacggttacagaggcggcggcagctgttggcgggcactggcccgggcggcgaggctagagctcgggcactcctcggacctggggccctgggcttgggaccccgaccaccgcccggacccggacctcctttcgctctcggttgtgggggcgctgccaggtggtatccccgcgcccacggaggctatggtggcggactgtcacccgatacctctgacagagattcaccagagactggagaagagatgggacgagctgagggggcctggcctcgtggacctgggccgggagccgtccagagggaagcggcagagctggctgccaggggacctgcagccggcactgaagaagcttcggagctggctgaggtccccgctgcggcaggtgaaacgagaggcggggtgggcgtgggcggaggtaggaagaagaaaactcggactgtattcagcaggtcccaggtattccagctggagtcaacctttgacctgaaacgatacctatcatccgcagaaagagcgggcctggctgcaagcctgcagctgacggaaacacaagtgaaaatctggttccagaacagacggaataaatggaagcggcaactggctgctgagctagaagccgccagcctgagccctccaggagctcagcgactcgtgagagttccagtactgtaccacgagagcccccctgccgcagccgccgccggccctccggctacactgccctttccccttgctccggccgcaccagctcctcccccccccctcttagggttcagtggggcgctggcctaccctcttgcagcctttcccgctgccgcttccgtacccttccttcgcgcccagatgcctggcctggtctag

SEQ ID NO: 190230 - DNA, 822 bp, synthetic construct
  misc_feature 1..822: note = Description of Artificial Sequence: Synthetic coding sequence
  source 1..822: mol_type = other DNA
atgggcagcaaggaggacgccggcaagggctgccccgccgccggcggggtcagtagctttaccattcagtccattcttggcggcggaccctccgaggctccacgtgagccagtaggctggcctgcccggaagagatcactaagcgtttcatcagaggaggaggagccagacgatgggtggaaagcacccgcttgtttctgccccgaccagcacggaccaaaggaacaaggtcctaagcaccatcctccaattcctttcccctgtctcggcacaccgaagggctccggcgggagcggccccggcggcctggagagaacaccatttctgtcaccaagtcactctgatttcaaggaagaaaaggagaggctgctgcccgccggcagcccttctcccggtagcgaacgaccccgcgacggcggggccgagcggcaggccggggctgcgaaaaagaaaactcggaccgtgttcagcaggtcccaagtatatcagctggagtcaacattcgacatgaaacggtatctaagctccagtgagcgggcctgtctggcctcctccctgcagctgaccgaaacgcaggtgaagacctggttccagaacaggaggaataaatggaagagacaattgtccgctgagttggaagccgccaatatggcccacgcctccgcacagactttggtttccatgccactcgtgtttagagatagctcactgcttagagtcccggtgccaaggtccttggccttcccggccccattatattacccgggttccaatctgagtgcactacctctttacaacctgtataataagctggactattag

SEQ ID NO: 190231 - DNA, 1074 bp, synthetic construct
  misc_feature 1..1074: note = Description of Artificial Sequence: Synthetic coding sequence
  source 1..1074: mol_type = other DNA
atgcccgagcccggccccgacgccgccggcaccgccagcgcccagccccagcccccaccccccccacctccggcgcccaaggagtctcccttctctatcaagaaccttttaaatggagaccaccatcgcccccctcctaagccccagccgcccccacggactctttttgcacccgcatccgccgctgcggcagccgccgccgctgctgcagctgccgcaaagggggccttagaaggggcggccggttttgctttgagccaagttggcgacctggcctttccacgctttgaaattccggcccagcgcttcgcattgcctgctcattacctggaaaggtcacctgcctggtggtacccatacaccctgaccccggctggaggacatctgccaagacctgaggctagcgaaaaagccctactgcgagattcaagtcccgccagtggaacagatagggatagtcccgaacctctgcttaaggctgatcccgaccacaaagagctggactccaagtctcctgatgaaattatcctggaagaaagcgattccgaggagagcaagaaagagggggaggccgcacctggagctgccggcgcctcagtgggggcagccgcggctaccccgggcgctgaggattggaaaaaaggagctgagtcacctgagaagaagcccgcttgtaggaagaagaagacaagaacggtgttttcccgatcccaggtgtttcagttagagtctacatttgacatgaagcggtacctatcttcttcagagagggccggcttagctgctagcctgcatctgactgaaactcaagttaaaatttggtttcaaaacaggcggaataaatggaagcgtcagctggcggcagagctcgaagcagccaacctgagtcacgctgccgctcagcgtatcgtgagagttcccatcctctaccacgagaactctgcggcagaaggagctgcggccgccgctgccggagctcccgtaccagtttcccagccgctgctcacttttccccatccggtgtattactcccaccccgtggtttcctccgtgccccttcttcggcctgtgtag

SEQ ID NO: 190232 - DNA, 3405 bp, synthetic construct
  misc_feature 1..3405: note = Description of Artificial Sequence: Synthetic coding sequence
  source 1..3405: mol_type = other DNA
atggagagcacccccagcttcctgaagggcacccccacctgggagaaaaccgcccctgagaacgggatcgtcaggcaagagccaggttctcctccccgagatgggctgcaccatgggcccctttgtctgggcgagcccgcccccttctggcgaggcgtgctgtccactcctgatagttggctgccacccgggtttcctcagggtcctaaagacatgttgcccctagttgagggtgagggacctcagaatggggaaagaaaggtgaactggctgggatccaaagaggggcttagatggaaagaggcaatgctgacacaccctttagccttttgcggtcccgcctgtcccccccgctgcggaccactgatgccagagcattccgggggtcatctgaaatctgatcccgtggcgttccggccttggcactgccctttcctgctggaaactaagattctggaacgcgccccattttgggtgcccacgtgcctacccccttacttggtgagcggactgccacctgagcacccctgcgactggcctcttaccccacacccttgggtctacagcgggggacaaccaaaagtaccctccgcattctctctgggtagcaaagggttttattacaaggatccatcaatccccagacttgctaaagagccactggcggcagcagaacccggcttgtttggactgaacagcggagggcatctgcagagagctggagaggcggagaggccttccctgcaccagagagacggagagatgggggccggcagacagcagaatccctgtccactgtttctggggcagcccgacaccgtaccctggacgagctggcccgcttgtcccccagggctggtgcataccctgggtaatgtgtgggctggccctggagatgggaacctcgggtaccagctcgggccacccgcaacacccagatgtccctccccagagcccccagtaacgcagcgcggctgctgctcgtcctaccctccgactaaaggcggcgggctcgggccatgcggcaaatgtcaagagggcctcgagggcggcgccagtggcgcctctgagccttccgaggaggtgaacaaagccagcggtccgcgcgcatgtcctcctagtcatcatacgaagctgaaaaaaacctggctgacccgtcattctgagcagtttgaatgtcccagagggtgccctgaggtcgaggaaaggcccgtggcccgtctgagagcattgaagagagccggctctcctgaggttcaaggcgcaatggggtctcccgccccaaaaagacctcccgacccctttcccgggaccgccgagcaaggggccggcggatggcaggaggtgcgagacaccagtattggaaacaaggatgtagactccggccagcatgacgagcagaagggaccccaagacgggcaggctagcctgcaagacccaggcctgcaggacattccatgtctggctcttcccgccaaactggcccagtgccagagttgcgctcaagccgccggcgaggggggtggccacgcttgtcatagccagcaggtacgtcggtctcccctaggcggcgagctgcagcaagaggaggacacagccaccaactcatcctcggaagaaggacctgggagtgggcctgattctagactgtcaacaggactggcaaaacatctgctaagtggcctgggagacaggctgtgcaggttgctgcgaagagagcgagaggctcttgcgtgggcgcagcgggagggtcaggggcctgccgtcactgaggacagccctgggatcccccggtgctgctctaggtgccaccatggcctttttaatacgcattggcgatgcccgcgatgttcccaccggctctgtgtggcttgcggcagggtggctggcacagggagagccagagaaaaggcagggttccaggaacagtcagctgaagaatgcacccaggaagccgggcacgctgcctgcagcttgatgctgacccagttcgttagcagtcaggccctggccgagctcagtactgcaatgcatcaagtgtgggtgaaattcgacattagggggcattgcccatgtcaggcggatgcaagagtttgggccccgggagatgctggccaacagaaggaatcaacgcaaaaaacgccacctactccacagccttcatgcaacggcgacactcacaggaccaaaagcattaaggaggagactcctgactccgctgagacccccgccgaggaccgagcggggaggggacccttaccatgtccatcactatgcgaactcttagcgtcgactgcggtcaaactgtgcctgggacatgaacggatccatatggcatttgcccccgtgacacctgctctaccttctgacgacagaatcactaatatcttagactctatcatagcccaagtcgtggagaggaagatccaagagaaggctttaggcccgggattaagagccggaccgggtctgcgcaagggcctgggcctgccattgtctcctgtccgccctcggctccctccccccggcgctctgctctggttgcaggaaccccagccatgccctaggcggggcttccacctgtttcaagagcactggcggcaaggccagcctgttctcgtgtctggcattcagaggacgctgcaggggaatctctggggcaccgaagctcttggcgccctcggggggcaggttcaggccctttctccattgggtcccccccagccgtcctcccttgggtctaccaccttctgggaaggatttagttggcccgagcttcggcccaagtcagacgaagggtccgtgttgctattacaccgggctctcggggacgaagatacttctcgcgtggaaaatctggctgccagccttcctcttcccgaatactgcgctttgcatggcaaattgaatctggccagctacctgccccccggactggcacttcggccactggaaccccagctctgggctgcctatggagtttccccccacaggggtcatctgggaactaagaacctgtgtgtcgaggtggccgacctcgtgtccatcctggtgcacgccgacaccccactgcccgcttggcaccgggcacagaaagatttcttgtcagggctggatggtgaggggctgtggtcccctggctcacaggttagtacagtctggcacgtgtttcgagcccaagacgcgcagcgtatccggcggttccttcagatggttcaaggacttgtctcaaccgtcagtgtcactcagcactttctcagcccggagacgtctgcactctccgcccagctgtgccatcagggcccctccctgccaccagattgtcacctgctctatgcccaaatggactgggcagtcttccaggctgttaaagtcgccgttggaaccctgcaggaagccaaatag

SEQ ID NO: 190233 - DNA, 3570 bp, synthetic construct
  misc_feature 1..3570: note = Description of Artificial Sequence: Synthetic coding sequence
  source 1..3570: mol_type = other DNA
atggagagcacccccagcttcctgaagggcacccccacctgggagaagaccgcccctgagaacgggatcgttaggcaggagcccgggtccccacccagagacggactgcatcacggaccactctgcttgggcgagcccgctcctttttggcgaggggtgctttccacgccagatagttggctcccccctggtttcccacagggtccgaaggatatgctacccctggtggagggcgagggaccacagaatggggaacggaaggtcaactggctcggcagcaaggagggactcaggtggaaggaggcaatgctcacacatcccctcgccttttgcggccccgcctgtcccccacggtgtggacctcttatgccagaacacagcggcggtcatttgaagagtgacccggtggcatttcggccatggcattgtcctttcctgcttgaaaccaagattctcgaacgcgctccattctgggttcccacctgcctaccaccttatctggtttccggactgccgcccgagcacccttgcgattggcccttaaccccccacccctgggtttactctggtggacagccgaaggttccttcggccttcagcctaggcagtaaaggcttctactacaaggaccccagtatcccacggttagcgaaggaacccctcgctgctgcagagccaggtctattcgggttaaatagtggaggacaccttcaaagggctggggaagcggaaaggcctagcctgcatcagcgcgatggtgaaatgggcgctggccggcagcagaatccatgtccgttattccttggccagcctgatactgttccctggacttcttggccagcttgtcctccaggcctggttcacaccttggggaatgtatgggctggaccgggcgacggaaacctgggctaccaactgggaccccccgcaacgcctcggtgtccgagccctgaacctcctgtgacccagagagggtgctgctctagttatcctccaacaaaaggtggggggttgggcccttgcggcaaatgccaagaaggcctggaagggggggcaagtggagcttccgagccttctgaagaagtaaacaaggcgtcgggcccgagggcctgccccccatctcatcataccaagctgaaaaagacatggttgacgcgccacagcgaacagtttgagtgcccacggggctgtccggaagttgaggaaaggcccgttgcacgcttacgagcactcaagcgagctggatctccggaagtgcagggcgctatgggctcacccgccccaaaacgcccccccgacccttttcctgggacggctgagcagggagccgggggctggcaagaggtccgtgacaccagcattggcaacaaggatgtggattcggggcaacacgacgaacaaaaggggccccaggatgggcaagccagtcttcaagaccccgggctacaggatatcccctgcctcgctttacctgctaagctggcccaatgtcagtcgtgcgcacaggcggctggtgaaggtggcgggcatgcatgtcacagtcagcaggttcgcaggagtccgctggggggcgaacttcaacaggaagaggacaccgccacaaacagtagctctgaagaaggccccggctctgggcctgatagtcgattaagtaccggtcttgcaaaacatttactgtctgggctgggcgacaggttatgtagattgttacgtcgcgagcgcgaagcactggcctgggcccagagggagggtcaggggcccgccgtgacagaggactctcccgggataccccgttgctgcagcaggtgccatcatgggctcttcaacactcattggcgctgcccccgctgcagtcacaggctgtgcgtcgcctgtgggcgggtagcaggtactggccgcgcgagggaaaaggcaggattccaggagcagtccgcggaggaatgtacacaagaggcggggcatgccgcctgttctctaatgctgacacaatttgtgtctagtcaggctcttgccgagctgagcaccgcaatgcaccaggtgtgggtgaagtttgacatcagaggacattgcccatgtcaagctgacgctcgcgtatgggccccaggggatgccggtcagcaaaaagagtcaacgcagaagaccccccctacccctcagccaagctgtaacggtgacactcatagaacaaagtccattaaagaagagacccccgacagcgccgaaactccggctgaagaccgggctggccgaggtccccttccatgcccatccctatgtgagctgcttgcctcaacggcagtgaagctgtgcctggggcacgaacgcattcatatggctttcgcccccgtgacacccgcactccccagcgatgatcggatcaccaatattctcgatagtattattgcgcaggtagtcgaaaggaagatacaggaaaaggcacttgggccaggactccgtgccggccccggacttcgtaaaggactcggcctgcctctatcgcccgtgaggccacgactgcccccccccggcgctctgctctggctgcaggaacctcaaccatgtcctaggcgggggttccatctctttcaggagcattggaggcagggacaaccagtgctggtttcggggattcagcggaccctgcaagggaacttgtgggggactgaagctctgggggcattgggaggccaagtccaagccctctctcctctgggccccccacagcctagctccctcggttccactaccttttgggagggtttcagttggccagaactgcgacccaagagtgatgaaggctcagtgttactgctgcatcgtgcgctgggagacgaggatacctctagggtggaaaatctggcagcatctcttccgctgcccgagtactgcgctctacatggcaagctgaatctggcgtcttacttaccacctggccttgcgctgagacctctggaaccacaactgtgggccgcttatggagtgtcgccacaccgaggacatctgggaacaaagaatctgtgtgttgaagtggctgatcttgtctccatactggttcatgctgacactccacttcctgcctggcatagggcacagaaggacttcctctccggcctggacggggaaggcctctggtcacccggttcgcaggtgagcaccgtgtggcatgtgtttcgggcccaggacgcccagaggatccggcgattcctacaaatggtttgccccgccggggccggtgcccttgaaccgggcgcccctggatcttgttacttggatgcaggactccgcagacgcctccgggaagagtggggagtttcttgttggacgctgttgcaggcgcccggggaagccgtgctcgtgcccgctggcgcaccacatcaggtccaaggtctggtgtcgacagtcagcgtgactcagcatttcttgagtccagagactagtgccttgtccgctcagctgtgtcatcagggaccaagtctgcctccggattgtcacctgctgtacgcccaaatggactgggccgtgttccaagccgttaaagtggccgtcgggacccttcaggaggctaaatag

SEQ ID NO: 190234 - DNA, 1410 bp, synthetic construct
  misc_feature 1..1410: note = Description of Artificial Sequence: Synthetic coding sequence
  source 1..1410: mol_type = other DNA
atggccagcccccgggagctgacccagaaccccctgaagaagatctggatgccatacagcaatgggcgcccagcacttcacgcatgccaaagaggagtttgtatgaccaattgtcccaccctcatagtcatggtcggactgcccgcaagggggaagacctatatcagtaagaagttgacacggtacctgaactggattggagtaccgacacgcgagttcaacgtggggcagtatcggcgggatgttgtcaagacctacaaaagtttcgagtttttcctgccagacaacgaggaggggctcaagatccgaaagcaatgcgctctagccgccctccgcgacgtgcggcggttcttgtctgaagagggcggacacgtggcggtgttcgacgccaccaataccaccagggaacgccgagccacgatattcaattttggtgagcagaacggctacaagacattcttcgtggagagcatttgcgtggatcccgaggtgatagccgccaatatcgtccaggtgaaactcggctcacccgactacgttaacagagatagcgacgaggctactgaggatttcatgagacgaattgagtgctacgaaaactcttacgagagcctggacgaagatctggacagagacctttcctatattaaaatcatggatgtgggccagtcttatgttgtgaacagagtggccgaccatatccagtctcggattgtttactatttaatgaatattcacgttacaccaagatctatttatttatgcaggcacggtgagtccgagttaaacctcaagggcaggattggcggagacccggggctgagcccccgtggtcgtgaatttgccaagagtttagctcagtttatttcggaccaaaacatcaaggatctgaaagtgtggaccagccagatgaaaaggactatccagactgctgaagcactcggcgtcccttacgagcagtggaaggttctgaacgaaatcgacgcaggagtatgcgaagaaatgacatatgaggaaatccaggacaattacccactcgagttcgctttgcgagatcaagataaataccgctaccgttaccctaagggggaatcctacgaagacttggtacagcggctcgaaccggtgataatggagctggagcgccaagagaacgtcctcgtaatctgccaccaggccgtaatgaggtgcttactcgcctattttctcgataaggcagccgaacagctgccctatctgaaatgccctcttcatacagtgctgaagttaaccccagtagcctatgggtgtaaagtggagagtatcttcctgaacgtcgctgctgtcaatacgcaccgagatcgcccgcagaacgtggacataagcagaccccccgaagaggcactcgtgacagtgcctgctcaccagtag

SEQ ID NO: 190235 - DNA, 522 bp, synthetic construct
  misc_feature 1..522: note = Description of Artificial Sequence: Synthetic coding sequence
  source 1..522: mol_type = other DNA
atgggcctgccccggcgggccggcgacgccgccgagctgcggaagtcacttaagccactccttgagaaaagacgtagggcacgcattaatcaatcgctatcacaactaaagggcttgatccttccacttctggggagagagaacagcaattgttcgaagcttgaaaaggctgacgttctagagatgaccgtcagatttctgcaagagctgcctgcgagtagttggcccacagccgcacccctgccctgcgattcctaccgggaaggatattccgcctgcgtagctcgcctcgctcgcgtcctgccagcctgtagggtgctggagcccgccgtatctgcccggctcctggagcacctgtggcggagggctgcatccgccacgttggacggcggccgggccggagattcaagtggaccatcggcacctgctccagccccagctagcgcccctgaacctgcctctgctcctgttccatcaccccccagccctccctgtggtccagggctatggagaccatggtag

SEQ ID NO: 190236 - DNA, 231 bp, synthetic construct
  misc_feature 1..231: note = Description of Artificial Sequence: Synthetic coding sequence
  source 1..231: mol_type = other DNA
atgggcctgccccggcgggccggcgacgccgccgagctgcggaagtccctcaaacctctgctcgagaaaagaaggcgggcaaggatcaatcagtctctcagtcagctgaaaggactaatattgccgctgctcgggcgcgaggacgcctccggctggcatacttggctgccgctgcacgcgcagaactgttttctcctctatatacaggcacccgagcagccccctgcgtag

SEQ ID NO: 190237 - DNA, 231 bp, synthetic construct
  misc_feature 1..231: note = Description of Artificial Sequence: Synthetic coding sequence
  source 1..231: mol_type = other DNA
atgggcctgccccggcgggccggcgacgccgccgagctgcggaagtctctgaagcctttattagagaagcgccggagggcaagaataaaccagagcctctcccagttaaaaggcctcattctgcctctgttaggaagagaagacgcgtctggctggcacacttggctcccactacatgcgcagaactgcttccttctgtatatccaagctccagagcaacccccagcttag

SEQ ID NO: 190238 - DNA, 561 bp, synthetic construct
  misc_feature 1..561: note = Description of Artificial Sequence: Synthetic coding sequence
  source 1..561: mol_type = other DNA
atggagaagaagcggcgggcccggatcaacgtgagcctggagcagctgaagtcactcctcgaaaagcactacagccatcagattcggaagcgaaaactggagaaggccgatatattggagctctctgttaagtatatgcggtcactgcagaactctctccagggtctttggccagtgcctaggggtgcggagcagcccagcgggtttcgcagctgccttccaggtgtgtcacaactcctccggagaggtgacgaagttggcagtgggctacgatgtcctctagtaccagagtctgcagctgggtccactatggattccgccgggctcggacaagaagcaccagctctgtttcgaccatgtacaccagccgtatgggctccagcccccgcagccggtggcccccgctctccaccaccactgctgctgctgccagagagcctcccaggctctagcgcttccgtgcccccaccccagccagcctcttctagatgcgcagagagcccaggcttgggcctgcgcgtttggcgcccatgggggagtcccggggacgaccttaattag

SEQ ID NO: 190239 - DNA, 666 bp, synthetic construct
  misc_feature 1..666: note = Description of Artificial Sequence: Synthetic coding sequence
  source 1..666: mol_type = other DNA
atggccgccgacacccccggcaagcccagcgccagccccatggccggggctccagcttccgccagtcgaacaccagataagccacggagtgccgctgagcatcgtaagagcagtaagcccgttatggaaaaaaggcgtcgggcgcggattaatgaaagcttagcccaactgaagactctcattctcgatgccctgagaaaagagagctcaaggcactcgaagctggagaaggctgatattctagagatgacagtccggcacttacgaagtctgaggagagtgcaggtcactgcggctctgagcgcggatcctgcagttctcgggaaatatcgcgcaggatttcacgaatgcttagccgaagtgaaccggttcctcgcaggttgcgagggagtcccagctgatgtacgctctcgcctgctgggccacctcgcggcctgcctgcgacagctgggcccgtcacggcgtcccgcgtcactgtcgccggccgcccccgccgaggccccagctccagaggtgtacgcgggaagacctctgttgccctccctgggtggccccttccccctgttagctccgccactcctccccggtttaacacgagccttgcctgccgctcctcgcgccggcccacagggtcccggcggcccgtggaggccgtggctgagatag

SEQ ID NO: 190240 - DNA, 744 bp, synthetic construct
  misc_feature 1..744: note = Description of Artificial Sequence: Synthetic coding sequence
  source 1..744: mol_type = other DNA
atggccgccgacacccccggcaagcccagcgccagccccatggccggagctccagctagtgctagtaggaccccagacaaaccccggagtgccgctgagcaccggaaggtagggtcacgccccggcgtgaggggggctaccggcggccgagaagggaggggcacacagcccgtccctgatcctcaatcttcaaaacctgtgatggaaaaaaggcggcgtgcccgaattaatgagtcactggcccagctcaagactctgatcctggatgctttgaggaaggaatcttcccgccacagcaagctggagaaagctgacattctagagatgaccgtaaggcacctgagaagtctcagacgcgtccaagtgactgcagccttgtctgccgatcccgcagtgctgggcaagtaccgcgcagggttccatgagtgtctggctgaagtgaatcgttttctggctgggtgtgagggggttcctgctgacgtgcgatcacgtctcctgggccacctcgctgcttgcctgaggcaactaggtccctctagacgcccagcctccctgagtcctgctgcccctgctgaggcccctgcccccgaagtatatgctgggagacctctgctgcccagcctaggaggcccttttcctctgctcgccccccccttgcttcctgggctgacacgtgctttgcctgccgccccacgtgcaggcccccagggccccggaggtccttggcgaccctggcttcgctag

SEQ ID NO: 190241 - DNA, 501 bp, synthetic construct
  misc_feature 1..501: note = Description of Artificial Sequence: Synthetic coding sequence
  source 1..501: mol_type = other DNA
atggcccccagcaccgtggccgtggagctgctgagccccaaggagaaaaacagactgcgtaagcctgttgtcgagaagatgcgccgggaccgtattaattcatcgatcgagcaactcaaactccttcttgaacaggaatttgcacgccaccagccaaattccaagctggagaaagcagatatcctcgagatggccgtgagttatctcaagcactccaaggcttttgtcgccgcagctggacccaagtcactgcaccaggactactctgaagggtattcctggtgcctccaagaggccgtgcagttcctcactctccacgcagccagtgatacccaaatgaagctgctctaccactttcagaggcctcctgccgcacccgccgcaccagccaaggagcctaaggcgcccggagccgcaccacctcccgcgctgtccgctaaagctaccgcagctgcagctgctgcccaccaaccggcttgcggtctgtggcgtccatggtag

SEQ ID NO: 190242 - DNA, 675 bp, synthetic construct
  misc_feature 1..675: note = Description of Artificial Sequence: Synthetic coding sequence
  source 1..675: mol_type = other DNA
atggccccccccgccgcccccggccgggaccgggtgggccgggaggatgaagacggatgggagacccgcggagacaggaaagcaaggaagcccctggtcgaaaagaagcgcagggctcgcattaacgagtccctgcaggaattgcgcttgctcttagctggcgccgaggtgcaggccaagttggaaaacgcagaagttctggagctgaccgtgaggagagtgcagggcgttctgcgggggcgagcccgagaacgtgaacagttacaggcagaggcatctgagcggtttgcagccggctacattcagtgcatgcacgaggtgcacacattcgtgagcacctgtcaggcgattgacgctactgttgccgctgaactcttgaaccacctgctcgaatctatgcccctcagggagggctcctcattccaggatctgttgggggacgccttggccgggccacctagagctccagggcgctcaggttggcctgccgggggggccccgggcagccctattcccagcccccctggcccaggggacgacttgtgctccgacttggaggaagcccctgaggccgaattatcccaggccccggctgaagggcctgacctggtcccggctgccctcggtagcttgactactgctcaaatcgctagatccgtttggaggccttggtag

SEQ ID NO: 190243 - DNA, 645 bp, synthetic construct
  misc_feature 1..645: note = Description of Artificial Sequence: Synthetic coding sequence
  source 1..645: mol_type = other DNA
atggccccccccgccgcccccggccgggaccgggtgggccgggaggacgaggacggttgggagaccagaggcgacagaaaggccaggaagcctctagtagaaaaaaaaagacgggcccgcatcaatgagagtcttcaagagcttcggctacttctcgctggggcggaagttcaggctaagctcgagaacgccgaggtgctcgagcttaccgtgcgtcgggtgcagggagtgcttcgtggcagagcccggggtgagtggaggcgagggggacgcgggagacgcccccgagcccctgtgacacccgcgagaagacgcacatctctacccgctccactgagctgcaggcgcagaggtctgccacctgaacagggtgcacccccaaggctgctgggggagccacgaccacgggggcccggggggttgggccacgccgtggccgcccatcgcgcggggcgcggatcactccctccaacactgggcccgcgcgctcgcgcggctgccggcggcagcgagagagccttgcgctgcagactccacccagtccatgcccgcggcgcgcatgtgcgggttcatgtaccagggcaccggaggtacagaaggtgtagagcacccgagccttcagctcgggtccacgccgcagcctag

SEQ ID NO: 190244 - DNA, 669 bp, synthetic construct
  misc_feature 1..669: note = Description of Artificial Sequence: Synthetic coding sequence
  source 1..669: mol_type = other DNA
atggccccccccgccgcccccggccgggaccgggtgggccgggaggatgaggatggatgggagacacgcggagatcggaaagccaggaagcccctggtggaaaagaaaaggagggctcgcatcaatgaaagcctccaagagctgcgcttgctgctggccggggctgaggccaagttggaaaacgccgaggtgctcgaacttacagtgaggcgggtgcaaggagtactgagaggaagggcgcgcgagcgcgagcaactgcaggctgaggcctcagaacggttcgctgctgggtatatccaatgtatgcatgaggtgcacaccttcgtctccacctgtcaggccattgacgcgaccgttgctgccgaactcctcaatcacttgctggaaagtatgcccctgagggaggggagttctttccaggatctgctgggggacgctctggcagggccacctagggcccccgggcgatccggctggcccgccggaggagctcccggaagtcccatacctagtcctcccgggcctggggatgatctatgctccgatctggaggaggctcccgaggccgagttgtcacaggctcccgccgaaggacctgacttagtgcctgcggccctaggttctctgaccacagcacaaatcgcgagatcagtgtggagaccatggtag

SEQ ID NO: 190245 - DNA, 678 bp, synthetic construct
  misc_feature 1..678: note = Description of Artificial Sequence: Synthetic coding sequence
  source 1..678: mol_type = other DNA
atggtgacccgggaccgggccgagaaccgggacggccccaagatgctgaagccgctggtggaaaaaagaaggcgcgataggattaaccgttcgctggaggaacttcgtcttctgctcctagagcgcacccgagaccaaaacctgcgcaatcctaagcttgaaaaggccgaaatacttgagtttgccgtgggttatctgcgcgaacgctctcgcgttgaacctcctggagtgcctcggagcccggtacaggacgcagaggcattagcgagctgctacctgtctggtttcagagagtgcttgctgcgcctggcagcgtttgcacacgacgctagtcctgccgcgcgtgcgcaattattttccgcgctgcatggatacctgagacccaaacccccccgccccaaacctgtggatccacgacctcctgccccacggccttccttggacccagcagcacctgctctcggaccggctctccaccagaggcctcctgtccatcagggccatccatcccctagatgcgcatggtcccccagcctatgctcccctcgggcaggagattccggcgctcctgcaccgctgacaggcttgcttccgccgccccctcctcctcatcgacaagatggcgctcctaaagctcctctgcctccaccaccagcgttctggcggccctggccatag

SEQ ID NO: 190246 - DNA, 693 bp, synthetic construct
  misc_feature 1..693: note = Description of Artificial Sequence: Synthetic coding sequence
  source 1..693: mol_type = other DNA
atggtgacccgggaccgggccgagaaccgggacggccccaagatgctcaagcccttggtcgaaaagagaaggagagaccggatcaacaggtctctggaagagctccggttactgcttctggagaggacaagggaccagaatcttcggaacccaaaactggaaaaagcagagattctggagttcgccgtaggttacctgcgtgaacggagccgagtggaaccacctgccgcagcagcccctggtgtcccaaggtctcccgtgcaagacgctgaggcacttgcatcatgttacctgtctggatttcgtgaatgccttctgcgtttggctgcttttgcccatgacgcttccccagctgccagggcccaactcttttcggctctacacggctacctgagacccaaaccacctcgcccaaagcccgttgatcccaggccacccgcaccacgaccatcactggaccccgccgctcctgccctgggacctgccctgcatcagcggccaccagtgcatcaggggcatcctagcccccgctgcgcatggtcaccctctctgtgctcaccccgggcaggtgactccggggcacccgcccccctgactgggttgctcccacccccccctcctccccaccgacaagacggtgcacccaaggcacctctgcctccacctcctgcattctggcgcccgtggccttag

SEQ ID NO: 190247 - DNA, 1014 bp, synthetic construct
  misc_feature 1..1014: note = Description of Artificial Sequence: Synthetic coding sequence
  source 1..1014: mol_type = other DNA
atgaagcggccctgcgaggagaccaccagcgagagcgacatggacgagacaattgatgtaggatcggaaaataattacagcgggcagtctacctcaagcgtgatccgcctgaactcaccaaccactaccagccaaatcatggcaaggaagaaacgtaggggcatcatagagaaacgacgccgagatcgtatcaataactctctctctgaactccgccggttagttccgacagcttttgaaaaacagggttctgcaaaacttgagaaggccgagatccttcagatgacagtcgaccacctgaaaatgctacaggcaactggcggaaagggttacttcgatgcccacgcccttgctatggatttcatgagtataggctttagggagtgcctgaccgaggttgcccgctacctttcatccgtggagggcctggacagctcagacccgcttcgggtgcgactggtaagccacctgtcaacatgcgcaacgcaaagagaagccgccgctatgaccagctcgatggctcaccaccaccacccattgcaccctcaccattgggccgccgctttccaccatctgcccgctgcactgctacaaccgaacggccttcacgcatccgaatcaacgccttgtaggctgagcaccacgtcagaggtcccccccgcacatggctccgccctgttgactgccacctttgcccatgcagacagtgcactgcggatgccttcaactggttcagtcgccccatgcgtgccacctctgtcaacatcactcctgtctctttccgcaaccgtgcacgctgccgcagccgctgcgaccgctgctgctcactcttttccactgtcctttgctggagccttcccaatgctcccccccaacgcagccgcagcagtcgccgcggctaccgctatctcaccgcccctgtctgtgagtgccacgagctccccgcaacagacgtcttctggcactaacaacaaaccatatcgcccctgggggaccgaggtgggagccttttag

SEQ ID NO: 190248 - DNA, 876 bp, synthetic construct
  misc_feature 1..876: note = Description of Artificial Sequence: Synthetic coding sequence
  source 1..876: mol_type = other DNA
atggcccggaagaagcggcggggcatcatcgagaagcggcggcgggaccggatcaacaattccctctctgagctccggcggctcgttcctacggctttcgaaaaacagggtagtgctaagttagaaaaggcggagatcctgcagatgacggtcgaccatcttaaaatgttgcaggccacagggggcaagggctactttgatgctcatgcactggcaatggattttatgagcatcggctttagggagtgcctcactgaggtcgcaagatatctatcttcagtggaagggttggatagctcagatccacttagggtgaggctcgtgtctcacctttcaacatgcgcaacacagcgcgaggcagcggcgatgactagctccatggctcaccatcatcatcccttgcatccgcaccactgggccgctgctttccatcacttaccagcagctttgctccagcctaacggcctgcacgcatcggaaagtaccccttgccggctgagcactactagtgaagtgcccccagctcacggaagcgccttgctcaccgccacctttgcccacgccgactccgcgctacggatgcccagcaccggatctgtcgcgccttgcgtcccaccgctttcaacatctctgctgagcctgtcagccacagttcacgcggccgccgctgctgcaaccgctgctgctcactcctttccattaagctttgctggggctttccccatgctccctccaaatgctgccgcagccgttgcagccgctacagcgatctcaccccccctgtctgtgtctgctacttcctcacctcagcagacttctagtggtacaaataacaagccatatcgtccgtgggggacggaagtgggggccttctag

SEQ ID NO: 190249 - DNA, 1221 bp, synthetic construct
  misc_feature 1..1221: note = Description of Artificial Sequence: Synthetic coding sequence
  source 1..1221: mol_type = other DNA
atgagcgccctgggcgccgtgatcgccctgctgctgtggggccagctgttcgcagtcgactctggtaatgacgttacagatatcgcagacgatggctgtcctaagccacctgagatcgcccacggatacgttgaacacagcgtgcgctatcaatgtaagaactattataaactgaggaccgagggagacggggtctacactctgaatgataagaaacagtggatcaataaggcagtgggagacaaactccccgagtgcgaagccgacgacggttgccctaagcccccggaaatagctcacgggtatgttgaacactctgtgagataccagtgtaaaaattactataagcttcgcacggagggggatggggtatacacattaaacaacgagaagcagtggattaacaaggctgtgggcgacaaattgcctgaatgcgaagccgtttgtgggaagcccaaaaaccctgcgaacccggtccagcgcattctaggtggccatttagatgctaagggtagcttcccatggcaggctaagatggtgagtcaccacaatctcactacgggggccaccctcatcaacgaacagtggctcttgactacagccaaaaacctctttttaaatcacagtgagaacgccacagccaaggacattgctcctaccctgacgctgtacgtcggcaagaaacagttggttgagatcgaaaaagttgtgctgcaccctaactattctcaggtcgatatcgggctcatcaagctcaaacagaaagtcagcgtgaacgagcgggttatgcccatctgtctgcctagcaaggactatgctgaggtgggccgggttggatatgtgagtggatggggaaggaacgcaaacttcaagtttacagatcacctaaagtacgtgatgctcccagtggcagatcaggatcaatgcattcgtcactacgagggtagcaccgtgcccgagaaaaagacaccaaagtctccagtaggagtgcaacctattttaaacgagcacacattctgcgcagggatgagcaaataccaggaggatacttgttatggcgatgctggtagtgcatttgctgttcatgacctggaggaggatacctggtacgctacaggaattcttagctttgataaaagttgcgctgtggccgagtacggggtgtacgttaaagtgaccagcattcaggattgggtgcagaaaaccattgccgagaattag

SEQ ID NO: 190250 - DNA, 1149 bp, synthetic construct
  misc_feature 1..1149: note = Description of Artificial Sequence: Synthetic coding sequence
  source 1..1149: mol_type = other DNA
gtgtacgcctgcgtgtgcgtgtgcgtgtacatgcacgtgtgcgtggacgcctgtatgtgctgtgaagctggacgtctggccttccatagctccctttcttccctttgctctgctctgggtgcggttatagccctgctgctgtggggacagttattcgcagtagacagtgggaatgatgtgacagacatcgcggatgacgggtgcccgaaacctccagaaatcgcccatggttatgtagagcattccgtgcggtatcagtgcaagaactactataagcttaggacagagggagacggagtttacactctgaacgacaagaaacagtggatcaataaagcagtcggggataaactgcctgagtgtgaagcagtgtgtggcaagcccaagaatcctgcgaaccccgtgcagcgcatcctgggcggacacctcgacgctaaggggtcctttccttggcaggcgaagatggtctctcaccacaatctcaccacaggcgcgacgctcataaacgaacagtggttactgaccaccgccaaaaatctgtttctcaaccacagcgagaatgccaccgcaaaagatatcgcgccaaccctaacactatacgtcggaaagaagcagctcgttgaaatcgagaaggttgttctccacccaaactattcccaggttgatattggactgattaagttaaagcagaaggtaagcgtgaatgagcgcgtaatgcctatctgcctgcctagcaaagattatgccgaagtgggaagggtgggttacgtgtccggttgggggaggaacgccaacttcaaattcacagaccacctcaaatacgttatgctccctgtcgcggatcaggaccaatgtattaggcattatgaagggagtactgtgccagagaaaaagaccccaaagtcccctgtcggcgttcagccgattctcaatgagcacacattttgcgctggcatgtccaagtatcaggaggatacttgctatggcgacgcgggttctgccttcgccgtgcacgatttggaggaagacacatggtatgcaacaggcattctgagtttcgacaagtcatgtgccgttgctgagtatggcgtgtatgtgaaggtgacatccattcaggactgggtgcagaagactatcgccgaaaattag

SEQ ID NO: 190251 - DNA, 1044 bp, synthetic construct
  misc_feature 1..1044: note = Description of Artificial Sequence: Synthetic coding sequence
  source 1..1044: mol_type = other DNA
atgagcgccctgggcgccgtgatcgccctgctgctgtggggccagctcttcgctgtcgattctggaaacgatgtgactgatattgctgatgatggttgtcccaaaccccctgaaatcgcgcatggctatgtagaacattcggttcgctaccagtgcaagaattattataaactccggaccgaaggcgatggcgtctacactcttaacaatgaaaaacaatggatcaacaaagccgtgggcgacaagttgcctgagtgtgaggccgtgtgcggtaagcctaaaaatcctgccaatccagtccagagaatcttggggggacacctagacgctaaaggctccttcccttggcaagccaaaatggtttcccatcataacttgactacaggcgccactttgatcaacgagcaatggctccttacaactgccaagaatttattcttgaaccactctgaaaacgccaccgccaaggacatcgcacctaccctgactctgtatgttggcaagaagcagctggtagaaatcgagaaggtagttctgcacccaaattactcccaagttgatataggcctcatcaagcttaagcagaaggttagtgtgaacgagcgcgttatgcccatctgccttccctccaaagactacgctgaggtggggcgggtcggatacgtgagcgggtggggccgcaacgcaaactttaaatttaccgaccacctcaagtacgtcatgctgcccgttgcggatcaggatcagtgtataagacactatgaaggcagtacagtccccgaaaagaagacccctaaaagccccgtgggcgtgcaacccatcctcaacgaacacacgttctgcgccggtatgtcaaagtaccaggaagacacttgttacggtgacgctggctcggcctttgccgtgcatgacctcgaggaagacacttggtacgcgaccggtattctgtcttttgataaatcatgcgccgttgccgaatacggggtttacgtgaaagtaacctcaatccaggactgggtgcagaagaccatcgcggaaaactag

SEQ ID NO: 190252 - DNA, 846 bp, synthetic construct
  misc_feature 1..846: note = Description of Artificial Sequence: Synthetic coding sequence
  source 1..846: mol_type = other DNA
atgagccggatcagccagatgaccgccgcccggagccccccccggctacacatggccatgtggagcactagattcgcgacctcagtacggaccaatccagtgcaacggatcctgggaggacacctagatgccaaggggagctttccctggcaagcaaagatggtgtcccaccataacctgaccacgggtgcaactctcatcaacgaacaatggttattgaccactgccaaaaacttatttctcaaccattccgagaacgcaaccgctaaagacatagcacccacgctgacgctctatgttgggaaaaagcaactggtggaaatcgagaaggtggtactgcatccgaattacagtcaagtagatatcggactcatcaaactgaaacagaaagttagcgtcaatgaaagagtgatgccaatatgccttccaagcaaagactatgcagaggtgggcagagttggctatgtgtccgggtggggacgtaatgccaactttaaattcactgaccatttgaaatatgtgatgctgccagtggcagatcaagatcagtgcatacgacattatgaggggtcgacagtccctgagaagaagacccccaaaagtcccgtgggtgtccaacccattctcaacgagcacaccttctgtgctggcatgagcaaataccaagaagatacctgttacggtgacgccggaagcgccttcgctgttcatgaccttgaggaggatacctggtacgccaccggaatccttagctttgataagagttgcgccgtcgccgaatacggcgtgtatgtcaaagttacatcaattcaggattgggttcagaagaccattgcggagaactag

SEQ ID NO: 190253 - DNA, 552 bp, synthetic construct
  misc_feature 1..552: note = Description of Artificial Sequence: Synthetic coding sequence
  source 1..552: mol_type = other DNA
atgagcgccgcccgggagagccacccccacggcgtgaagcggagcgcctcccctgacgatgatttaggaagctccaattgggaggccgccgacctcggtaatgaagagcgcaagcagaagtttttacggttgatgggtgccggtaagaaagagcataccggacggttagtcataggtgaccataaaagcactagtcattttagaaccggcgaggaagacaagaaaataaacgaagaacttgagagtcagtatcagcagagtatggacagcaaactatctggcagatatagaagacattgcggcttaggcttctcagaagttgaggatcatgatggagaaggagacgtcgctggggacgatgacgatgacgacgacgactctccagatccagaaagtcccgacgacagcgagagcgacagcgaaagcgagaaggaggaatctgccgaggaactccaagctgcagagcatcctgatgaggtggaagatccaaagaataaaaaggatgctaaatcaaattataaaatgatgtttgtaaaaagtagtggctcttag

SEQ ID NO: 190254 - DNA, 1047 bp, synthetic construct
  misc_feature 1..1047: note = Description of Artificial Sequence: Synthetic coding sequence
  source 1..1047: mol_type = other DNA
atgagcgacctgggcgccgtgatcagcctgctgctgtggggccggcaactcttcgcactgtatagcggtaacgacgtaacggacatctccgacgacagatttcccaaacctcccgagatcgcaaatggttacgtggagcatctgttcaggtaccagtgcaagaattattataggctgaggacagagggtgacggcgtgtacacactcaacgacaaaaaacagtggattaataaggcggttggcgataagctgcccgagtgcgaagcagtttgtgggaagccaaagaaccctgcaaaccctgtgcaaagaattcttggcggccacctcgatgccaaggggtcgttcccctggcaagcaaagatggtcagtcatcataacttgaccactggcgccactcttattaatgagcaatggctgctcacgacagcgaaaaacttattcctcaaccacagcgaaaatgctacagcgaaagacattgcgcctaccctcacactctacgttggaaaaaaacagcttgtagaaattgaaaaggtagttctgcatccaaattatcatcaggtggacatcgggttaataaagctgaagcagaaagtgctcgtgaatgaacgggtgatgcctatttgtctgccctccaagaactacgcggaggtcgggcgcgttggatacgtgagtggctggggccagagcgataactttaagctcacagatcatctgaagtacgtgatgctgcctgtggccgaccagtacgactgcattactcattacgagggctcaacttgccccaagtggaaagctccaaaatcccccgtaggcgtccaacccatcctcaatgagcacaccttctgcgttgggatgagtaagtaccaagaagacacctgttacggggatgcaggatctgcctttgctgtgcacgacctggaggaagacacatggtacgccgctgggatcctcagctttgataagtcttgcgctgtcgccgaatacggcgtttatgtaaaagtgacatctatccagcactgggtgcagaagacaatagccgagaactag

SEQ ID NO: 190255 - DNA, 1047 bp, synthetic construct
  misc_feature 1..1047: note = Description of Artificial Sequence: Synthetic coding sequence
  source 1..1047: mol_type = other DNA
atgagcgacctgggcgccgtgatcagcctgctgctgtggggccggcaactgttcgccctatactccggaaatgatgtgacagatatcagtgacgatcggtttcctaaaccaccagaaatcgcaaatggttatgtcgaacacctcttccggtaccagtgcaaaaactactatcgactccgcacagagggcgacggagtttacacactgaacgacaagaaacagtggatcaataaggcagtcggagacaaactgcccgaatgtgaggctgtgtgcggaaagccaaagaaccccgctaaccctgtgcagaggatactgggggggcacctcgacgctaagggtagttttccatggcaggccaagatggttagccatcataacctcaccacaggagcaaccctgatcaatgaacagtggctcctgactactgccaagaatctttttctgaaccactccgaaaacgccactgcaaaagatatcgcgcctacacttacactctacgtgggcaagaagcagcttgtggagatcgagaaggtcgttcttcaccccaactatcatcaggtagacataggccttattaagttaaagcagaaggttcttgtcaacgaaagagtcatgccgatttgtctgccatctaaaaattacgccgaagtgggccgggttgggtatgttagcggttggggccagagcgataattttaagttaacagaccacttaaaatatgtgatgctgcctgtagcagaccagtacgattgcataacgcactacgaaggcagtacatgtcccaaatggaaggccccaaaatcccctgtcggagtccaacccattctgaatgaacatacattctgtgttgggatgtctaaatatcaagaggacacttgttatggggatgctggctctgcgtttgccgtccacgatttagaggaagacacatggtatgcagcaggcatcttgagcttcgataaatcgtgtgctgtggcggaatatggcgtatatgtgaaggtcaccagcattcagcattgggtccaaaagactattgccgaaaactag

SEQ ID NO: 190256 - DNA, 615 bp, synthetic construct
  misc_feature 1..615: note = Description of Artificial Sequence: Synthetic coding sequence
  source 1..615: mol_type = other DNA
atggccgccgccaacccctgggaccccgccagcgcccccaacggcgctgggctggtgctcggccactttattgcatctggcatggtcaaccagaaaaaccttgaaattgagttgctgaagctggagaaggacactgccgacgtggtgcacccctttttccttgcccagaaatgccatacactgcagagtatgaacaatcatttggaagctgtcctgaaagaaaagcggtctctgaggcagagattgttgaaaccgatgtgccaagagaacctgcctatcgaggccgtgtatcacagatacatggtccacttgctggaactggcggtgacttttatcgagcgactggaaacccaccttgagaccatacgcaatattccacacttggccgccaatctgaagaagatgaaccaggcactggctaagatggatatcctggtgacagaaaccgaagagctcgcggaaaacattcttaaatggaggaagcagcagaacgaggtctctagttgtattcccaagatcctagctgaggagtcctacctttataaacatgacatcattatgcccccactgcctttcacctcaaaagtccatgtgcagaccattaatgctaagtag

SEQ ID NO: 190257 - DNA, 837 bp, synthetic construct
  misc_feature 1..837: note = Description of Artificial Sequence: Synthetic coding sequence
  source 1..837: mol_type = other DNA
atggagccccaggaggagcgggagacccaggtggccgcctggctgaaaaagatatttggtgaccaccccatcccccaatacgaagtgaacccacggactaccgagattctgcatcatctctccgaaaggaacagagtgcgagatagggacgtgtacctagtgatcgaggacctcaaacaaaaggcgtcagaatatgagagtgaagccaaatacctgcaggacctgcttatggagtcagtgaatttcagtcctgccaacctgagcagcaccgggtctcgatacctgaatgctctggttgattcagctgtcgctctggaaaccaaggatacttcgttggcgtcgttcatccccgcagttaatgacttgaccagtgacctgttcagaaccaagtccaagagtgaggagattaagatcgaacttgagaaattggaaaagaatctgactgcaactctggtgctggagaaatgtctccaggaagatgtcaaaaaagctgagctccatctcagcactgagcgcgcaaaggtggacaaccgcaggcagaacatggactttttaaaagctaaatccgaagagttccggtttggcatcaaagccgcagaggagcagttgtctgctaggggtatggatgcttccttgagccaccaatctctggtagccctgtccgagaaactcgcaagactcaaacagcagaccattccgctgaagaagaagctcgaatcttaccttgacctgatgccaaacccttccctcgcgcaagtcaaaattgaggaagctaaacgggaactggatagtatagaagccgagctgacaaggagggttgatatgatggagctgtag

SEQ ID NO: 190258 - DNA, 708 bp, synthetic construct
  misc_feature 1..708: note = Description of Artificial Sequence: Synthetic coding sequence
  source 1..708: mol_type = other DNA
atggccgccgccaacccctgggaccccgccagcgcccccaacggcgctgggctggtattgggacacttcatcgcttcaggcatggtgaaccaggaaatgttaaacatgtctaaaaagaccgtctcatgcttcgtcaacttcacccggctgcagcaaattactaacattcaggccgaaatttaccagaagaaccttgagatagaactcctgaaactggaaaaagataccgcagatgtggttcacccctttttcttggcccaaaagtgtcatacacttcagagtatgaataatcaccttgaggccgtcctgaaggagaagcgtagccttcgacagagactactcaagccaatgtgtcaggagaacctgccaatcgaagctgtgtatcatagatacatggtgcatttgctggagctcgccgtgacctttatcgaacgacttgagacacatctggagacaattcgaaacatccctcaccttgccgccaacctgaaaaagatgaatcaggctctcgctaagatggacatccttgttacagagacggaggagttggcagagaatatcttaaagtggaggaaacagcaaaatgaggtgtcatcttgtatccctaaaattctagcagaggagtcttacctgtacaaacatgacatcatcatgccccctctgccgtttacatccaaggtacacgtgcagacgatcaacgctaagtag

SEQ ID NO: 190259 - DNA, 615 bp, synthetic construct
  misc_feature 1..615: note = Description of Artificial Sequence: Synthetic coding sequence
  source 1..615: mol_type = other DNA
atggccgccgccaacccctgggaccccgccagcgcccccaacggcgccgggctggttctgggacattttatcgcaagcggcatggtcaaccaaaaaaatttggagatcgaacttcttaagcttgagaaggacactgcagacgttgtgcaccccttcttcctcgcacagaaatgtcacaccctgcaatccatgaacaaccatcttgaagccgtccttaaggagaagcgatccttacgacagcggcttctcaaacccatgtgtcaggagaatctccccatagaggccgtataccacagatacatggtgcacctgctggaactggcagtgacatttatagaacggcttgaaacgcacctggaaactattagaaacatccctcatctggctgcaaatctcaagaagatgaaccaggcccttgccaagatggatatactggtgacggagactgaggaactagcagagaacatcctaaagtggcggaaacagcaaaatgaagtcagttcttgcatccccaagatcctcgctgaggagtcctatttgtataagcacgatataatcatgcctcctttaccgtttaccagtaaagtgcacgtgcagacaatcaacgccaagtag

SEQ ID NO: 190260 - DNA, 1812 bp, synthetic construct
  misc_feature 1..1812: note = Description of Artificial Sequence: Synthetic coding sequence
  source 1..1812: mol_type = other DNA
atgagctgcggcaacgagttcgtggagaccctgaagaagatcggctatcccaaagcggacaatctgaacggcgaggattttgactggctgtttgaaggcgttgaggacgaaagctttctgaaatggttttgtggcaatgtaaacgagcagaacgtgctgtcggagagagagctcgaagcgttctccatactgcagaagtccggcaaaccaattctggaaggcgcagccctggatgaggcccttaaaacttgcaagaccagcgatctcaaaactccacgtcttgacgacaaagagttggagaaactcgaagacgaggttcaaaccctcctaaaattgaaaaatctcaagattcaacgacgaaacaaatgccagttaatggcaagcgtcacctcacataagtctttgagactgaacgctaaggaagaagaagccacaaaaaaactaaagcagtcccaaggaatccttaatgcgatgattacaaagattagcaatgagttacaggccctcaccgacgaggtgacccagcttatgatgttcttccgccactccaatctcggtcaaggtaccaatcctctagtattcctcagtcaatttagcttggaaaagtacctgagccaggaggagcagtccaccgccgcactcaccctgtacactaaaaagcagttttttcaagggatccacgaagtcgtggagagctcgaacgaggacaatttccagcttttggacattcagaccccgtctatctgcgacaatcaggaaatcctggaggaaagacggcttgaaatggcgcgccttcaactagcctacatctgcgcccaacaccaactcatccatttgaaggctagtaactcctctatgaaatcgagcatcaagtgggcagaggagtctcttcactctctcacatccaaagctgttgataaagaaaacttggacgcaaagatctccagcttgactagcgagatcatgaaactcgagaaggaggtcactcagataaaggacaggtcccttccagctgtagtccgcgagaatgcacagttgctcaatatgcctgtggttaaaggcgatttcgatttgcagattgccaaacaagattactatacagctcgacaggagcttgttctgaatcagctgattaaacagaaagcatcctttgagcttctccaattgtcctatgagattgagctccggaaacatagggatatataccgccagctggagaacctcgtacaggagttgtcacagagcaacatgatgctctacaagcaactggaaatgttgactgacccatcagtcagtcagcagatcaacccacgtaataccattgataccaaagactatagcacccatcgcctctatcaggttctcgagggggagaacaagaaaaaggaactcttcttaacacacggtaatctcgaggaggtggccgaaaagctgaagcagaatatctcgctggtccaggatcagctggcggtgtccgctcaggagcattctttcttcttgagtaagagaaataaggatgtagatatgctgtgcgacacactttatcagggtggaaaccagctcctgttatcagatcaggagctgacagagcagtttcacaaggtggagtcccagttgaacaagcttaaccacctgttgaccgacattttagccgacgtcaagaccaaaagaaagacactcgcaaataacaagcttcatcagatggagcgggaattttacgtgtatttcctgaaagatgaggactatctgaaggacattgtggagaacttggagacgcaatcaaaaataaaagccgtcagcttggaggactag

SEQ ID NO: 190261 - DNA, 1812 bp, synthetic construct
  misc_feature 1..1812: note = Description of Artificial Sequence: Synthetic coding sequence
  source 1..1812: mol_type = other DNA
atgagctgcggcaacgagttcgtggagaccctgaagaagatcggctaccctaaagcagataacctgaacggagaagattttgattggctctttgaaggggtggaggatgaatcattcctgaagtggttctgtggcaatgtgaatgagcagaacgtcctcagcgaacgagaactggaagcattcagcatcctgcaaaagtctggtaaaccaattcttgagggagccgcccttgatgaagcgctaaagacctgtaagacgtctgatctgaaaactccacggctagatgacaaagagttagagaagctcgaggatgaggtgcagacactactgaaactaaaaaatcttaagatccagcgaaggaacaagtgtcagcttatggccagtgtgacgagccataagagtctcaggttgaatgcaaaggaagaggaggcgacgaagaagttaaagcagagccagggaatcttaaacgccatgatcaccaaaattagcaatgaactgcaggctctgacagacgaagttacccagctgatgatgttctttaggcactctaatctgggacagggcacaaacccgctggtgttcctctcacaattctcactggaaaaataccttagccaggaggaacagtctaccgccgcactgaccctatatactaagaagcaatttttccagggaatccacgaggtggtggaatcgagtaacgaggacaacttccagctgctcgacattcagaccccttcgatttgcgataaccaggagatcttggaggagcgaagactggaaatggcccggctgcagcttgcgtatatctgtgcccagcaccagctgatccacctcaaggcctcgaactccagcatgaaaagctccataaagtgggccgaagagtccttacactcactgaccagtaaagctgtagacaaagagaacttggatgcaaaaatctcctctctcacctcagagatcatgaaactggaaaaggaagtcacacagattaaagatcgttcactccccgctgtagtcagagagaatgcccaattgctgaatatgcctgtcgtgaaaggtgacttcgatttacagatcgcgaagcaggactactacactgcgcgacaggaactggtactgaatcagcttattaagcagaaagcaagcttcgaactgttgcaactctcttatgaaattgaactgcgcaagcatagagatatctaccgacagctcgagaacctggtgcaggagctcagccaaagcaatatgatgctgtacaagcagttggaaatgctcaccgacccctctgtgtcccaacaaattaacccccggaacacaatcgataccaaggactatagcacacatcggttatatcaggtacttgaaggtgaaaacaagaagaaggagctttttctcacacacggcaacctggaggaggttgcagagaaactgaaacaaaacataagtctggtgcaggatcaactggctgtctctgcacaggagcattctttctttttgtcgaagaggaacaaggatgtcgacatgctctgcgacaccctgtaccaaggagggaaccagttgctgttgtccgatcaggagctcacggaacagtttcacaaggtggaatcccaactcaacaagttgaaccacctactcaccgacattttggcagacgtgaagaccaagcgaaagactcttgcgaacaacaaattacaccaaatggagcgggaattttatgtgtactttctcaaagacgaggattatctgaaagacattgttgaaaatctggagacacagagcaagataaaggcggtgtcgttggaagattag

SEQ ID NO: 190262 - DNA, 33 bp, synthetic construct; identical to SEQ ID NO: 84068
  misc_feature 1..33: note = Description of Artificial Sequence: Synthetic coding sequence
  source 1..33: mol_type = other DNA

SEQ ID NO: 190263 - DNA, 102 bp, synthetic construct
  misc_feature 1..102: note = Description of Artificial Sequence: Synthetic coding sequence
  source 1..102: mol_type = other DNA
atgagctgcggcaacgagttcgtggagaccctgaagaagatcggctatccgaaggctgataatcttaatggcgaagatttcgactggctctttgagggttag

SEQ ID NO: 190264 - DNA, 456 bp, synthetic construct
  misc_feature 1..456: note = Description of Artificial Sequence: Synthetic coding sequence
  source 1..456: mol_type = other DNA
atgggcaagcggcccaacctgctggccctgcagctgagcgacagcacactcgccgacatcattgcaagattacaggccggacagaaactaagcgggtcaagtccgtttagctctgctttcaacagcctaagtcttgacaaggaaagcgggctgctaatgttcaagggagacaagaaacctcgagtctgggtggtcccaactcagctgcggcgtgacttaatcttcagcgtgcatgacataccactaggcgcccaccaaagacctgaagagacctataaaaaactgcgcctgctgggctggtggccaggcatgcaagagcatgtcaaggactactgccgctcgtgcttgttttgcattcctaggaacttgattggaagcgaattgaaggtcatcgaatctccccccgcttctgtgctgcggggccagggtgtctgcaatcggagcggaacaagatag

SEQ ID NO: 190265 - DNA, 957 bp, synthetic construct
  misc_feature 1..957: note = Description of Artificial Sequence: Synthetic coding sequence
  source 1..957: mol_type = other DNA
atggccagcggcgacttctgcagccccggcgagggcatggagatcctgcagcaggtatgcagtaaacaactcccaccatgcaatctgtccaaagaggacctgctgcagaacccttattttagcaagctccttctgaatttgtctcagcacgtggacgaatccggacttagtctgactctagctaaggagcaggcacaggcctggaaggaagtcagacttcacaaaacgacttggctgcgctccgaaatattacatcgagtgatccaggaactcctggttgattactacgtaaagatccaagatactaatgtcacgtctgaagacaaaaaggatttcgtctggatgagagccaggctgcagcaggaggtggaggagcagctcaagaaaaagtgcttcactcttctctgttactacgatccaaactccgatgccgacagcgaaactgtcaaggccgctaaagtatggaagctagctgaggtcctggtgggggagcagcagcaatgccaagacgccaagtctcagcaaaaagagcagatgctactgctcgaaaaaaaatcagctgcctactcgcaagtgctgctgcgatgtctcacactcctgcagaggctcctgcaggaacacaggctgaagacccagtctgaactcgacagaatcaatgctcagtatctggaagtgaagtgcggtgccatgatccttaaactgagaatggaggaactcaaaattctgtcggatacctataccgtcgaaaaagttgaagtgcatagactgattcgcgataggctagaaggtgccatccatctgcaagagcaggatatggagaactctcgtcaggtgctcaacagctacgaggttctgggcgaggaattcgaccgccttgttaaagaatataccgtactgaagcaggcaactgagaacaagagatgggccctccaggagttcagtaaggtctatcgttag

SEQ ID NO: 190266 - DNA, 714 bp, synthetic construct
  misc_feature 1..714: note = Description of Artificial Sequence: Synthetic coding sequence
  source 1..714: mol_type = other DNA
atggccagcggcgacttctgcagccccggcgagggcatggagatcctccagcaggtatgtagtaagcaactgcccccgtgtaacctgtccaaggaggatcttctgcagaatccctatttcagcaaattgctgttaaacctgtcccagcacgtggacgagtccggcctgagcctgactttggcaaaggaacaggcccaggcctggaaggaggtgaggctgcacaaaaccacgtggttgaggtccgagatcttgcacagggtgattcaggaactgctggtggactattacgttaagatccaggacacgaacgttacaagcgaggacaagaaagtccttctgaggtgtcttaccctacttcaaaggttgctccaagagcacaggttaaagactcagagtgaactcgatagaatcaatgctcaatacttggaggtcaagtgtggagcgatgattcttaaactgcggatggaggaactcaaaatcctgtccgacacatataccgtggagaaggttgaagtgcacaggctcattcgggatagattggagggagcaatacacctgcaggaacaggacatggaaaactctcgccaggtcttgaactcctatgaggtactcggagaggagttcgatcgcctagttaaggaatatacggtgctcaaacaggcaactgagaacaagcgatgggccctacaggagttttccaaggtttatcgctag

SEQ ID NO: 190267 - DNA, 714 bp, synthetic construct
  misc_feature 1..714: note = Description of Artificial Sequence: Synthetic coding sequence
  source 1..714: mol_type = other DNA
atggccagcggcgacttctgcagccccggcgagggcatggagatcctgcaacaggtttgctcaaaacaactgcccccttgtaacctgagtaaagaggacctgctgcagaatccctactttagcaagttactgctgaacctcagtcagcacgtggatgaatccgggctgagcctgaccctggccaaggagcaggcacaggcttggaaggaggtcaggcttcataagaccacatggctgcggtctgaaatacttcacagagttatccaggagctgttagtcgactactacgtcaagattcaggacacgaacgttactagcgaggataagaaagtgctcctacgctgcctcaccctactgcaacgtctgctccaggaacaccgtctgaagacgcagtcagaactcgatcgcatcaatgcccagtacctagaggtgaaatgtggggctatgatacttaagctacgaatggaggagcttaaaatcctgtccgacacttatacagtggagaaggttgaggtgcaccgcctgattcgagaccgtctagagggcgccatccatcttcaggagcaagacatggagaactcaagacaggtcctgaacagctatgaggtgctcggggaggagtttgatcggcttgttaaggaatatacagtgttaaaacaagcaactgaaaataaaaggtgggccctgcaggagttttctaaggtgtataggtag

SEQ ID NO: 190268 - DNA, 720 bp, synthetic construct
  misc_feature 1..720: note = Description of Artificial Sequence: Synthetic coding sequence
  source 1..720: mol_type = other DNA
atgcggctgctgggccccagccaggagcgggagatcccccccctgctgggactggagaaggccgatttgctcgaattaatgcctctgtcagaggactttgtgtggatgcgtgcaagactacagcaggaagtcgaggagcagctcaagaaaaagtgttttacccttctttgctactacgatcccaactccgacgccgacagcgagaccgtgaaggcagctaaggtctggaagcttgctgaggttttggtgggagagcagcagcagtgccaggacgccaagagccagcaaaaggagcaaatgcttctgttggagaaaaagagtgcagcttactcacaggtgctcctgagatgcctgacattacttcagcggctgttgcaagaacataggcttaaaacacagtctgagctggacagaataaacgcccagtatctcgaagtgaaatgcggtgcaatgatcctcaaacttagaatggaagagctgaaaatcctctctgacacctacaccgtggaaaaggtcgaggtgcatagattgattagggaccgcctggagggagccatccacctgcaagagcaggatatggagaacagccgtcaagtcctgaactcgtacgaagttcttggagaagaatttgatagactggtgaaggagtacacagtgctgaaacaagcaaccgagaacaaacgttgggcgttgcaagagtttagcaaggtgtaccggtag

SEQ ID NO: 190269 - DNA, 1092 bp, synthetic construct
  misc_feature 1..1092: note = Description of Artificial Sequence: Synthetic coding sequence
  source 1..1092: mol_type = other DNA
atggccagcggcgacttctgcagccccggcgagggcatggagatcctccaacaggtgtgctcaaaacaattacctccctgtaatctgtctaaggaagacctgctccagaatccctacttcagtaagctgttgttaaatcttagtcagcacgtcgacgagtctgggttgagtctgacactggccaaggaacaggcccaggcctggaaagaagttcggcttcataagaccacatggcttagaagcgagatacttcaccgggttattcaggagctgctagtggactattacgtgaagattcaggataccaatgtgacttccgaggacaaaaagtttcacgagaccttggagcaacgccttctcgtaaccgaactgatgaggctgctgggtccctcgcaggagcgcgagatcccacccctgcttggtcttgagaaggccgacttacttgagttaatgcccctgtccgaagacttcgtttggatgagagcacggcttcaacaggaagtggaagaacagttgaagaagaagtgttttacgctcctctgctactacgaccctaactctgatgccgattctgaaacagtgaaagccgcgaaagtgtggaaacttgctgaggttttagtgggcgaacagcagcagtgtcaagatgccaagagccagcaaaaagagcagatgttgctgcttgagaagaaaagtgctgcctatagtcaggtgttgctgcgctgcttaactcttttgcagagactgctgcaagagcacagactgaagacacagtctgaactcgaccgaataaacgcccaatatctcgaggtgaaatgtggcgcaatgatcctcaagctcagaatggaggaactcaagatcttgtctgacacttacacagtcgagaaggtggaagtgcatagactgattagagaccgcctagagggagcaatccatctacaggaacaggacatggagaattcccgtcaggtcctcaattcatacgaggtgctgggagaggaattcgatcgtctggtgaaggaatatacggtattgaagcaggcaacagaaaataaacgatgggccctccaggagttcagtaaggtgtacagatag

SEQ ID NO: 190270 - DNA, 54 bp, synthetic construct
  misc_feature 1..54: note = Description of Artificial Sequence: Synthetic coding sequence
  source 1..54: mol_type = other DNA
atgcggctgctgggccccagccaggagcgggagatcccccccctgctgggttag

SEQ ID NO: 190271 - DNA, 564 bp, synthetic construct
  misc_feature 1..564: note = Description of Artificial Sequence: Synthetic coding sequence
  source 1..564: mol_type = other DNA
atggccagcggcgacttctgcagccccggcgagggcatggagatcttgcagcaggtttgctctaagcaactgcccccctgtaacctctctaaggaagacctgctgcaaaacccctactttagcaaattgctccttaatctcagccagcacgtagatgagagtggtctgagcctgactctcgctaaagaacaggcccaggcttggaaggaggtcaggctccataaaacaacctggctgcgctctgaaatcctgcatcgcgtcattcaggagctgcttgttgattattatgtgaagatacaggatacgaacgtgacctctgaggacaagaagtttcacgagactctggagcaaaggttgttagtgactgagctgatgcggcttctgggccccagccaggaacgtgagatcccaccgctgcttggactagagaaagctgaccttctggagctaatgcctctatccgaagatttcgtttggatgcgggcccggttgcaacaggaggtggaagaacagctaaagaagaaatgtttcacgctgctctgctactacgatccaaactcttag

SEQ ID NO: 190272 - DNA, 840 bp, synthetic construct
  misc_feature 1..840: note = Description of Artificial Sequence: Synthetic coding sequence
  source 1..840: mol_type = other DNA
atggccagcggcgacttctgcagccccggcgagggcatggagatcctgcagcaggtgtgtagcaaacagctgccaccctgtaatctttcaaaagaggatcttctgcagaatccttacttcagtaaactgctcttaaatctgtcacagcacgtggatgagtccggcctgagtttaacactggccaaagagcaggcccaagcttggaaggaagttcgcctgcacaagaccacatggcttcggtccgagattctgcaccgcgtcatccaagagctcctggtcgactactatgttaagatccaggacaccaatgtgacaagcgaagacaagaagttccacgagacactggagcagcgactgctggtgacagagctgatgagactactcgggccctcgcaggagcgcgagatccccccactgctggggctagagaaggcggatctcctggagcttatgcctttatcagaagattttgtgtggatgagggctaggctgcagcaggaggttgaagagcagctgaaaaaaaaatgctttaccttgctgtgttactacgatccaaacagcgatgccgactccgaaactgtgaaggccgcgaaagtgtggaagctcgcggaggttctggttggcgagcaacagcagtgccaagacgccaagtcccaacaaaaggaacagatgctgctgttagagaagaagtctgcggcttattcccaggtgttgttacggtgtctgacgctacttcagcgattgttgcaggagcatagattgaaaacccagagcgagcttgatcgcatcaatgcgcagtatctggaggtgaagtgcggcgcaatgatcctgaaactgtag

SEQ ID NO: 190273 - DNA, 957 bp, synthetic construct
  misc_feature 1..957: note = Description of Artificial Sequence: Synthetic coding sequence
  source 1..957: mol_type = other DNA
atggccagcggcgacttctgcagccccggcgagggcatggagatcctccagcaggtttgcagtaagcagctgcctccatgcaatctttcaaaggaagatctgctacagaatccatactttagcaagctgctgttgaatctatcacagcatgtcgacgagtctggtttatctctcaccttggcaaaagaacaggcccaggcttggaaggaggtccgactgcataagacaacatggttgagatcagagatcctgcatagagtgattcaggagttgctggtagactattacgttaagatccaagatacgaatgttacttccgaggacaaaaaagattttgtctggatgagagcacggctgcaacaagaagtcgaagaacagttgaagaaaaaatgcttcacactattgtgctattatgaccccaattccgatgcagattccgagactgtcaaagccgctaaagtatggaaactggcagaggtattggtaggggagcaacagcagtgccaggatgcgaaatcgcagcaaaaggagcagatgctgttgttggagaaaaagagcgcagcctatagtcaagttttgcttagatgcctgactctcctccagcggctactgcaggagcaccgactaaagacgcaaagcgagttggatcggattaacgcccagtatttagaagttaaatgtggagccatgatccttaaattacggatggaggaactcaagatcctgagtgacacctacactgttgagaaagtcgaggttcatagactcatccgagaccgcctggagggtgccattcatcttcaagagcaagatatggagaactcacggcaggtactgaactcttacgaagtcttaggcgaggaattcgatcgcctggttaaagaatataccgtcttaaagcaggccaccgaaaataaacgctgggctctccaagagttctccaaagtgtaccgctag

SEQ ID NO: 190274 - DNA, 957 bp, synthetic construct
  misc_feature 1..957: note = Description of Artificial Sequence: Synthetic coding sequence
  source 1..957: mol_type = other DNA
atggccagcggcgacttctgcagccccggcgagggcatggagatccttcagcaagtctgttccaaacaattgccaccctgcaatctctctaaagaagatctgctgcagaacccgtacttcagtaagttactcctgaatctctctcaacacgtggacgaatccggattaagtctgaccctcgcgaaagagcaggcacaagcgtggaaggaggtcaggctccataaaactacttggctccgctccgagatattacatagggttattcaggaactgcttgtggattattatgttaaaatccaagacacaaatgtgactagtgaagataaaaaggactttgtgtggatgcgggcgcggctccagcaggaggttgaggagcagctgaagaaaaagtgcttcactcttttgtgctactacgaccccaattccgatgccgactctgaaactgttaaagcagccaaggtgtggaaactggctgaagtcctggtgggagagcagcagcaatgccaggatgccaagagtcagcagaaggagcagatgctgcttctggagaaaaagtcagctgcatacagccaggtgctgcttagatgcctgaccttactgcaaagactgctgcaggaacacaggctgaagacccagtctgagctggatcgaatcaatgctcagtacctcgaggtgaagtgcggggcaatgattctaaaactccgtatggaggaactgaagatcctgtccgatacgtacacagttgagaaggtggaggttcaccggctcattcgcgataggctggaaggcgccatccacttgcaagaacaagatatggagaacagccgacaggtactcaatagctacgaggtcttgggtgaagaatttgaccggctggtgaaggagtataccgttctcaaacaggccacggaaaataagcgctgggcccttcaggagttttcaaaggtataccggtag

SEQ ID NO: 190275 - DNA, 483 bp, synthetic construct
  misc_feature 1..483: note = Description of Artificial Sequence: Synthetic coding sequence
  source 1..483: mol_type = other DNA
atggccagcggcgacttctgcagccccggcgagggcatggagatcctccagcaggtgtgttccaaacagctccctccatgtaacttaagcaaggaggacctgctccagaatccttacttctccaagctccttttgaacttgagccagcacgttgacgagtcaggactgtctcttactcttgcgaaagaacaggctcaggcctggaaggaggtccgactgcataagacgacctggctccgatccgagatactgcaccgagtcatacaagagctgttggtcgactactacgtgaaaatccaggatacgaatgtgaccagcgaggataaaaaattccatgagacactggaacagaggctcctggtgactgagctgatgcgcctactcgggccaagccaggaaagagagatccctccactgctgggcttggagaaagccgacctcttagagctgatgcctctgtctgaggactttgtctggatgtag

SEQ ID NO: 190276 - DNA, 1902 bp, synthetic construct
  misc_feature 1..1902: note = Description of Artificial Sequence: Synthetic coding sequence
  source 1..1902: mol_type = other DNA
atggagctggcccaggaggcccgggagctgggctgctgggccgtggaagaaatgggggtgcccgtggccgcccgcgctccagaatctactctgagacgcctatgtctggggcagggagctgatatctgggcctacattctacagcatgtgcactcccagaggactgtaaaaaaaatccgcggcaacttgctttggtacggacatcaggattcccctcaagtaagacgtaagctggagctcgaggcagctgtgactcgactcagggcggaaattcaagagcttgatcaaagtctggaattgatggaacgagatacagaagcgcaggacacagccatggagcaggccagacagcacacacaggatacccagcgacgggctctcctcctacgtgcccaggctggcgcaatgagaaggcaacagcacacactgcgtgatccgatgcaacgactgcagaaccaactccgccgcctgcaggacatggagcgcaaggcaaaggttgacgttacattcgggtctctgacttcagccgccctgggcctcgagcccgtagtgctgagagatgttcgaactgcctgcactctgcgggcgcagttccttcagaacctgctgctccctcaggctaaacggggatcactgcctacaccccatgacgaccattttggtacttcttaccagcagtggctgtcctccgtagaaacactgctgacgaaccacccgcccggtcacgtgctggctgccctggagcacctggctgccgagagggaggccgaaatccgtagtctatgctctggcgatggactgggtgacacagaaatcagccgcccacaagctcccgaccagtctgacagctcccagacgttaccgtccatggttcacctgattcaggaaggatggaggaccgttggagtactggtgtcacagaggtctacattgctgaaggagaggcaggtacttactcagcgcctgcagggccttgtggaggaggtggagcgccgggtattaggttcgagcgaaagacaggtcctgattctgggactcagacgttgctgcctgtggacagaacttaaagcccttcacgatcagtcgcaagagctgcaggacgctgccggccacaggcaacttctgctgcgcgaattacaggcaaaacagcagcggatattacattggaggcagctagtagaggagacgcaagagcaggttagactgctgatcaaagggaattctgcttctaagaccagattgtgccgatcaccaggggaagttctggcgcttgtccagcgcaaggtggtgcccacattcgaagccgtcgccccccagtctcgggagctcctccgttgcctggaagaagaagtgcggcatttgccgcacatcctgttgggtactctgctgagacatcgaccgggtgaactgaagccccttcccacagtactcccgtctattcatcagctccaccccgcctccccgcgcggatcttctttcatagcactgtcgcacaagctgggactgcctccaggcaaggcctcagaattgctgcttccagccgcggcttctttgaggcaggatttgcttctgcttcaggaccaaaggtccctgtggtgctgggacctccttcatatgaaaacttcgctgccaccaggactgccaacccaagaactccttcagatccaagcctcacaagaaaaacagcagaaggagaatctgggccaggcgcttaagaggcttgagaaacttctgaaacaagccttagagcgtattcccgaacttcaggggatcgttggggactggtgggagcaacccggtcaggccgccctctctgaagagctttgccaggggctgtctctcccacaatggcgcctccggtgggttcaggcgcagggtgccctacaaaagctgtgctcttag

SEQ ID NO: 190277 - DNA, 873 bp, synthetic construct
  misc_feature 1..873: note = Description of Artificial Sequence: Synthetic coding sequence
  source 1..873: mol_type = other DNA
atggagctggcccaggaggcccgggagctgggctgctgggccgtggaagagatgggtgttccagtagcggcccgagcgccagaatctacactgaggcggctgtgcctgggtcagggcgcagacatctgggcttacatactccagcatgtccactcccagaggaccgtgaagaaaatacgcggaaatctgttgtggtacgggcaccaagattcccctcaggtgagacgaaagctcgaactggaggctgcagtcacccgacttcgggccgagatccaggaactcgaccagtccctggaactgatggaaagggatacagaggcccaggacacggccatggagcaggccaggcaacacactcaagatacgcagcgacgtgcccttctgctgagggcgcaggccggggcgatgaggcgccagcagcacacactgcgtgatcctatgcagcgcctccaaaatcagctgcggagactacaggacatggagcggaaggccaaagtggatgttacctttggtagcctgacctcagccgcactcgggctggagcctgtggttttgagagatgtgcgtaccgcttgcacgctgcgagcccagttcttacagaatcttttgctgccacaggcaaagcgcggtagcttacctacgccacacgatgatcacttcgggacctcatatcagcaatggctatctagcgtcgaaaccttgctcacaaaccaccctcccggccacgtgctcgctgcgttagaacacctcgccgcggaacgtgaagcagaaatacgatctctgtgcagcggagatggcttgggggacactgaaatctccaggcgagccggggggctgtgggtttgctggtcaccgtctggagccccgtcttag

SEQ ID NO: 190278 - DNA, 2409 bp, synthetic construct
  misc_feature 1..2409: note = Description of Artificial Sequence: Synthetic coding sequence
  source 1..2409: mol_type = other DNA
atgaagtacatcaagagcaacagcaagaacagcagccaccacttcgttgaaacatttaatatcaagccacaggacctgcataagtgtatcgctcgctgtcactttgcgaggtcccgttttctgcagatactgcagcgccaggattgcgttacgcagaagtaccaggagaatgcccagctgtccgtgaagcaggtccgcaatctccgctccgagtgcatcggcctggagaaccagatcaagaagatggagccctatgacgatcactctaatatggaggaaaagatacaaaaggtgcggtcactttgggctagcgtaaatgaaactctcatgtttcttgagaaagagagggaagtggtttcctcagtgctgtcgcttgtgaatcaatacgccctggacggcaccaatgtggcaattaatataccccgcctgctgttagacaagatagaaaagcaaatgttccagctccacattggaaatgtctacgaagccgggaaactgaacctcttgactgtgattcaattgctgaatgaagtcttgaaggtgatgaagtacgaaagatgccaggccgatcaggcgcggcttactgtcgacctccattatctcgagaaagagactaaatttcagaaggaacgcctgtcagatctcaagcacatgagatacagaattaaggacgaccttacaactataagacattcagtggttgagaagcagggtgaatggcacaagaaatggaaggagtttctcggcctctccccatttagtctgattaagggctggactccaagcgtcgatttgctgccacccatgtctcctctgtccttcgaccctgccagtgaggaggtttacgcaaagtccattctctgtcagtatccagcaagcctaccggatgctcacaaacagcacaatcaagagaacggatgcaggggcgactctgacacgttaggggctctccacgacttggccaactcacctgcctcattcttgtctcaaagtgtgagcagttctgacaggaattctgtaactgtgttagagaaggacaccaagatggggacccccaaggaaaagaacgaagcaatctctaaaaaaatcccagaattcgaagttgagaattcgcccctctctgatgtcgctaaaaatacagagagttcggcattcggtggctcgctgcccgccaagaagagcgaccccttccagaaggagcaggaccatctggtcgaggaggtggcacgtgccgtcctgtccgattcccctcagctgagtgagggaaaggagatcaaattggaggaactcatcgattctcttgggagcaatccctttttgacccgtaatcagattcctaggacccctgagaacctaatcacagaaatacgcagctcttggcggaaggccatagaaatggaggaaaacagaaccaaagagccaatccaaatggacgcagaacatagggaggtgctacctgaatctttgcccgtgctccacaatcagcgagagttcagtatggcagattttctgctggagacaacagtgagcgatttcggccaatcccacctgaccgaggagaaagtgatatccgattgcgagtgtgtcccacagaaacatgtactaaccagccacatagacgagccccctacccaaaaccagtcagacctgctgaataagaaagttatctgtaaacaagatctggaatgtctcgcatttaccaagctgtctgagacaagccgtatggagacattcagcccagccgtgggcaataggatcgatgtaatgggtggctctgaggaagaattcatgaagattctcgatcatctggaagtaagttgcaataaaccatccacaaataaaaccatgttatggaacagctttcaaatttctagtgggatttcaagcaagtcttttaaagacaacgatttcgggatccttcacgaaactcttcctgaggaagtgggacacctctcttttaacagtagttcctcttctgaggctaatttcaagctggaacctaattcaccaatgcacggagggactctgctggaggacgtagtgggtggacggcagaccactccagagagcgactttaacttgcaggccctccgctcacgatatgaggctctcaagaagtccctctctaaaaagcgcgaagaatcctacctctctaactctcagactcccgaaaggcataagcctgagcttagcccgactccccagaacgtacagacggacgacaccttgaattttctggacacatgcgatctacatacggaacacatcaaaccatcgctccgcacatctatcggagagcgtaaacggtctctctctccccttatcaaatttagtcccgtggagcagcgccttagaactaccattgcttgttcccttggagaattgcctaatctgaaaggtaaggtctag

SEQ ID NO: 190279 - DNA, 2868 bp, synthetic construct
  misc_feature 1..2868: note = Description of Artificial Sequence: Synthetic coding sequence
  source 1..2868: mol_type = other DNA
atgagcagcgccagcgtgaccgccttcgagaaggagcacctgtggatgtatttgcaggccctgggttttgagccaggacctgctactattgcctgcggaaagattgtaagccacactcacctgggcgttaatatgtttgataagttaaatagagacgccttccatattatttcttattttctgtttcaggttctcgatcagtccttgaccaaagaggtttttaaattctgttggccgccatttgaccagaaatccgacactgagtttaggaagcattgctgcgaatggatcaaaaggatctctggcgaatgcgggtcaagcttcccacaggtagtggggagcttattcctgagccccgggggcccaaagttcattcatctgatgtatcattttgctcgctttgttgcaatgaaatatatcaaaagtaattcgaaaaactcaagccatcattttgtggaaactttcaacataaaacctcaggatttgcacaagtgcattgcacggtgtcactttgctaggtccagattcctgcagatacttcaacgtcaggactgtgttactcaaaaatatcaagaaaacgcacaactgagcgtgaagcaagtgaggaacctaagaagcgagtgcataggcctggaaaatcaaatcaagaagatggagccatatgacgatcatagtaacatggaggaaaaaatccagaaggtgcgctcgctgtgggcctcggtcaatgaaacattaatgttcctcgagaaagagcgcgaggtagtcagttctgtgctgtcacttgtcaatcaatacgcgctcgatggcactaacgtcgccatcaacattccgcgtctgctcctcgacaagattgagaaacagatgtttcaactgcatatcggaaatgtgtacgaagcagggaaactgaatctgcttactgtcatccaactgctgaatgaggttctgaaagtgatgaagtatgaacgctgccaggccgaccaagcccggttgactgtggatctgcattatctggagaaggagactaagtttcaaaaggaacggctgtctgacctgaaacacatgcggtaccggataaaagacgacctcacaactattcgccattcagtggttgaaaaacagggggaatggcacaaaaagtggaaggaattccttggtctcagccctttcagcctgattaagggctggaccccaagtgtggacttgctgccaccgatgagtcccctgtcatttgaccctgcgagcgaggaggtctatgccaaatctattctgtgtcagtacccagccagcctgcccgacgcacataagcagcataaccaagaaaatgggtgtagaggagattcagatacccttggagcgctgcatgatcttgctaatagtcctgcctccttcctgtcccaatccgtaagttctagtgacagaaactcagtcaccgtgttggagaaggacaccaagatggggactccgaaggagaagaatgaggccatttccaaaaagattccggagtttgaagttgagaatagccctctgagcgacgtcgcgaaaaacaccgagtcctccgcattcgggggatctctgccggcgaagaagagcgacccttttcagaaagagcaggaccacctggtggaggaggtggccagggcagtgctgtctgatagcccccagctgagcgaggggaaggagattaagttggaggaactaatcgactctttaggaagtaatccatttcttactcggaaccagatacctaggactcccgagaatttgatcacggaaattagatcgagttggcgcaaagctatagagatggaagagaacaggacaaaggaaccaattcagatggacgccgaacatcgggaggtgttgcctgagtccctcccggttctgcacaatcagcgagagttcagtatggccgatttcttattggaaactactgtctcggattttggacagagccatctgacagaagagaaagtgatctccgactgtgaatgtgtcccacagaaacatgtcctcacgtctcacattgacgagcctccaacgcaaaaccagtcggacttactcaacaagaaggtaatttgtaagcaggaccttgaatgcctggcctttacgaagctgtcggaaacatctcggatggaaaccttttctcccgcggtgggcaatcggatagatgtaatgggaggatcagaagaggagttcatgaagatcctcgatcatctcgaggtatcatgtaataaaccgtcgaccaacaagacgatgttgtggaatagcttccagataagctcaggtatatcgagcaagtccttcaaggacaacgactttggaatcttgcatgaaacactcccagaggaggtaggacacctgtccttcaactcaagcagtagctccgaggcaaacttcaagctggagcctaactctccgatgcatggcggtacacttcttgaggacgtggtcggaggacgacagacaacaccggagtccgactttaatctccaggcactgcggtctcgttatgaggccctgaagaaatccctgtccaagaaacgtgaggaatcatacctgagtaacagccagactcccgagagacataaaccagagttgtcacctaccccacagaatgtccaaacggacgacaccttgaacttcctggacacatgcgaccttcataccgaacatatcaagcctagcttgagaacgtcaattggagagcgtaagcgctccctgagtcctctgattaaattcagcccagtggagcagcgactccgtactacaatagcatgttccttgggtgagctgccgaatctgaaggaggaagacatcctcaacaagagtctcgatgcaaaggagcccccatctgacctgactagatag

SEQ ID NO: 190280 - DNA, 552 bp, synthetic construct
  misc_feature 1..552: note = Description of Artificial Sequence: Synthetic coding sequence
  source 1..552: mol_type = other DNA
atgggcacccccaaggagaagaacgaggccatcagcaagaagatccccgaatttgaagtggaaaactcgcccctcagcgacgtggccaagaatacagagagtagcgcattcggaggcagcctgccggcaaagaaatctgatccattccaaaaggaacaagatcacctggtcgaggaggttgctagggccgtgctctctgacagccctcagctgtctgaaggaaaggagataaaattagaggagctgatagactcactgggatctaatccgttcctgacccggaatcagatcccacgcacccccgagaatttaatcacagagataaggtcttcatggagaaaagccatcgagatggaggaaaatagaacaaaagagccaatccagatggacgcggaacaccgggaggtactcccggagtcactacctgtgctgcacaatcaacgcgagttttcaatggctgactttctgctggagacaacagttagcgacttcggacaatcacacctgacagaagagaaagtgatatcagattgcgaatgcgttccacaatag

SEQ ID NO: 190281 - DNA, 1077 bp, synthetic construct
  misc_feature 1..1077: note = Description of Artificial Sequence: Synthetic coding sequence
  source 1..1077: mol_type = other DNA
atggccggccaggacgccggctgcggccggggcggcgacgactactcagaggacgaaggcgactccagcgtatcacgagctgccgtggaggtgttcggcaaactgaaggacctgaattgcccattcttagagggattgtacataacggagcctaaaactatccaggagttgctgtgttctcctagcgaataccggctggaaatcctggaatggatgtgcacccgcgtctggccctcccttcaggacaggttctcttccctgaagggcgtacccaccgaagtgaaaatccaggagatgacaaaactcgggcacgagctgatgctctgcgctccggacgatcaagagctcttaaaaggctgcgcttgcgcccagaagcagctgcacttcatggaccagctactagataccatacgatccctgaccatcggctgctcatcatgttcctctttaatggagcattttgaagatacaagggagaagaatgaagctctgctgggagagctgttctcatctccgcatctgcagatgctgctcaaccccgaatgcgacccctggccactggatatgcaaccactgctcaacaaacaaagtgacgactggcagtgggctagtgcaagcgctaagagcgaagaagaggaaaaactggcagagttggcccggcagctccaggaatcagctgctaagctgcatgccctccgcacagagtacttcgcacagcatgagcagggcgcagcggccggcgccgctgacatctctaccctcgatcaaaaactgcgcttggtgacgtcagattttcatcagctgattctcgcttttctacaagtgtacgacgatgagctcggagaatgctgccagaggcccggccctgatctgcacccatgtggtcctatcattcaggccactcaccagaatttgacttcttacagtcaactgctgcaggtcgttatggccgttgctgatacatcagctaaagctgtggaaacagtcaagaagcagcagggggagcagatctgctggggcggttcgtctagcgttatgtcactcgcgacaaagatgaatgaactaatggagaaatag

SEQ ID NO: 190282 - DNA, 1284 bp, synthetic construct
  misc_feature 1..1284: note = Description of Artificial Sequence: Synthetic coding sequence
  source 1..1284: mol_type = other DNA
atgggcggcgcccggctgggcgcccggaacatggccggccaggacgcaggatgtggacgcggcggcgacgattatagtgaagatgaaggggacagctccgtctctagggccgcggtagaggtatttggtaagttgaaggacctcaattgcccatttctggagggattatatataactgagccgaaaaccatccaggagttactctgttcccccagtgaatataggctggagatactggagtggatgtgtaccagagtatggccctcactgcaggatagattttcctcgctgaaaggggtgcccactgaggtgaagatccaggaaatgaccaaacttggccacgagttaatgttatgtgcacccgacgatcaggagctgctgaagggctgtgcctgcgctcagaaacagcttcatttcatggaccagcttctggacacaatccggtcattgaccattggttgttccagttgttcttctctcatggagcattttgaggacaccagagaaaagaacgaggcgctccttggagagctcttctcaagccctcatctgcagatgctccttaaccccgaatgcgatccctggccactggacatgcaacccctgctgaataaacagtcggacgactggcagtgggctagtgcctctgcaaagagcgaggaagaagagaaattagccgagctggcacggcagttacaggaaagcgccgctaagttacatgccctccggaccgagtactttgctcaacacgagcagggcgccgctgccggtgcggctgatatcagcacacttgatcagaagttaagattggtgacttctgattttcaccagctcatcctggccttccttcaggtttacgatgacgagcttggagagtgctgccaaaggcctggacctgacctgcacccatgcggcccaatcatacaagcgacacaccaaaatctgacctcctactcccagattcctaggggccaacccaaaaagccggctctggtgacaatgacgacggtaccgacctgcgccactctcccactggctcaaggatttagagacgtccatttcggattcctcagcgagagactgcgagcatttcagcctctaactgggtggtcttgtgagacccctagaagcggaatgttgttgcaagttgtcatggccgtcgctgacactagtgccaaggctgttgaaaccgtgaagaagcagcaaggggaacagatatgctggggaggcagtagcagcgtgatgtctctcgctaccaaaatgaatgaactcatggaaaagtag

SEQ ID NO: 190283 - DNA, 1107 bp, synthetic construct
  misc_feature 1..1107: note = Description of Artificial Sequence: Synthetic coding sequence
  source 1..1107: mol_type = other DNA
atgggcggcgcccggctgggcgcccggaacatggccggccaggacgccgggtgtgggcgcggaggcgatgactatagcgaggatgagggagacagttccgtgagtagagctgctgtggaagtcttcggcaagcttaaggacttgaactgcccattcctggagggcctatatattaccgagcccaagacaatccaagagctcctgtgcagtcccagcgagtatcgcttagagatcctggaatggatgtgtacccgggtatggccaagcctgcaagatagattcagcagccttaaaggcgtgcccaccgaggttaaaatccaggagatgaccaagctggggcatgaattgatgttatgcgccccggatgatcaggaactattgaagggatgtgcctgcgcacagaagcaactccactttatggaccagttactagatacaatccggtctctcaccatcggctgtagtagctgtagctccctcatggaacattttgaagacactcgagaaaaaaacgaagcgctgctcggagaacttttttcctccccgcacctccaaatgctattaaatcccgagtgcgatccatggcctctggatatgcagccacttctcaataagcagagcgacgactggcagtgggcctctgcctcggccaagtccgaggaggaagagaagctagcagagctggcccggcagttgcaggagtcggccgccaagttacatgcactaagaacggaatacttcgctcagcacgagcagggagcagcagccggcgcggcagatatcagtaccctggaccagaagctgagactcgtgacctcagactttcatcagttaatcctcgcatttttacaagtgtatgatgacgagctgggggaatgctgtcagcggcccggccctgacctgcatccctgtggtcccattatccaggccactcaccagaatctgacctcatactcacagttgctgcaggtcgtcatggctgtcgcagacacctcagcaaaagccgtagaaacagtaaagaaacagcaaggtgagcaaatttgttggggaggatcttccagtgttatgtccctcgccacaaagatgaatgagcttatggaaaagtag

SEQ ID NO: 190284 - DNA, 411 bp, synthetic construct
  misc_feature 1..411: note = Description of Artificial Sequence: Synthetic coding sequence
  source 1..411: mol_type = other DNA
atggaccagctgctggacaccatccggagcctgaccatcggctgcagctcctgctcaagcctgatggaacattttgaggacacaagggaaaagaacgaggctcttcttggcgagctcttctcttccccccatctgcagatgctcttgaatcctgagtgcgatccttggcccctggacatgcagccactactcaataaacagtcggatgactggcagtgggcttctgcctccgctaagtctgaagaagaggaaaagttagccgagcttgcaagacagctccaggaatccgccgccaagctgcacgcactgcgcaccgaatcaaccacaacatcttgggcatctgcagcttctgcccaggcattgacgtccaccagagcagccccatcctctagacctaggacgcgtatttag

SEQ ID NO: 190285 - DNA, 516 bp, synthetic construct
  misc_feature 1..516: note = Description of Artificial Sequence: Synthetic coding sequence
  source 1..516: mol_type = other DNA
atggtgaagcggcggcggagccccgccctgggcgaggagcggttctccccgtcttctatcttacaccccagattgcctctggtgctccttggaacccgggttccgctctcaggcggaggcccaggtgagcctgatcagggcaggagcgcaccatcatggaagtcactggcttccacacatcaccactctcggccagctgccggggctactcctgcgagacccgcaacccagagccagctggggcctttcgcgcccccacttccaggcgtgcgcccggccccatttccggctgtagaggtgttcggaaaacttaaggatctgaactgtccatttctggagggcctgtacataactgaacccaagaccattcaagagctgctgtgctcaccctctgagtaccgactcgagatacttgaatggatgtgtacccgtgtgtggcctagcctgcaagataggttctctagtttaaaaggagtacctacagaggtgaagatacaggggctgctagccgggtag

SEQ ID NO: 190286 - DNA, 1233 bp, synthetic construct
  misc_feature 1..1233: note = Description of Artificial Sequence: Synthetic coding sequence
  source 1..1233: mol_type = other DNA
atggccgacagcagcggccggggcgccggcaagcccgccaccggcccaactaactcaagctcagcaaagaaaaaggacaaacgagtgcaggggggccgcgtgattgaaagtcgttacctgcagtacgaaaagaagactacacagaaggctcccgcaggcgacggctcacaaacacgcgggaagatgtccgaagggggaagaaagtcttccctgttacagaaaagcaaagctgattcttccggcgtcggcaagggggatctgcagagcaccttattagagggccatggcacagcgccaccggatctagacctgtccgccatcaatgacaaaagtatcgtgaaaaagacacctcagctcgctaaaacaataagcaagaaacccgagtcgacatcttttagcgccccacggaaaaaatctcctgacctctcagaagccatggagatgatggagagccaaaccctgttgctgacattgctgtctgtcaaaatggaaaacaatttggccgaatttgagcggcgcgctgagaaaaatcttctgataatgtgtaaagagaaggagaaacttcagaaaaaggcacacgagcttaaacgtagactcttactgtcccagcgaaaacgggagctcgccgatgtgctagatgcacagattgagatgctgtcaccttttgaagccgtggccaccagattcaaagagcagtatagaacattcgcaaccgctttggacactacaaggcacgaactgccggtgcgctcgatacatcttgagggggacggccagcagcttttagatgctctgcaacacgagctggtcacaacccagcggctgctgggagagctcgatgtgggagactccgaagagaacgtgcaggttctggacctcttatctgagcttaaggatgtcactgccaaaaaagatctggagttaaggcggagctttgcgcaagtattggagttaagtgcagaggccagcaaggaagcggccctggccaatcaggaggtatgggaagagacacagggtatggcccccccctctaggtggtacttcaatcaagattctgcttgccgggagtccgggggagcccccaaaaacacacccttgtctgaagacgacaatccgggcgcaagctctgccccggcccaggcaacattcatatcgccgagcgaggatttctcctccagctcacaggcagaagtcccgccttcactttctaggtctggccgggacctatcttag

SEQ ID NO: 190287 - DNA, 1230 bp, synthetic construct
  misc_feature 1..1230: note = Description of Artificial Sequence: Synthetic coding sequence
  source 1..1230: mol_type = other DNA
atggccgacagcagcggccggggcgccggcaagcccgccaccggcccgaccaactcatcctccgcgaaaaagaaagataaaagagtgcagggtgggagggtgatcgaaagcagatacctgcagtacgagaaaaagaccacacagaaggcccctgctggagatggctcgcaaacaagaggcaagatgagcgaaggagggcgcaaatcttccctgcttcagaagtctaaggactccagcggggtgggcaaaggcgacctacaatccaccctgctggaaggccacggaaccgctcctccggacctggatctttccgccattaacgataagtcaatcgtgaagaaaaccccccagctcgctaagaccatttcaaaaaaacctgagtccacctcgttttctgctccgcggaagaagtcacccgacctcagtgaggctatggagatgatggagagtcagaccctcctactgaccctgctgagtgtgaaaatggagaataatctggcggaattcgagagaagagccgagaagaatttactcattatgtgtaaagaaaaggagaagttgcaaaagaaggctcacgaattgaagaggcgactattactatcacagaggaaacgtgagctggcagatgtgctagacgctcagatagaaatgctgtcgccttttgaggcggtggctacacgctttaaggagcaataccgcacctttgccaccgccttggacactactaggcatgagttacccgtaaggagcatccacttagagggagatggtcagcagttactggatgccctacaacacgaactcgtcactacacagcgcctgcttggcgaattagacgtaggcgatagtgaggagaacgtccaggttctggacctgctgtcagagctcaaagacgtcactgccaagaaagacctggagctccggcggtccttcgctcaggtcctggagctcagtgccgaggcctccaaggaggccgcattggcaaaccaggaggtgtgggaagagacccagggcatggcacctccaagccgatggtacttcaatcaggattccgcttgtagagaatctggtggggctccaaagaacacccctctgtcggaggacgataatccaggcgcaagcagcgctcctgcacaggcaacttttatttcaccgtctgaggacttctcttcctcgtcccaagcggaagtgccaccctccctttcccgcagtggacgggatctctcatag

SEQ ID NO: 190288 - DNA, 1899 bp, synthetic construct
  misc_feature 1..1899: note = Description of Artificial Sequence: Synthetic coding sequence
  source 1..1899: mol_type = other DNA
atggcccggcaccggaacgtgcggggctacaactacgacgaggacttcgaggacgacgacctatacggccagtctgtagaggacgattactgtataagcccgagtactgcggctcagttcatttactctaggcgagacaagcctagcgtggaacctgtggaggagtacgactacgaagatctgaaggagtcatccaattctgtgtccaaccaccaactttctggcttcgatcaagctagactctacagttgtctcgaccatatgcgggaggtactcggcgacgccgtacccgacgaaattctgattgaagctgttttgaagaacaagttcgacgtgcagaaagccctgtcaggagtgctggagcaggatagggtccagtctctgaaagataaaaacgaggctacggtttccactgggaagatcgcaaagggggtgctgttcagttcttctgaagtgagcgctgataatgtacagtcatcatatccccagtccgccaaccacctggactacagcagcaagccttttgacttcgcatcctctgtgggaaagtatggcctcagccacaatagctcagttcccacccactgtctgctgcatcgcaaaaagaagctggatactagaaagagcgaaaaaaaactcgagtcttgcaagctgacgaaggaacttagcctggctaatctcatccacgatatgagcagagattcatgcgaatcacagccctccgtgagactgagcagtactgacagcctagaatcactcctgtctaaaaatttagatgccgatttgcttagaccacacgcgagcgagtgtataagtaaagatgatagtgcctttaaagagattccagacctcaagacaattatcattaagggcacaacacctaacaacagcctttacatacaaaacaattcactctccgactttcagaatattcctgtccaagacagtctggggtcaagcaataacccactctacctcaccagctcattagaaaacatgacagtagataatctcaacgcctcaaaggaaactgaagtcggtaacgtctctctcgtcgagcagtccgccaaaaaccatacctttaagaacgataacctacagttctctcagtgcgaaagtccttcccttacagaactgtttcaagaacacaaggagaacaacatctcacagtgcttcacactgagtgacctgtgtaaccagtcttctgctagctttacggatctgtccctcggtagcttccctttaagccaattggcaaataggtgtcaatcctctcccggcatctccgaattgactggatcgctgtcttcactagcctttcataaagcatcccctacgagggacttggaaaacttgagcctgtcggagctgatagcagagacgatcgacgtggacaatagccagatcaagaaggagtctttcgaagtcagtttgtctgaggtcagatccccaggaattgatagtaatatcgacttatcagtactaatcaaaaatccagactttgtgcctaaaccagtcgtggatcctagcatagccccaagcagccggacgaaggtgctgtcgtcgaagttagggaaaaactcaaacttcgccaaggacaataagaagaacaataagggttcactgacgagaaaacctccattttccctatcatggactaaagcacttgccgcacgcccgagtgccttcgcctccacactgtgtctgcgttatccgctcaagtcctgtaagcggagaacccttgacctgtacaagacattcttgtactcccggcaggttcaggatgtcaaggataaggagataagcccacttgttgcaatcacacccttcgatttcaaatctgcatcacccgacgacatcgtcaaggccaaccaaaaaaaagccttcactagagagtag

SEQ ID NO: 190289 - DNA, 1563 bp, synthetic construct
  misc_feature 1..1563: note = Description of Artificial Sequence: Synthetic coding sequence
  source 1..1563: mol_type = other DNA
atgaccgtgagcggcaagaagcagaccatgggcttcgaggtgcccggtgtgagcagcgaggaaaacgggcatagcttccatactccacagaagggaccccccattgaggacgcgattgcctcctccgacgttctggagacagcttccaagagcgctaatccgccacatacgattcaggccagtgaggagcagagcagcacccccgcacctgtaaaaaaatccgggaagctgcgtcaacagatagatgttaaagctgaactggagaagcggcagggcggaaaacaactactgaacctggtggtgatcggtcacgtggacgctggaaagagcaccctgatgggacatatgctgtacctgctcgggaacattaacaagagaacgatgcacaaatatgagcaggaatcaaagaaggccggcaaggcttcgtttgcctatgcctgggtgctcgacgagactggggaggaacgtgaaaggggtgtgactatggacgttggaatgactaagttcgaaaccactacgaaggtaattacactcatggatgctccaggccataaggatttcatcccaaatatgattaccggcgccgctcaggctgatgtcgctgtgctggttgtggacgcaagcaggggtgagtttgaagcaggatttgaaactggtggccagacacgagaacacggcctcctggttcggtctctcggagttacccagctggctgtagctgtaaataaaatggaccaggtaaattggcagcaggaaaggttccaggaaatcacaggcaaactcggccacttcttaaaacaagccggattcaaggaatcggatgtaggcttcatccctacgagtggcttgtcaggcgagaacctcataacacgaagccaaagttccgagctgactaaatggtacaagggtctctgcctgcttgaacagatcgactctttcaaacctcctcagagatcaatcgacaagcccttcagactctgtgtttcagacgtatttaaagatcaagggtcaggattttgcataactgggaagattgaggcaggatacattcagactggcgaccggttgctggccatgcctccaaatgaaacttgcaccgtgaaaggcatcacgctgcacgatgaaccagtagactgggcagcggctggagatcacgtatctctgactcttgtggggatggatatcattaaaatcaatgtcggatgtatcttttgtgggcccaaagtaccaattaaagcctgcacacgattccgagcacgtattcttatatttaatatcgagatcccaatcaccaagggattccctgtactactgcactatcagaccgtcagtgaacctgccgttatcaaacggctaattagcgtgttaaataaatccactggcgaagtcacaaaaaagaagcccaagtttttgactaagggacagaacgctctagtcgaattgcagactcagcgcccgatagctctggaactatataaggactttaaagagctggggaggttcatgctgaggtacgggggatctactatagccgccggcgtggtcaccgagattaaggaatag

SEQ ID NO: 190290 - DNA, 1929 bp, synthetic construct
  misc_feature 1..1929: note = Description of Artificial Sequence: Synthetic coding sequence
  source 1..1929: mol_type = other DNA
atggcccggcaccggaacgtgcggggctacaactacgacgaggacttcgaagatgatgacctttacggccagtctgtagaggatgattactgtatttccccatccaccgccaggctttattcgtgcctggatcatatgagggaggtcttgggagacgccgtgccagacgagattttaattgaggctgtcctcaagaacaagttcgacgtgcaaaaggccttatccggtgtgctggaacaggaccgtgtacagtctctgaaggataagaatgaagctactgtgagcacaggtaagatcgctaagggcaaacccgtagattctcagacatcccggtctgaatcagagatcgtacccaaggttgctaagatgaccgtttctgggaagaagcagacgatggggttcgaagtacctggcgtctcatctgaggaaaatggccacagcttccacacaccgcagaaagggcctcccatagaggacgctatcgcctcttccgacgtgttggagaccgcatccaagtctgccaaccctccgcacaccatacaggctagtgaggagcagtcgagtactcccgccccggttaaaaaatctggaaagctgcggcaacaaatagatgtcaaggccgaattggaaaagagacaaggcggtaagcagctgttgaatcttgtcgtgatcggtcacgttgatgccggaaagtccactctgatgggacacatgctgtatctactggggaacataaacaagcgaaccatgcataagtacgagcaggaaagcaagaaagccggcaaagcttcctttgcctatgcatgggttctggatgagaccggggaagagcgcgagcggggggtgaccatggacgttggtatgactaaattcgagactaccaccaaggtgatcaccctgatggatgcgcctgggcacaaggattttataccaaatatgatcaccggtgctgcgcaggccgacgttgcagttctggtagtggacgcatcgaggggcgaattcgaggccggttttgagacgggaggacaaacacgcgagcacggactgctcgtcagaagcctgggcgtgactcagctcgctgtggccgtaaacaagatggatcaagtcaattggcaacaggagagattccaggagattacgggcaaactgggacatttccttaaacaggccggattcaaggagagtgatgtgggcttcatacccactagcggactctccggcgaaaacttgataactagatcccagtcttcagagcttacaaagtggtacaaggggctgtgcctgctggaacagatcgattcctttaagccaccacagcgctcaatcgataagccattcagattgtgcgtgtctgatgtgtttaaagaccagggctctggcttctgtatcacaggaaagatcgaggccggatacattcagacaggtgatcgtctgctcgcaatgcctccaaatgaaacctgcaccgtgaaaggcatcacgctccacgacgagccagtggattgggccgcagctggcgatcatgtctcccttactcttgtcggcatggatattattaagattaatgtgggctgcatcttctgcggtccgaaagtgcctataaaagcatgcacaaggttccgcgcccgtatcctgattttcaatatcgaaatacctataacaaagggcttcccagtgctgttacattatcaaactgtttcagagcccgccgtcattaagcgtctgatctctgtactgaataagtcgacaggcgaggttacaaagaaaaaaccaaagttcctgactaaaggtcagaacgctctagttgaattacaaacacagcgcccaatagctcttgagctttataaagacttcaaggagcttggccgctttatgttgcggtatggaggatcaacgatcgctgcaggggtggttacggagatcaaggaatag

SEQ ID NO: 190291 - DNA, 2055 bp, synthetic construct
  misc_feature 1..2055: note = Description of Artificial Sequence: Synthetic coding sequence
  source 1..2055: mol_type = other DNA
atggcccggcaccggaacgtgcggggctacaactacgacgaggacttcgaggatgacgatctgtacggacagtcggtcgaagatgattactgcatcagcccttcaaccgccgctcagtttatctactcccgcagggacaagccgagcgttgagcctgttgaggagtatgattacgaggatttaaaggagagcagcaattccgtatccaatcatcagctgtcaggcttcgatcaagctagattgtactcatgtcttgatcatatgcgggaggtcctgggcgacgccgtgcccgacgaaatcctgatcgaggcagtcttaaaaaataagttcgatgtacagaaagctctcagcggagtgctcgaacaagaccgcgtgcaatcactgaaagataaaaatgaggctacagtgagcaccggaaaaatcgcgaaggggaaaccggtcgacagtcagacgagccgaagtgaaagcgaaatagttccaaaggtggctaagatgaccgtgtccggcaaaaagcagaccatggggttcgaagtgcctggcgtctcttccgaagagaacggacactctttccatacgccacaaaagggccccccaatcgaagacgctatcgcaagcagtgacgtgctcgagacagcctcaaagtctgccaacccaccacacacaatccaggcatctgaggaacagagttcaaccccagccccagtgaagaagtccggtaagctccggcagcagattgacgtcaaagctgaactagagaaacggcaaggagggaagcagctgttgaatctggtggtgattggtcatgttgacgcaggcaaatccaccctcatgggacatatgctgtacctgttggggaacataaataaaaggaccatgcacaagtatgagcaggaaagtaagaaggccgggaaggcctcattcgcttacgcctgggtcctggacgagactggagaggagagggagcgcggcgtaactatggacgtaggaatgaccaaatttgagaccacaacaaaggtgatcacactcatggacgccccagggcacaaggactttatccctaacatgattacaggggccgcacaagcggatgtcgcggttctggtggtggacgcttccagaggggagtttgaggcgggatttgagaccggcggccagacgcgagaacacggattacttgtccgttcacttggagtgactcagttggctgtcgccgttaataagatggatcaggtgaactggcagcaagaaaggttccaggaaatcactggcaaactcggacactttttaaagcaggccggcttcaaagagagcgatgtcgggtttattcctacttcgggactgagtggggagaatctgataacccggagccaatctagcgaacttaccaagtggtataaaggactatgcctgcttgagcagatcgatagtttcaaaccacctcagaggtctatagataagcctttcaggctatgcgtcagtgacgtattcaaagaccaagggtcaggcttttgcatcaccggtaagatcgaggctggctatatacaaaccggggaccgccttctggcgatgcctcccaacgagacttgtaccgtgaagggtataactctgcacgatgaacccgtggactgggctgccgccggcgatcatgtctccctgacactcgtcggtatggacatcatcaagattaacgtcgggtgcattttctgcggcccaaaggtgcctattaaagcatgcacccgctttagagcccgcattttgatcttcaacattgagatacccattacaaaaggctttcccgtgttgctccactaccagactgtatccgaacccgccgttatcaaaagactgatcagcgtgcttaacaaaagtactggcgaagtgaccaaaaagaaacccaaattcctgaccaagggccaaaatgcattagttgaactacagacgcaacgcccaatcgcattggagctctacaaggatttcaaggagctgggccgctttatgctcagatatggtggttcaacaatcgctgctggagttgttacagagattaaggagtag

SEQ ID NO: 190292 - DNA, 1227 bp, synthetic construct
  misc_feature 1..1227: note = Description of Artificial Sequence: Synthetic coding sequence
  source 1..1227: mol_type = other DNA
atgggccacatgctgtacctgctgggcaacatcaacaagcggaccatgcataagtatgagcaggaatccaaaaaggccggcaaagcatctttcgcatacgcatgggttctggacgaaacaggggaagaacgggaacgtggggtgaccatggatgtcggcatgaccaagttcgagactacaacaaaggttatcaccctaatggacgcccccggccacaaggactttattcccaacatgattacaggcgcggcccaggccgatgtggcggtgcttgtagtcgacgcctcacgaggagaatttgaggctgggtttgaaaccggaggccagaccagggaacatgggctgctggtcagaagtctgggggtgactcagttggctgtagcggtgaacaagatggaccaggtgaactggcagcaagagcgctttcaggaaattactggaaaactcggacacttccttaagcaagctggattcaaagagtccgacgtcggcttcatccctacatcagggttgtcaggcgagaatttaattacacgctcccaatcttctgagttgacaaagtggtacaaagggctatgtttgctggagcaaattgactctttcaagccaccccagcggtccattgataagccctttcgcttgtgcgtgagcgacgtgtttaaagatcaaggatcgggtttttgcataaccggaaaaatcgaggccggatacattcagaccggagaccggttgctggctatgccgccaaacgagacgtgcaccgtcaagggcataaccttgcacgatgaacccgtggactgggccgccgcaggcgaccacgtgtcgcttactctggtgggcatggacattatcaagattaatgtaggatgcatcttctgcggcccaaaagtgcctatcaaggcttgtactcgctttagggcccgcattttaatctttaacattgaaatccctatcactaaaggttttcctgtcctgctgcactaccaaactgtcagtgaacccgcggtaataaaaaggctgatatcagtgctgaacaagagcaccggtgaggtgacaaaaaagaagccaaagtttctgacaaagggccagaatgcgctggtcgaactgcaaacacagcggccaattgctctagaattgtataaagattttaaggagctcggccgattcatgctcagatacggaggctctacaatcgcggcaggagtcgtgaccgagataaaagaatag

SEQ ID NO: 190293 - DNA, 840 bp, synthetic construct
  misc_feature 1..840: note = Description of Artificial Sequence: Synthetic coding sequence
  source 1..840: mol_type = other DNA
atgagcctgttcgacctgttccggggcttcttcggcttccccggccctcggagtcaccgggatcccttctttggagggatgacccgcgatgaggatgacgacgaagaggaggaggaggagggcgggagctggggaaggggcaacccgaggttccactcgccacagcatccccctgaggagtttggcttcggattctcattctccccggggggtgggataagatttcatgacaattttggatttgacgacctggtccgtgattttaatagtatcttcagcgacatgggcgcttggacattgccatcacatccaccggagctacctggaccagagtccgagacacccggcgaacgcctgagggaaggtcagacgttaagggactctatgctgaagtatccagattctcaccagccaagaatctttggtggtgtgcttgagtccgatgcaaggtctgagtcgccgcagcctgctccagattggggcagccagaggcccttccaccgcttcgacgatgtgtggcccatggacccccacccccgcaccagggaggacaacgacctggactctcaggtttcccaagagggcctgggacctgtgctccaacctcagccaaaatcctatttcaagtctatatcggtcacaaagatcacaaagcccgacggcattgtagaggagcggaggactgtagtggactccgagggccggactgaaactactgtgactagacacgaggctgatagcagtcccagaggtgacccagagagtcctcggccccccgcactcgatgatgcgttcagtatactggatctcttcctgggccgctggtttagatcccgatag

SEQ ID NO: 190294 - DNA, 696 bp, synthetic construct
  misc_feature 1..696: note = Description of Artificial Sequence: Synthetic coding sequence
  source 1..696: mol_type = other DNA
atgagcctgttcgacctgttccggggcttcttcggcttccccggcccccggtcattttctccaggggggggcatccgtttccacgacaattttggattcgacgacctcgtgcgcgactttaatagtatatttagcgatatgggagcatggacactgccttcccatccacctgagctgcccggcccagagtcggagacaccgggtgagcgcttaagagagggccagactcttagggactcaatgttgaagtaccctgattcacatcagccccgcatttttgggggcgtcctagagagcgatgcccggtctgagtctccacagcctgctcctgactggggaagccagcgccccttccaccggttcgatgacgtgtggccaatggacccacaccctcggacacgggaggacaacgatctggattctcaggtgtcacaggaggggctgggccccgttctccaaccacaacccaagtcctatttcaagtccatttctgtgacgaagattactaaacctgacggaatcgtcgaggaaagacgcactgtagtagattccgagggccggaccgagactactgtgactaggcacgaagccgatagctcccctaggggcgatccggaaagcccccgacccccagccctggatgatgccttctcaattctcgacctgtttctgggccgctggtttagatcacgttag

SEQ ID NO: 190295 - DNA, 864 bp, synthetic construct
  misc_feature 1..864: note = Description of Artificial Sequence: Synthetic coding sequence
  source 1..864: mol_type = other DNA
atgagcctgttcgacctgttccggggcttcttcggcttccccggcccccgctcacaccgggaccccttctttggcggcatgacaagggacgaggatgacgacgaagaagaggaggaggaaggcgggagctggggacgcggtaatccaaggttccacagcccccaacaccctccagaggaattcgggttcggattttctttttctccaggtggcggcattaggttccatgataacttcgggtttgatgatctggtaagggattttaactctatcttctctgatatgggggcctggacactccccagccatcctcccgccaatacttgtcatctgtccgcggaactgcctggccccgaatctgaaacccccggggagagacttcgggaaggccagacattgagagatagtatgcttaaataccctgattcccatcagccaagaattttcgggggtgtgcttgaatccgatgcgcgatccgagagtccccagccggctccagattggggctcccagcgccccttccacaggtttgatgatgtgtggccaatggatccacacccaagaacccgggaagacaacgacttggatagccaggtgtcgcaagagggcctgggcccagtccttcagccccagcctaaatcatactttaaaagcatcagtgtgacaaagatcacaaaaccagacgggatagttgaagagcgcaggactgtagttgactccgaagggcgtaccgagaccactgtgacccgccacgaggccgactcttctcccaggggggatcccgagagtcccaggcctccggcactggatgacgctttctcaattcttgatctcttccttggccgctggttcaggagccgctag

SEQ ID NO: 190296 - DNA, 1179 bp, synthetic construct
  misc_feature 1..1179: note = Description of Artificial Sequence: Synthetic coding sequence
  source 1..1179: mol_type = other DNA
atgcagagccccgccgtgctggtgaccagccggcggctgcagaacgcccatacaggcctcgacctcaccgttccacagcatcaagaagtcagagggaagatgatgtctggccatgtggagtaccagatactcgtggtaacccgcctagcagcctttaaatcggctaaacaccgacccgaggacgttgttcagttcctggtgagtaagaagtattcggaaattgaagagttctaccagaagctgtcctctagatacgcggcggcgagtctgccacccctgccaaggaaggtcctgttcgtgggcgagagtgacatccgcgaacgtcgcgctgtcttcaacgagatattgagatgcgtttccaaagatgccgagctagctgggagcccggaattactggagttcctgggaacaagatcaccgggtgctgccggcctgacctctcgagacagtagtgtcttggacgggactgattcccagaccggaaatgatgaggaggcctttgacttcttcgaggagcaggaccaggtagctgaggagggccccccagtgcagagtttaaagggagaagacgccgaagaatcgttagaagaggaagaggccctagatccactgggaatcatgcgcagtaagaagcctaaaaaacatcctaaagttgccgtaaaagccaagccatccccccgccttaccatcttcgatgaggaggtcgatcctgatgagggactgtttggtcctggccgcaaactgtcaccccaggatcctagcgaggacgtgtcctctgtggatccacttaaactgtttgacgacccagacttgggcggggctattccattgggcgactcattactgcttcctgctgcatgtgaatccggcggaccaactccttccctatcccatcgagatgccagtaaggaactttttcgggtggaagaggatctggaccaaatacttaacttgggagcggagcccaaaccgaagccacagttaaagcctaaaccaccagtggcggccaagcccgtgatcccccgcaaacccgctgtccctcctaaggcaggccctgctgaggccgtcgctggccaacagaaaccccaagaacaaattcaagccatggacgaaatggatattctgcagtatatccaagatcacgacacgcctgcacaggcggccccatccctgttctag

SEQ ID NO: 190297 - DNA, 654 bp, synthetic construct
  misc_feature 1..654: note = Description of Artificial Sequence: Synthetic coding sequence
  source 1..654: mol_type = other DNA
atgagcctggtgggcggcttcccccaccaccccgtggtgcaccacgaggggtacccgttcgctgctgccgcagccgctgccgctgctgcggcagccagtagatgctctcacgaggagaacccttatttccacgggtggctgataggacatcctgagatgagtccacccgactactctatggccttgagttattcacccgaatatgcctcaggagcagccggcctggaccactcgcattatggcggggtacctcccggggccgggcccccgggactcgggggaccacgccctgtcaagcgccggggaacagcgaatcgcaaggagaggagacgaacacagagcatcaactcagccttcgcggaactgcgcgaatgcatacccaacgtccctgccgacactaagctctctaagatcaagaccctccgacttgccacgagttatatcgcctatcttatggatctactcgctaaggacgaccagaatggggaagccgaggccttcaaagcagagatcaagaaaaccgacgtgaaggaggagaaacgaaaaaaagaactgaacgaaatcctgaagtccacagtgtcaagcaatgataagaagactaaggggcgaaccggatggccacagcacgtctgggcactggaactgaaacagtag

SEQ ID NO: 190298 - DNA, 561 bp, synthetic construct
  misc_feature 1..561: note = Description of Artificial Sequence: Synthetic coding sequence
  source 1..561: mol_type = other DNA
atgagcctggtgggcggcttcccccaccaccccgtggtgcaccacgagggctatccatttgcagcagccgccgcggcagctgctgcagcagcagcatccagatgttcccacgaggagaatccctacttccacgggtggctgattgggcacccagagatgtccccccccgattacagcatggcactatcctactcacccgaatatgcttctggcaccgccaatcggaaagagcggcgcaggacgcagagtattaatagcgcattcgcagagctgagagagtgcatccccaatgttcccgcagatacaaagctgagtaagatcaagactctgcgtctggcaacctcgtacatagcttacctcatggatcttttggcaaaagatgatcaaaacggggaggcagaagcttttaaggccgagatcaagaagactgatgtaaaggaggaaaagcggaagaaagagctgaacgagattctgaagtctacagtatctagtaatgacaagaagactaaagggcggacaggctggccccagcacgtctgggcactcgagcttaagcagtag

SEQ ID NO: 190299 - DNA, 498 bp, synthetic construct
  misc_feature 1..498: note = Description of Artificial Sequence: Synthetic coding sequence
  source 1..498: mol_type = other DNA
atgagcccccccgactacagcatggccctgagctacagccccgagtacgcttcgggggcagccggactggaccactcccactatggcggcgtccctcctggtgctggcccacctggcctaggtggacctagaccagtcaaacggagggggacagctaatagaaaagaaaggcgaaggactcagtcaattaactcagcctttgccgaactccgtgagtgtattccaaacgtccccgctgacaccaagctatctaaaattaagactttgcgtctcgccacctcttacatcgcatatctgatggatttactggccaaggatgaccagaacggggaagctgaggcgtttaaggccgaaatcaagaaaaccgacgttaaagaggagaagaggaaaaaggagctgaatgagattctgaaatcaacggtctcgtccaacgataaaaagaccaaagggcgcacaggctggccacaacacgtctgggcactggagctcaagcaatag

SEQ ID NO: 190300 - DNA, 2577 bp, synthetic construct
  misc_feature 1..2577: note = Description of Artificial Sequence: Synthetic coding sequence
  source 1..2577: mol_type = other DNA
atgagcgtggtgggcctggacgtgggcagccagagctgctacatcgccgtggcacgcgccggggggatcgaaaccatcgccaacgagttctccgaccgctgtaccccctctgtgataagtttcgggtcaaagaaccgtaccatcggggtggcagccaagaatcagcagataacgcacgccaataacaccgtctcaaactttaagcgcttccacggacgcgccttcaatgatccctttatacaaaaagagaaggaaaacctctcctacgacttggtgcccctgaagaacgggggcgtgggcattaaagtgatgtatatgggcgaggaacatctgttctctgtggagcagatcaccgctatgctgctgacaaagttaaaagagacagcggagaacagcctgaagaaacccgtgactgactgcgttatatccgtgccttccttctttaccgacgccgaacgcaggtcagtgctcgacgcagcccagatcgttggcttaaactgtctccgccttatgaatgatatgacggctgtcgctctgaattacggcatttacaagcaggacttgccctctctggatgaaaagccgagaatcgtggtgttcgtggatatgggccacagcgcatttcaggtcagcgcctgtgcattcaacaagggcaagctaaaggtcctgggaactgcatttgaccccttcctcggaggtaagaatttcgacgaaaagctcgtcgaacacttctgtgccgaatttaagactaagtacaaacttgatgccaagtctaagatcagagcattgttgcgactgtatcaggagtgcgagaaactgaagaagctaatgtcttcaaatagcaccgatctgccccttaatatcgagtgtttcatgaacgataaagacgtgtcaggaaaaatgaaccggagccagtttgaagaattatgcgccgagctcctccaaaaaatcgaagtccccttgtatagtcttctagagcagactcatctgaaagtggaagatgttagcgcggtggaaatcgtgggcggagccacaaggatccccgccgtaaaggaacgcatcgccaaattcttcggcaaggacatcagtactacattgaatgcagatgaagccgtggcgagaggctgtgctctgcagtgcgcaattctctcaccggcctttaaggtccgtgagttctcagtcaccgacgctgtacccttcccaatcagcctaatttggaaccatgacagcgaggacaccgagggtgtacacgaagtgttttctaggaaccacgccgcccccttttcaaaagttctgactttcctgcgccgcgggcctttcgagctggaggctttctatagtgaccctcagggagtaccctaccctgaggccaaaattggcagatttgtggtgcaaaacgtctcggcgcagaaggacggtgaaaagagtcgagtgaaagtcaaggtccgcgtgaacacccacggcatctttacgatctctactgcttcgatggtcgagaaggtccccacagaggagaacgaaatgagctcagaggcggatatggagtgtctgaaccagcgcccccccgaaaatccggataccgataagaatgtacaacaggataatagcgaagcaggaacccagccgcaggttcagacagacgcccagcaaacatcacagagtccgccctcaccagaattgacttcagaagaaaataagatccccgatgccgacaaggccaatgagaaaaaggtggatcaaccaccagaggctaaaaagccaaaaatcaaagtagtgaacgttgagctgcccattgaagccaatttagtgtggcaactggggaaagacttgctgaatatgtacattgaaaccgagggcaaaatgatcatgcaggacaaactagaaaaggaaagaaacgacgcaaagaacgcggtggaggagtatgtgtacgagttccgagacaagctgtgtgggccctatgaaaagttcatttgcgagcaggaccatcaaaacttcctcagactcctcacggaaacagaagactggctctacgaggagggcgaggaccaagccaaacaggcctacgtcgacaagttggaagagctgatgaaaattggcactcccgtgaaggttagattccaggaggcagaggagagaccgaagatgtttgaggaactgggccagcggctccagcattacgctaaaattgccgcggatttcagaaacaaggatgagaaatataaccacattgatgaaagtgaaatgaaaaaggtggagaaaagcgtgaacgaggtaatggaatggatgaataacgtgatgaatgcccaagccaagaaaagccttgaccaggatccagtagtgcgcgcgcaggaaataaaaaccaaaattaaggagttgaacaacacttgtgaacccgtcgtgacacaacctaagcccaaaatcgaatctcccaaactagaacgtacccctaatggtccaaacattgacaagaaagaggaggaccttgaggataagaacaatttcggtgctgagcctccacatcagaacggtgaatgctacccaaacgagaaaaacagtgtcaatatggatttggactag

SEQ ID NO: 190301 - DNA, 414 bp, synthetic construct
  misc_feature 1..414: note = Description of Artificial Sequence: Synthetic coding sequence
  source 1..414: mol_type = other DNA
atgttcgaggagctgggccagcggctgcagcactacgccaagatcgccgctgatttccgaaataaggacgagaagtataatcatattgacgagagcgagatgaagaaagtggaaaagtccgtcaacgaggtaatggagtggatgaacaatgtcatgaacgcgcaggccaaaaaatctctcgaccaagaccccgttgtgcgcgctcaggagattaagactaaaattaaggagctcaataatacctgcgagcctgtcgtgacacagcctaagcctaagatagaaagccctaaactggagcgcactcccaatggacctaatatcgataaaaaagaggaggacctcgaagataagaataattttggagctgaacctcctcatcagaatgactcctgtgggatcgtaaattcatattag

SEQ ID NO: 190302 - DNA, 2034 bp, synthetic construct
  misc_feature 1..2034: note = Description of Artificial Sequence: Synthetic coding sequence
  source 1..2034: mol_type = other DNA
atgtacatgggcgaggagcacctgttcagcgtggagcagatcaccgcgatgctactcactaaactcaaagaaactgccgagaatagcttgaagaagccggtgacagactgcgtaatctcagtcctcggcacagcatttgatccttttctgggaggaaaaaattttgacgagaagctggtagaacacttctgtgcagaatttaaaaccaagtataagctcgacgccaaatcaaagatccgtgctctcttaaggctgtaccaggagtgcgagaagttgaaaaagttaatgagctcaaacagcacagacctgccattaaacattgagtgcttcatgaatgacaaagacgtttctggaaagatgaatcgctctcagtttgaggagttgtgtgccgagctgctgcagaaaatcgaggtccccctgtacagcttgctggagcagactcatctgaaagtggaggatgtcagtgctgtagagatagtgggaggggctacaaggatacccgcagtgaaagagcgcatcgccaaattctttggcaaagacatcagcaccacactcaatgccgatgaggcggtggcacgggggtgcgcactgcagtgcgccatccttagccctgccttcaaggtccgggagttctcagtgaccgacgcagtgcccttcccaatctcgttgatctggaatcacgactccgaggatactgagggcgtccacgaggttttcagcagaaaccatgccgcacccttttcgaaggtactgacgttcctccgaagggggcctttcgagctggaagccttctatagcgatccccagggcgtgccatacccagaagctaagataggcaggttcgttgtgcagaatgtgtccgctcagaaagacggcgagaaatcacgggtcaaggtaaaggtgcgagtgaatacccatgggatttttactatctcaaccgccagcatggtggaaaaggtcccgacagaggagaatgaaatgtcctccgaagcggacatggaatgccttaatcagaggccacccgagaaccccgatacagacaagaatgtccaacaagacaattccgaagcaggaacacaaccgcaggttcagactgacgcccagcagacatcgcagagcccaccgagtccagagttaacgtccgaagaaaataaaattccagatgcagataaggcgaacgaaaagaaggtcgatcagcccccggaggccaaaaagcctaagatcaaagttgtgaatgtggagctgcccatagaggcaaacctggtgtggcagctcggcaaggacctgctcaatatgtacatcgagacagaggggaaaatgatcatgcaagacaagttagaaaaggaaaggaatgatgctaagaacgctgtggaggagtatgtgtatgagttccgggataaattgtgtggcccatacgagaagttcatttgcgaacaggaccaccagaattttctccggctcctgacagaaacagaggactggttgtatgaagagggagaagaccaggctaagcaggcatatgttgataaactggaggagcttatgaaaatcggaacgcccgtcaaagtccgcttccaggaagccgaagaaaggccaaaaatgtttgaagagctcggccaacgtctgcagcactacgctaaaatcgcggctgattttcggaacaaggacgagaagtacaaccacatcgacgagagcgaaatgaaaaaggtcgagaagtcagtgaacgaagtcatggagtggatgaacaatgttatgaatgcccaagccaagaagagtctggatcaggatccagtggttagggcacaggaaatcaaaactaaaatcaaggaactaaacaacacctgcgaacccgttgtcactcagcccaagccaaagatcgagtctcccaagctggagcggaccccgaatgggccaaatatcgacaagaaggaggaagacctggaggacaagaacaacttcggcgcagaacccccccatcaaaacggcgagtgttacccaaacgagaaaaatagcgttaatatggatctggactag

SEQ ID NO: 190303 - DNA, 1920 bp, synthetic construct
  misc_feature 1..1920: note = Description of Artificial Sequence: Synthetic coding sequence
  source 1..1920: mol_type = other DNA
atggcccgggagcggccctgccggtgccacggcaacggcggccggtccccaggaactggctgcccactggggcggatcttccccgaaggatctcgccgtcgcaaacgcaagtggcatgttgaaggaccagtagaagcgccacgcaatggacagacacccagagcaggtgcggagcggggacagggtcgaaagcggcgccaggagaagcaggccggagggattgaaaccatcgccaatgagttctccgatcggtgcactccaagcgtgattagtttcggctctaagaataggacaatcggagtggcagcaaaaaaccagcaaatcactcacgccaacaatactgtttccaactttaaacggttccatggccgggcatttaatgacccttttattcagaaggagaaggaaaacctctcctacgatctggtgcccttgaagaatggcggagtaggtattaaggttatgtacatgggagaagagcatcttttcagcgtcgagcaaattacggccatgttgctcactaagctcaaagagaccgccgagaattccctgaagaaacccgtgaccgattgcgtgatctccgtcccctctttttttacagacgccgaaagacgctctgttctcgatgccgcgcagatcgtagggctgaactgcctccgtctgatgaacgatatgacagctgttgcactgaactacggtatttataagcaagacctaccgtccttggacgagaaacccagaattgtagtgttcgtggatatgggccattcagcgttccaagtgagcgcctgcgcttttaacaagggtaagttgaaggtcctaggcacagcattcgatccgttcctcggcggaaaaaactttgatgagaagctcgtggaacatttttgtgcagagtttaagactaagtataaattagatgctaagtcgaaaatccgtgcactcctccgcctgtaccaggagtgtgaaaagctcaagaagcttatgtcctccaactcgaccgaccttccactcaacatcgagtgctttatgaacgataaggacgtcagcggaaagatgaataggagccaattcgaggagttgtgtgctgagctacttcaaaagattgaagtgcccctgtacagcctcctcgagcaaacacacctgaaggtggaggacgtgagtgcagtggagattgttgggggcgccacacgaatccctgcagtcaaggagaggatcgccaaattctttggcaaagatatttcaaccactctgaatgctgatgaggcggtggccagagggtgtgccttacaatgtgctatcctctccccagcttttaaggtgcgagaatttagtgtgactgatgctgttccattccccatctctcttatctggaatcacgactctgaggacaccgagggcgtacacgaagtgttcagccgaaaccatgccgcaccatttagcaaagtgttgacttttctccgtagggggcccttcgaactcgaggcattttactctgacccacaaggggtaccatatccagaagctaagatcgggagatttgtggtccagaacgtaagcgcgcaaaaggacggggagaagtctcgagtaaaggttaaagtccgggttaatacccatgggatcttcaccatttccacagccagtatggtggaaaaagtccctacagaggaaaatgaaatgagctccgaggctgatatggagtgccttaatcagagacccccggaaaacccggacactgacaagaacgtgcagcaagacaactccgaagcaggcactcaaccccaggttcagacagatgcgcagcagacttcccagtcgccacccagtcctgaactcacatcagaggagaataagattcctgatgctgataagcagatgaagaaaaaacttacctcactccagaagctgaaatctcctaaatag

SEQ ID NO: 190304 - DNA, 2583 bp, synthetic construct
  misc_feature 1..2583: note = Description of Artificial Sequence: Synthetic coding sequence
  source 1..2583: mol_type = other DNA
atggccaccgccgccgtgctgcggggccccgccgcccactgggtggaatcatttcagaaggcgagggaggaagggagcggcagtggtacctggagggggaggtggcgccgaagatctgtgatttcgtttggttcgaaaaatcgcacgatcggcgtggcagccaagaatcagcagataactcacgccaacaacacggtttccaattttaaaagattccacggtagggccttcaacgatccattcatccagaaggaaaaagaaaatttgtcctacgacttggtgccactgaagaatggcggggtgggtattaaggtgatgtatatgggagaggaacacctgttctcagtcgagcagatcaccgcgatgctgctcaccaaattgaaagaaaccgctgagaactcacttaagaaacccgtaacggactgcgtgatcagtgtgccttcgttctttactgatgccgagcgacgcagcgtccttgatgctgctcagatcgtagggctcaattgtcttcgcctgatgaatgatatgacggctgtggcactgaattacggtatctacaagcaggacctgccaagcctggatgagaagcccaggatcgttgtgtttgtggatatgggccattccgcgtttcaggtaagcgcctgtgcgttcaacaagggcaaactaaaagttctggggacggcctttgatcccttcttgggaggcaaaaactttgacgagaaattagtggaacacttttgcgccgaattcaagacgaagtacaagctcgatgctaagagcaagattcgcgcgctcttgcgcttgtatcaggagtgtgagaagctaaaaaagcttatgtcctccaactcaacagaccttccgctcaatatcgaatgtttcatgaatgataaggacgtgtctgggaagatgaacaggtcacaattcgaggaactgtgcgctgaactgcttcagaagatagaggtgccgctttatagcctgctagagcagactcatctgaaggtggaagatgtgtctgccgtcgagatcgtcggcggcgccaccagaatccccgcggtaaaagagaggattgccaagttttttggcaaggatatttcaaccacactgaacgctgacgaggccgtagctcgcgggtgcgcgctgcaatgcgccattctctccccggccttcaaagtgcgagaatttagtgtgacagacgcagtgccctttccaatcagcctgatttggaaccacgattcagaggatactgaaggggtgcacgaagtctttagccgcaaccacgctgctcctttcagtaaggtgttaacgttcctgagaaggggcccttttgagctggaagcattttacagtgacccccaaggggtgccatatccggaggctaagattggtcggtttgtcgttcagaatgtgagcgcccagaaggatggagagaagagcagagtgaaggtgaaggtaagagtgaatacgcatggcatttttaccattagcacagcctcaatggtggagaaggtgcctacggaggaaaacgagatgtcatccgaggccgacatggagtgcctgaaccagcgcccccctgagaaccccgataccgataagaacgtccagcaggacaattccgaagctggaacccagccgcaagtgcagaccgacgcgcaacagacatctcagtcacctccatcccccgagttaacttctgaggagaataaaatacctgatgcagacaaagcgaatgagaagaaggtggaccagccacccgaggccaaaaagcctaaaatcaaggtcgtgaatgtggaactccccatcgaagcaaacttggtatggcagctgggtaaagacctcttgaatatgtacatcgagaccgaggggaaaatgattatgcaggacaaactggagaaggaaagaaatgatgctaaaaatgcggtagaagaatatgtgtacgagtttagggacaaactgtgcgggccctacgagaaatttatctgcgagcaggaccaccaaaactttttaaggctgctgacagaaactgaggattggctctatgaagagggcgaggaccaagccaagcaggcctacgtggacaaactggaagaactgatgaagattggtactccggttaaagtgaggttccaggaggctgaggagcggcctaagatgtttgaggaactggggcagcggctgcagcactatgctaagattgccgccgacttccgcaacaaagacgagaaatataaccatatcgacgaaagcgaaatgaagaaggtcgagaagagcgtcaacgaggtgatggaatggatgaataacgtgatgaacgctcaggccaagaagagcttggaccaggaccctgtggtcagggctcaagaaatcaagaccaagatcaaagagctcaacaatacctgcgagcccgtggttacccagcccaaacccaagatcgagtcacccaagctcgaacgcacacctaatgggcctaatattgacaagaaggaagaggacctagaagacaaaaataactttggtgcagagccaccccaccagaatggggaatgctatcctaacgagaagaactcagtaaatatggatctggactag

SEQ ID NO: 190305 - DNA, 582 bp, synthetic construct
  misc_feature 1..582: note = Description of Artificial Sequence: Synthetic coding sequence
  source 1..582: mol_type = other DNA
atggacagcaccctggccgtgcagcagtacatccagcagaacatccgggccgattgctctaacatagacaagatcttggagcccccggagggccaggacgagggagtgtggaaatacgagcatttaaggcagttttgtctggaactgaatgggctcgccgtgaaactacagtcagagtgtcatcctgatacatgtacgcagatgacagccactgaacagtggatctttctttgtgcagcacacaaaacgccaaaagaatgccccgcaatcgactacactagacatactttagacggagcagcttgtctgctcaatagtaacaaatacttcccaagcagagttagcattaaagagtcttccgtggctaagctcgggagcgtgtgccgacgcatctaccgaatcttctctcacgcatactttcaccatcgacaaatattcgacgagtacgaaaacgaaaccttcttgtgccaccgcttcactaaattcgttatgaagtacaacctcatgtctaaggacaacctgatcgtgccaatccttgaggaagaagtgcaaaattcggtgtccggtgagtctgaagcttag

SEQ ID NO: 190306 - DNA, 306 bp, synthetic construct
  misc_feature 1..306: note = Description of Artificial Sequence: Synthetic coding sequence
  source 1..306: mol_type = other DNA
atggccggccaggccttccggaagttcctgcccctgttcgaccgggtcctggtggagaggtctgccgcagagacagttaccaagggcggcattatgctgcctgagaaatctcagggaaaggtgctacaggcaaccgtggtcgccgtgggttctggttctaaaggaaaggggggtgaaatccagccggtgagtgtcaaggtgggggataaagtgcttcttccagaatatggcggtaccaaggttgtcctcgacgataaggtgtgcaaactgaacaacagcaagaagaagagtgatatttgcaattag

SEQ ID NO: 190307 - DNA, 144 bp, synthetic construct
  misc_feature 1..144: note = Description of Artificial Sequence: Synthetic coding sequence
  source 1..144: mol_type = other DNA
atgggcggcgagatccagcccgtgagcgtgaaggtgggcgacaaggtactgctccccgagtacggtgggacaaaggtggtgttggacgataaggattattttcttttccgcgacggtgatattttgggtaaatatgtggactag

SEQ ID NO: 190308 - DNA, 591 bp, synthetic construct
  misc_feature 1..591: note = Description of Artificial Sequence: Synthetic coding sequence
  source 1..591: mol_type = other DNA
atggccgacggccagatgcccttcagctgccactaccccagccggctgagacgcgatccatttcgggatagtccactgagcagtcgactgctcgatgacggatttggcatggatccgtttcccgacgacttaaccgcctcgtggccggactgggccctgcctcgtttgagcagtgcttggccggggacattgcggtctgggatggtgccacgtggtccgactgcgacagctcggttcggggtgcctgcagaaggccggacccctccaccttttccaggagagccatggaaagtgtgtgtgaatgtgcactcatttaaacctgaggagttgatggtgaaaactaaagacggatacgtagaggtgtccggaaagcacgaggagaaacagcaggaaggcggcatcgtgtccaaaaactttactaaaaagatccagctgccagcagaggtggatcccgttacagtctttgccagtctgtcaccagaagggttgctgatcatcgaggcaccccaggtcccaccctacagtacgtttggtgagagctcttttaataatgagttgcctcaggattcacaggaggtaacatgtacttag

SEQ ID NO: 190309 - DNA, 453 bp, synthetic construct
  misc_feature 1..453: note = Description of Artificial Sequence: Synthetic coding sequence
  source 1..453: mol_type = other DNA
atggccaagatcatcctgcggcacctgatcgagatccccgtgcggtatcaggaggagtttgaggctcgcggcctcgaagactgccgtctggaccatgcgctttatgccctgcccggcccgactatagtggatctgagaaagacacgagccgcccagtctccgcccgtggacagcgcagctgaaacccctcctcgggaaggcaaatctcacttccagatcctgctggacgtggtgcaattcttacccgaggacatcattattcagacttttgaagggtggcttctcattaaggcccagcatgggacaaggatggatgaacacggctttattagccgcagcttcactcgtcagtacaaattacctgacggagttgaaatcaaagatctgagcgcagtgttgtgtcatgacggcatactggtcgtggaagtgaaggatccggtaggaacaaaatag

SEQ ID NO: 190310 - DNA, 513 bp, synthetic construct
  misc_feature 1..513: note = Description of Artificial Sequence: Synthetic coding sequence
  source 1..513: mol_type = other DNA
atgagccaccggaccagcagcaccttccgggccgagcggagcttccatagctcgagttcctcgtcctcttcttcaacatcttcctctgcttcacgggcattacccgcccaggacccacctatggagaaggcactgtctatgttctccgacgactttggttcttttatgcggccacattccgaaccccttgccttcccggctcggcctggcggcgcaggcaatatcaaaaccctgggcgacgcttacgagtttgcagttgacgtgcgcgacttctctcccgaagatatcattgtcacgaccagtaataaccacatcgaggtgcgcgccgagaagctggctgctgatggcactgttatgaacacctttgcgcataagtgccagctgccggaggacgtggatcccactagtgtaacgagcgctttgcgggaagacggatctcttacaatccgagcccgccgccatccccatactgagcacgtacagcagacattccgcacagagatcaaaatttag

SEQ ID NO: 190311 - DNA, 792 bp, synthetic construct
  misc_feature 1..792: note = Description of Artificial Sequence: Synthetic coding sequence
  source 1..792: mol_type = other DNA
atgagcggctgcgagctgagccccctgggcctgcgggtgggcctgagcgcaggtccagcgcacggcagacggttccctgccccatctggcccgtggcggggcctaaacctagcaagccgacaaggagcaggccctaagccacgtgacagccgtccatacaaagcggcggccgtgggagcttggcacgctcgacccgaagcctgtgcccatacactcagttgtcctgccctcgcaaggctgggcagggctcgtagaaggccctggatgagccatcgcacaagctccactttccgggctgaacgctcctttcactctagcagcagctcctcatccagcagtacgtcctcatctgccagccgggctctcccagcccaggacccgccgatggagaaagctcttagcatgttcagtgatgattttgggagcttcatgaggccccacagcgaacccctcgcattccctgctgcccatcccacggcgaggccaggcggagcaggtaatattaagactctcggtgacgcctacgagttcgcagtcgacgtccgggacttcagtccagaagatatcatcgtgactactagcaataaccacatagaggtaagagccgagaagctcgcagcagatgggacagtgatgaacacgttcgctcataaatgccagcttcccgaagatgtagacccaacttcagtgacaagcgcattgcgcgaggatggctccctgacaatccgggcacgaagacatccacacactgagcatgtacagcagacattcagaaccgaaatcaaaatttag

SEQ ID NO: 190312 - DNA, 528 bp, synthetic construct
  misc_feature 1..528: note = Description of Artificial Sequence: Synthetic coding sequence
  source 1..528: mol_type = other DNA
atgagccaccggaccagcagcaccttccgggccgagcggagcttccattcttctagttcctcttcatcctcttccacctccagcagtgcctcacgtgcgttgccagctcaggacccacctatggagaaggcgctgtccatgttcagtgacgatttcggcagcttcatgagaccacacagtgaacctttggccttccctgctgctcacccaactgcacggccaggtggtgctggaaatatcaagacactcggcgacgcatatgagtttgccgtagacgtgcgcgacttctcacccgaagacataatcgttactacctctaataatcatatcgaggttagagctgagaaacttgcggccgatggaacagtcatgaacacttttgcccacaagtgtcagctgcccgaggacgttgacccaacatccgttactagcgcactgcgggaagatggcagtctgaccataagggcacggcgtcatccccacaccgagcatgtgcaacaaacattcagaacggagattaagatctag

SEQ ID NO: 190313 - DNA, 207 bp, synthetic construct
  misc_feature 1..207: note = Description of Artificial Sequence: Synthetic coding sequence
  source 1..207: mol_type = other DNA
atgagccaccggaccagcagcaccttccgggccgagcggagcttccacagcagctcctcgagctcaagtagttctacatccagttccgcttctcgagcccttccggcccaggatccgccgatggagaaagctctttctatgttctcagatgacttcggctcctttatgcggcctcattcagaacccctcgcattcccaggaaaatag

SEQ ID NO: 190314 - DNA, 1722 bp, synthetic construct
  misc_feature 1..1722: note = Description of Artificial Sequence: Synthetic coding sequence
  source 1..1722: mol_type = other DNA
atgctgcggctgcccaccgtgttccggcagatgcggcccgtgagcagagtgctagctccacatcttaccagagcctatgctaaggacgttaaatttggcgccgacgccagggccttaatgctgcagggcgtggatctattggccgatgccgtggctgtgactatggggcctaaaggccgtaccgtgataatagagcagagttgggggagccccaaggtcactaaagacggcgtaacagtggcgaagtccattgaccttaaagacaaatacaagaatattggcgcaaaactggttcaagacgtggctaacaataccaatgaggaagcaggggatggcactaccacggccaccgtgttggcgaggtccatcgcgaaagagggctttgagaagattagcaagggagccaaccctgttgagatccgcaggggcgtgatgctggctgtggacgcagtgattgctgaactgaagaaacagagcaaaccagtaactacccctgaggagattgcacaggtcgcgaccatttccgctaatggtgacaaagaaatcggcaatatcatcagcgacgcaatgaagaaagtggggcggaaaggagtgataaccgtgaaggacggcaagacactgaatgacgagctggaaatcattgaaggcatgaagtttgatcgggggtacatttccccctattttataaacacatctaagggacaaaaatgtgagttccaggacgcatatgtcctgctgagtgaaaagaaaatttccagtatccaaagtatagttcccgctctcgaaattgcgaacgcccataggaaacccttggtcatcatcgcggaggatgtagacggggaggcactaagtaccttggtcctaaaccggctcaaggtcggccttcaggtagtcgcggtgaaagcaccagggttcggagataaccggaagaatcagctgaaggacatggccatcgctaccggaggtgccgtttttggtgaggaggggcttacattgaacttagaggacgtccagccacacgacctgggtaaagtcggcgaggtgattgttacgaaagatgatgccatgctgctgaaggggaagggagacaaggcacagatcgagaagcgcatccaggaaattattgaacaactggacgtgactacctccgagtacgaaaaagagaagctcaacgagaggctggcgaaactgtccgatggggtcgctgttctgaaggtggggggaactagcgacgtggaagtgaacgaaaaaaaagaccgggtcaccgatgctctgaatgcaactcgcgctgctgttgaggaaggtatcgtgctcggcggcgggtgcgcattgctgagatgcatcccagccctggatagcctgacacctgctaatgaagaccagaaaatagggattgaaatcattaaaagaacacttaaaattccggcgatgacaatcgctaaaaatgctggtgtcgagggctcccttatagtggagaagatcatgcagtcctcaagcgaggtaggctacgacgccatggcgggtgacttcgtgaatatggtggagaagggtattattgacccaaccaaagttgtgagaacagccctactggacgccgccggagtcgccagtctgcttactaccgctgaagtagtggtgaccgaaatccccaaggaggaaaaggatccagggatgggtgccatgggcggcatggggggcggcatgggtggcggaatgttttag

SEQ ID NO: 190315 - DNA, 1722 bp, synthetic construct
  misc_feature 1..1722: note = Description of Artificial Sequence: Synthetic coding sequence
  source 1..1722: mol_type = other DNA
atgctgcggctgcccaccgtgttccggcagatgcggcccgtgagcagagtgttagcaccacatctgacccgggcatacgccaaagatgtcaaatttggcgctgacgcaagggcccttatgctccagggtgtcgatctcctggctgacgccgtggctgtgaccatgggcccgaaagggcggaccgtgattatcgaacagagttggggctcaccaaaggtcacaaaagacggcgtgaccgttgccaaatctattgaccttaaagataaatacaaaaacatcggcgcaaagctggtccaggatgtggcaaacaatacaaatgaagaggctggagacgggaccaccaccgcgactgtgctcgctagaagcattgctaaagagggctttgaaaagatctccaaaggtgctaatcccgtggagattcggcgaggggtgatgctggccgttgatgcagtaattgcagaattgaagaaacaatctaagcctgtcacaactcccgaggaaatcgcgcaagttgccaccataagtgctaacggagataaggagatcgggaacattatcagcgacgccatgaagaaagttgggcggaagggcgttatcactgtgaaggacggtaaaactctcaacgatgagttggagatcattgaaggaatgaagtttgaccgcggatacattagtccttactttatcaacacttcgaaagggcagaagtgcgagttccaggatgcatacgttctgttatccgaaaaaaagatctcttccatccagtctatcgtgcccgccctggagatagccaatgcgcacaggaaaccccttgtcatcattgcggaagatgtggatggggaggctctaagcactctcgtgctcaaccgactgaaagtgggtttgcaagtggtcgctgtcaaagcgccgggctttggggacaaccgaaagaaccagcttaaggacatggcaatagccaccggcggcgcggtcttcggtgaagaggggcttaccttgaatctagaagacgttcagccccatgatcttggcaaggtgggcgaagtgatcgtaacgaaggacgacgccatgctgctaaaaggaaagggggacaaggctcaaatcgagaagcgaatacaggagatcattgaacagctggatgtgacgacttccgaatacgagaaagagaagttaaacgagaggctggcaaagcttagcgacggcgtagctgtgcttaaagttggcggcacatctgacgttgaggtgaacgagaagaaggatagggtgactgatgccctgaacgccacccgggctgctgtagaagagggtattgtcctcgggggggggtgcgccctcttgcgctgcatcccagccttagatagccttacacctgcaaacgaggatcaaaagattgggatcgagatcatcaaaaggacacttaagattccagcgatgaccattgctaagaacgcaggcgtagaaggatccctgatagttgagaaaatcatgcaaagctcatctgaggtgggatatgacgcgatggccggggattttgtgaacatggtggagaaagggatcatagaccctacaaaggttgtaaggacagctcttttggacgccgctggggtcgcctcacttctgaccacagccgaggtcgtcgttactgagatcccgaaggaggagaaagacccagggatgggtgccatgggtgggatgggaggcggaatgggtggcggcatgttctag

SEQ ID NO: 190316 - DNA, 177 bp, synthetic construct
  misc_feature 1..177: note = Description of Artificial Sequence: Synthetic coding sequence
  source 1..177: mol_type = other DNA
atgctgcggctgcccaccgtgttccggcagatgcggcccgtgagcagagtgctggccccccatctgaccagggcatacgcaaaagacgttaaatttggggcagatgccagagccctgatgctgcaaggtgtggatctgctggcagatgccgtggccgtgactatgggccccaaatag

SEQ ID NO: 190317 - DNA, 285 bp, synthetic construct
  misc_feature 1..285: note = Description of Artificial Sequence: Synthetic coding sequence
  source 1..285: mol_type = other DNA
atgctgcggctgcccaccgtgttccggcagatgcggcccgtgagcagagtactggccccgcacttgacaagagcctacgcgaaggatgtcaagttcggcgccgatgctcgcgcgttgatgctgcagggagtggatctacttgcagacgctgttgccgtaacaatgggcccaaagggccgtacagtcattatcgaacagtcatggggcagccccaaggtcacaaaggacggcgttactgttgccaagtctattgaccttaaggacaagtataagaatataggatag

SEQ ID NO: 190318 - DNA, 705 bp, synthetic construct
  misc_feature 1..705: note = Description of Artificial Sequence: Synthetic coding sequence
  source 1..705: mol_type = other DNA
atgctgcggctgcccaccgtgttccggcagatgcggcccgtgagcagagtgctggcaccacacttgacccgtgcatacgcaaaggatgttaagtttggggcagatgctagagctttgatgctccagggagtggacctgcttgcggacgccgttgccgttacaatgggccctaaggggcgaacggttatcatcgagcagtcatgggggtccccgaaagtcaccaaagacggggtcaccgtcgccaagtctattgatctgaaggataaatacaaaaacatcggggccaaacttgtgcaggatgtggcaaataacactaacgaggaggccggcgatggaaccaccactgctacagtgctcgcgcgcagcatcgccaaagaaggttttgagaaaatttcaaagggcgccaaccccgtggaaatcaggcggggggtgatgcttgcagtagacgccgtaatcgcagagcttaagaagcagtcgaagccagttacaactccggaagagatcgctcaggtcgctacaattagcgccaacggcgataaagagattggaaacattatatccgacgccatgaagaaggtgggacgcaaaggggtcatcacagatggcaagaccctgaatgatgaactcgagatcattgaggggatgaaattcgacagaggatacatatccccgtattttattaatacatctaaaggcaagaactag

SEQ ID NO: 190319 - DNA, 252 bp, synthetic construct
  misc_feature 1..252: note = Description of Artificial Sequence: Synthetic coding sequence
  source 1..252: mol_type = other DNA
atgctgcggctgcccaccgtgttccggcagatgcggcccgtgagccgagtccttgcgcctcatctgacgcgcgcctacgccaaagacgtcaaattcggcgccgacgcccgagcactgatgcttcagggagttgacctactagccgacgccgtggcagttaccatgggtccaaaggggaggactgtaatcattgagcaatcgtgggggtcaccaaaggtcacaaaggatggggtaacagtagccaagtcatag

SEQ ID NO: 190320 - DNA, 666 bp, synthetic construct
  misc_feature 1..666: note = Description of Artificial Sequence: Synthetic coding sequence
  source 1..666: mol_type = other DNA
atgctgcggctgcccaccgtgttccggcagatgcggcccgtgagccgggtgcttgctccccacctgacgcgggcctacgccaaagatgtgaagttcggcgccgatgccagggctctgatgctgcaaggcgtggatctgctcgccgacgcagtggctgtgacaatgggacctaaggggaggactgtaatcatcgagcaaagctggggctcacccaaagtgaccaaagacggggttactgtcgccaaatcaatcgacctgaaggacaagtataagaacatcggagcaaaactagtgcaagatgtcgctaataatacaaacgaagaggctggggatggaacaaccactgccactgtcttggctcgctcaatcgcaaaggaaggattcgaaaagatatccaaaggggctaaccccgtggaaatcaggaggggggtgatgctagctgtcgatgccgtcatcgccgagctcaagaagcagagcaagcctgtcacaactcccgaggaaattgctcaggtggccaccatctctgctaatggagataaagaaataggtaatattatatcagatgccatgaagaaagtgggacgcaagggcgtgattactgtcaaggacggtaagaccctgaacgatgaactggagatcatcgagggtatgaaatttgaccgatag

SEQ ID NO: 190321 - DNA, 738 bp, synthetic construct
  misc_feature 1..738: note = Description of Artificial Sequence: Synthetic coding sequence
  source 1..738: mol_type = other DNA
atgctggccgtggacgccgtgatcgccgagctgaagaagcagagcaagccagtcacaacaccagaagaaatcgcccaagtggcaactatatcagcaaatggcgacaaagagataggaaatatcatttctgatgcaatgaaaaaagtgggcagaaaaggcgtaattacagtgaaagacggtaaaactctgaacgatgaactcgagataattgagggcatgaaattcgatcgcggctacatttcaccctactttatcaataccagtaagggccaaaaatgtgagtttcaagacgcatatgtactgttgtcagagaaaaagatttctagtattcagtctatcgttcctgccctcgaaattgcgaacgctcacaggaaaccactagtgatcattgccgaagatgtggatggcgaagcattgagcacactagttctgaacagactgaaggttggtctgcaggtagtggccgtcaaggccccaggctttggtgacaaccgtaaaaaccaactcaaagacatggctatagcaactggcggggccgtgttcggcgaagaggggcttactttgaaccttgaggatgtgcagccccacgatctcggaaaggtgggagaagttattgtcacaaaggacgatgcaatgttgctgaaggggaaaggcgataaagctcaaatcgaaaaaagaattcaggagattatcgagcagttagatgtgactacgagcgagtacgaaaaagagaactag

SEQ ID NO: 190322 - DNA, 477 bp, synthetic construct
  misc_feature 1..477: note = Description of Artificial Sequence: Synthetic coding sequence
  source 1..477: mol_type = other DNA
atgctgcggctgcccaccgtgttccggcagatgcggcccgtgagcagggtactcgcgccacacctgacccgggcttacgctaaggacgttaagtttggagcagacgccagagccctgatgctgcagggggtcgatttgctggccgatgccgtggcggtcacgatggggccaaaggggcgaacagtgattattgagcagtcctggggtagtccaaaagtgacaaaagacggagtgaccgtcgcgaaaagcatcgacctgaaggataaatacaaaaacattggggccaagctcgtccaagatgtggccaacaacactaatgaagaagcgggcgatgggaccaccacagccactgtgctggcaagatccatcgcaaaagaagggtttgaaaagatttcgaagggagccaaccctgtcgagatcaggcgtggccggaacgtgtgttgccaccattctgtgctgaatttctccgtactgtag

SEQ ID NO: 190323 - DNA, 2061 bp, synthetic construct
  misc_feature 1..2061: note = Description of Artificial Sequence: Synthetic coding sequence
  source 1..2061: mol_type = other DNA
atgctggccgtgcccgagatgggcctgcagggcctgtacatcggctcctcccctgagaggagccctgtaccaagtccacctggatcaccccgaacccaggagtcttgtggaattgctcccctcacaccctctcaaagccccaaacccgaggtacgcgccccccaacaagcctcattttccgttgtcgtggcaatcgatttcggcactacgagctccggctacgcgttttccttcgcatccgatccagaggctatacacatgatgcgcaagtgggaagggggcgatcccggggtggcacatcagaaaaccccaacctgtctgctgctcacaccggagggagcatttcattcttttgggtatacagccagggactattatcacgatcttgatccggaggaagcacgggactggctgtatttcgagaaatttaagatgaaaattcacagtgccaccgacctcaccctgaagacgcagttagaagcagtgaatggtaaaacgatgcctgccttggaggtattcgcacacgctctccgcttcttcagagaacatgcccttcaggagctgcgcgagcagtccccttcccttcccgagaaggataccgtacggtgggtactgactgtgcccgccatctggaagcagcctgcaaagcaattcatgcgcgaagccgcctacctcgccggactcgtcagtcgcgaaaacgccgaacagctgctaattgctcttgaacctgaagccgcctctgtgtattgccggaagctccgccttcatcaattactcgacctgtctgggcgggccccaggcggcggaagactcggagagcgcagatcaatcgattccagcttcaggcaggccagagaacaactgcggcgaagtcgacactcaaggacattcctagtcgaaagtggcgtcggagagttgtgggccgagatgcaggctggcgataggtacgttgtggcggattgcggcggcggtactgtggatttgactgtacatcaattggaacaacctcacggaactctcaaggaattgtataaagcctcggggggaccatatggcgccgtcggtgtagacctggctttcgagcagctcttatgccgaatattcggggaggatttcattgctacttttaagaggcaacgaccggccgcctgggtagatttgacgatcgccttcgaagcccgaaagagaacagccggccctcaccgcgccggagctcttaatatctcactccctttctcctttatcgacttctatcgcaaacagcgaggccacaacgtggagaccgcattgcgacggtcttctgttaactttgttaaatggtcatcacagggaatgctgcgtatgagctgtgaagctatgaatgagctcttccagcctactgtctccggaataattcagcacatcgaggccctgctggcaagaccagaggtgcagggagtgaaactgctgttcctggttggtggctttgctgagtccgctgtgttgcaacatgccgtccaggcagccctgggggcccgagggctcagagtcgtggttcctcacgacgttggcctcacgatcctgaaaggtgctgtattgtttgggcaagcacctggtgtggttagagtacgccgtagccccttgacgtatggagtaggcgtcctcaataggttcgtaccaggaagacatccccctgagaagcttctggtgcgtgacggcaggagatggtgtaccgacgtattcgagcgcttcgtggccgccgagcaatctgtagcactgggtgaagaagtccgacgatcatattgccccgctcggcccggtcaacgccgggtactgatcaatctatactgctgcgccgcagaggatgctaggtttatcaccgaccccggagtgagaaaatgcggcgcactgtctcttgagctggagccagccgattgtgggcaagatactgcgggcgctccccccggccgacgggaaattcgcgcggccatgcagttcggcgacaccgagatcaaggttaccgctgtggacgtaagcacaaaccgcagcgtacgggctagtattgacttcctgagcaactag

SEQ ID NO: 190324 - DNA, 1803 bp, synthetic construct
  misc_feature 1..1803: note = Description of Artificial Sequence: Synthetic coding sequence
  source 1..1803: mol_type = other DNA
atgatgcggaagtgggagggcggcgaccccggcgtggcccaccagaagacccccacctgtttgttgctgacaccggaaggtgctttccactcgttcggatataccgccagagactattaccatgatctcgaccccgaggaggcaagggattggctttattttgaaaagtttaaaatgaagatccatagcgccacagatctcaccctgaaaacccagctggaggctgttaacggtaaaaccatgcctgccttagaggtgtttgcccacgccctgagatttttccgcgagcacgctttgcaagagctgagagaacaaagcccttcactgccggaaaaggatacagtgaggtgggttttaacagttcctgctatatggaagcagcctgccaagcaatttatgagggaggcagcttacctggccggattggtgagcagagagaatgccgaacagctcctgatcgcactggagcccgaagctgctagcgtctactgccgaaaactgcggttacatcaattgctggatctctctggccgcgctccgggtggaggcagactgggcgaacgccgcagcattgactcaagcttccgccaggctagagagcagcttcgtaggagcagacacagtcgaactttccttgttgagagcggtgtgggagagctctgggctgagatgcaggccggtgacagatatgtggtggcagactgcggcggcggaaccgtggatctaacagtccatcagctagagcagcctcatggcactctgaaggagctgtacaaagcctcaggagggccttatggggcggtcggtgttgatttagctttcgaacagctactatgtagaatctttggagaggatttcattgctacctttaaaagacagcgccctgctgcttgggtggacctgaccattgcatttgaagcaagaaaacgcaccgccgggccacaccgcgccggggccctgaacatcagtttaccgttttcgttcattgacttttaccggaaacagaggggacataatgtcgagaccgctctcaggaggagttccgtaaacttcgtgaagtggtcttcccaagggatgttgagaatgtcttgcgaggccatgaacgaactttttcagcccacggtttcgggaataatccagcacattgaggcactcctggccagacctgaggttcagggagttaagctgctgtttttggtgggtggttttgccgaatcggccgttttgcagcacgcagtgcaggcagccctgggcgcgcgaggtcttcgtgtggtcgtgccccacgacgtgggactgacgatcttgaagggcgcagtgctttttggtcaggctcctggcgtcgtgcgggtcagacgctcaccgttaacgtatggggtaggagtgctaaacagattcgtccccggccggcacccccccgaaaagttgctggttagggacgggaggcggtggtgcaccgacgtatttgaacgctttgtcgccgcggagcaaagcgtcgctcttggggaagaagtgagacgctcttattgtcctgcacgaccgggacagcgaagagtgttaattaacctttactgttgcgccgcagaagacgcccggttcataacggaccccggggtgagaaagtgcggcgccctctcactagagctggaacccgcagattgcggccaggataccgctggcgcccctcccggcagaagggagattcgagctgctatgcagtttggtgacacagagatcaaagtgaccgctgtcgacgtcagcaccaatcgctctgtaagagcctctatcgacttcctatcaaattag

SEQ ID NO: 190325 - DNA, 1563 bp, synthetic construct
  misc_feature 1..1563: note = Description of Artificial Sequence: Synthetic coding sequence
  source 1..1563: mol_type = other DNA
atgcccgccctggaggtgttcgcccacgccctgcggttcttccgggaacacgctcttcaggagctcagagagcagagcccaagtctgcctgagaaggatacagtgcgctgggtcttaaccgtcccggcgatctggaagcagcccgccaagcagttcatgcgagaggccgcatacctggccggtcttgtatcccgtgagaatgctgaacagctcctcatcgctctagagccagaagcagcatcggtgtactgcaggaagctaaggctgcaccagctgttggacttatcaggccgagccccaggcggggggcggttaggggagcgacgaagcatcgatagctccttcagacaggcccgagagcagcttcggcgatctcgtcactctcgaactttcctagtggagtccggggtgggcgaattgtgggcagaaatgcaggcaggggataggtacgtcgtcgccgactgtggggggggtactgttgatttgacagtgcatcagctcgagcaaccgcatggcacgctgaaagagttgtacaaagcctctggaggcccgtatggagccgtgggagtcgatctagctttcgagcagttactttgcaggatattcggggaagatttcatcgcaacattcaagagacaaaggccagccgcgtgggtggaccttactatagcgtttgaggctaggaagagaacggctggtcctcaccgggcaggagctctaaatatatctttacccttcagctttattgatttctataggaagcagaggggccacaacgtcgaaactgcgctccggcgttcctccgtcaatttcgtgaaatggagctcccagggaatgctgcggatgtcctgcgaggcaatgaacgaactttttcagcctacggtgtccggcatcatccagcacatcgaggctctgctggcacgtcctgaggtgcagggggtcaaactgctttttctcgtgggcgggttcgccgagtccgctgtgttgcagcacgccgtgcaggctgctttgggcgcccggggcctgagggtcgtggtgccccacgatgtgggattaaccatcttgaaaggagcagtcctattcggccaggcccccggcgtggtcagggtgcggcgctcgccactaacctacggtgtcggggtgctgaatagatttgttcctggaagacatcctccagaaaaactcctggtgcgtgacggtcgccgctggtgcaccgacgtatttgaaaggttcgtcgccgccgagcaaagcgtggccctaggcgaggaggtgcggcgcagttactgccccgcccgccccgggcagagaagggtgctgatcaatctctattgttgtgccgccgaagacgcacgattcatcactgaccctggagtgcgcaaatgtggcgctctgagcctggaactggaacccgccgattgcggccaagataccgcaggtgcacctcctgggcggagggagatccgggctgccatgcaattcggcgataccgaaattaaggtcaccgccgtggatgtgagcacaaaccggtcggtccgagcatcaattgactttcttagcaactag

SEQ ID NO: 190326 - DNA, 2028 bp, synthetic construct
  misc_feature 1..2028: note = Description of Artificial Sequence: Synthetic coding sequence
  source 1..2028: mol_type = other DNA
atggccgacaaggaggccggcggcagcgacggcccccgggagaccgctcccacgtccgcatatagcagtcctgcacgctccctaggagataccggcatcactcctctgtcacctagccatattgtgaatgacactgacagcaacgtgtccgagcagcaatcttttttggtcgtggtcgccgttgacttcggaacgaccagtagtgggtatgcctactctttcacaaaggagccagaatgtatccacgtgatgcgtagatgggaaggaggtgaccctggagtgtccaaccaaaaaactccaactacaattctgctgaccccagagagaaaatttcatagtttcggctatgccgctcgcgacttctatcacgacctagaccccaatgaggccaagcagtggctctaccttgagaagtttaagatgaagctccacacaactggtgatctcaccatggatacagatctgaccgcagccaacggcaagaaagttaaggccctggagattttcgcttacgccctgcaatatttcaaagagcaggcattgaaagagctttccgatcaggcaggctctgaatttgaaaactcagacgtccggtgggtcattacggtccccgccatctggaagcagcccgccaaacaattcatgcgacaggcggcctaccaggcaggcctcgcaagcccagagaatagcgagcagttgatcattgcgctggagcccgaggccgcaagcatttactgtagaaagctgcgactgcaccagatgatcgagctgtcgagcaaagcagctgtcaacggatattcgggatccgataccgtgggtgccggctttactcaggcaaaagaacacataagacgcaaccgccagagccgaacgtttttagtggaaaacgtaatcggtgaaatctggtctgagttagaggaaggcgacaagtacgtggtggttgactctggcggagggacggtggacctgactgtccaccagatccggctgcccgagggccacttgaaagagctgtataaggctaccggggggccatacggatcacttggcgtcgattatgaattcgaaaagctcctgtacaaaatctttggcgaggactttatcgagcagttcaaaattaagagacctgcagcctgggtggacttaatgatcgcgttcgagagcaggaaaagggcagctgccccagatcgcacaaacccattaaatatcactttgccattcagctttatcgattactataaaaagttccgaggtcatagcgtcgagcatgcattgagaaaatccaatgtggattttgttaaatggagctcccaggggatgttgagaatgagccctgatgccatgaatgcactgttcaaaccgaccatcgatagtatcatcgagcaccttagagatttgttccagaagcccgaagtctctaccgttaagtttctgttcttggtgggaggattcgctgaggcacctctcctccaacaagccgtccaagccgcttttggcgatcagtgtcggatcattatccctcaagacgtgggcctcactattctcaaaggcgcagtactgttcggtctcgatccagccgtgattaaggtaagaagaagcccacttacatatggagtgggagtgctcaacaggtacgtggagggtaaacacccccctgagaaactgctcgtgaaagatggcacgagatggtgtacagacgttttcgacaagtttattagtgcagatcagtccgtggccctgggtgaactggtgaagcggtcctacacaccagctaaaccatcacagctggtgattgttataaacatttattccagcgaacatgataacgtgtccttcatcacagatcccggggtgaaaaaatgtggtaccttgcgactggatttaactggcacctctgggacagcagtccccgcaaggcgggaaattcagactttgatgcagtttggcgacaccgaaattaaggctaccgccattgatatagcgaccagcaagtccgtcaaagtaggcatcgacttcctgaactactag

SEQ ID NO: 190327 - DNA, 819 bp, synthetic construct
  misc_feature 1..819: note = Description of Artificial Sequence: Synthetic coding sequence
  source 1..819: mol_type = other DNA
atgcggagcctggacctggccagccagctgctgcggaaccagatcgtgaccgaccccgacaatttgatggaagacgccgcctgggcaaaacattgtgatcagaacttagttgccagcgatgcaccaggagaagagggtacaggtatcctgaagagtaagcgtacacaagccgcagaccaccagccaatcttaaagaccgtcaaagcctccgacgaggactgccagttgagaatttctgatcgcattcgtgagacatccgaccttgaagactcatgggacgaatcctcaggcgcaggctgctcgcagggtaccccctcatacagttcctctcattcgctgttcaggggcgctgtggcaccctgccagagtagtcccatggccagactgggcgtcagtggagaaccctcaccatgtacttccacaaacaggagcactcccggggttgcctcgacaccacagacccccgtgtccagctctcgtgctggtttcgtttccggcggagaccgacctctcacctccgagcccccacccaggtgggccaggaggcgccgcagaagtgtggcccggacaattgcagcggaactcgcagagaaccgaagattggcccgggaactttcaaagcgggaagaagagaaactggaccgccttattgctataggtgaggaggcgtccgcacaacaggacaccgccaatgaattgcggagagatgcagtgatcgcagttcgtaggctggcgaccgccgtcgaggaggccactggggccttccagctgggcttagaaaaactactgcagagactaatctctaacacaaagtcgtag

SEQ ID NO: 190328 - DNA, 1530 bp, synthetic construct
  misc_feature 1..1530: note = Description of Artificial Sequence: Synthetic coding sequence
  source 1..1530: mol_type = other DNA
atggccgccatcggcgtgcacctgggctgcaccagcgcctgcgtggccgtctataaggatggcagagctggggtggtagccaatgatgctggggacagagtgacccccgccgtggtcgcctactccgaaaacgaagagatcgtgggccttgctgccaaacaatctaggataagaaatatcagcaacacagtcatgaaagtcaagcaaatcctgggtagatcctcctctgaccctcaagcccaaaagtacattgcagagtctaaatgtctcgtaattgagaagaatggcaaactccgatacgaaatcgataccggggaggaaactaaattcgtgaaccctgaagacgttgccagactcatcttctcgaagatgaaggaaactgcccactctgtgcttggttccgacgccaacgacgtggtgatcacggtcccctttgattttggagagaaacagaagaatgctctaggtgaagcggcaagggccgccggcttcaacgtgctaagactaatccacgagccttccgccgcccttctggcgtacggcatcgggcaggacagccccactggcaagtctaatatcctcgtgttcaagcttggcggaacaagccttagcctcagcgtcatggaggtgaatagcgggatttaccgtgtcttgagcaccaatactgatgacaatatcggcggggctcacttcacggagaccctggcccagtacctcgcctctgaattccaaaggagctttaaacacgatgttaggggtaacgcccgagccatgatgaagctaactaactccgctgaagtggcaaagcacagtctctccaccctggggagtgccaactgtttcctcgatagtctgtatgagggacaggacttcgattgcaacgtgtccagagccagattcgaactcttatgtagcccattgtttaacaagtgcattgaggctattaggggattgttggatcagaacggcttcactgcagatgacattaacaaagtcgtgctgtgtggtggctccagcaggatccctaagctgcagcagctcattaaagacttgttcccagcggtcgagcttttgaactctatccccccagatgaggtgatcccaatcggtgccgcaattgaggctggaatcctgatcggtaaggagaatctcctggtggaggacagcttgatgatcgaatgtagcgctagggacatattggtcaagggggtggatgaaagtggtgcaagccgcttcacggtgctgttccctagtggcacacctctgccagcccgacggcagcacactctccaggcccccggctctatctcctcagtatgtctcgagctgtacgaatccgatgggaagaacagtgctaaggaagagaccaagtttgcacaggtggtactgcaagacctcgacaagaaggaaaacgggttacgggatatcttggccgtgctgaccatgaagcgcgacggttctctgcacgtgacatgcaccgatcaggagaccggaaaatgtgaagcaatcagcatcgaaatcgccagttag

SEQ ID NO: 190329 - DNA, 432 bp, synthetic construct
  misc_feature 1..432: note = Description of Artificial Sequence: Synthetic coding sequence
  source 1..432: mol_type = other DNA
atggccgccatcggcgtgcacctgggctgcaccagcgcctgcgtggcagtgtacaaggatggcagagccggagtagtcgctaacgacgctggagaccgcgtgacacccgccgtggtagcatattcggagaatgaagagatcgtaggtctcgcagctaagcagtccaggataagaaatatctcaaatacagtcatgaaggtcaaacagatcttagggcgccgtgtactgtctagagacccgcagctgcagcagcttcctcagccctttcagcgatgttcatgtagtctgagtgaacagcctcacgggcagaccgggtgtgttcgcggagcacaacctcttcaccagcatcagccacaacattcatggggatcattgcatactgccgatagttctttacttttcgagtcttggttttgcttctggtggggctag

SEQ ID NO: 190330 - DNA, 387 bp, synthetic construct
  misc_feature 1..387: note = Description of Artificial Sequence: Synthetic coding sequence
  source 1..387: mol_type = other DNA
tgagcctgcgtggccgtgtacaaggacggccgggccggcgtggtggctaacgacgccggcgaccgagtgacccccgctgtggtcgcctactccgagaacgaggaaattgtggggctggccgcgaagcaatccaggatacgaaacatctcgaatacagtcatgaaggtgaagcagatactaggccgcagcagtagcgatcctcaggcccagaagtacatcgcagaaagtaagtgcctggtgattgaaaaaaatggtaagctgcggtatgagatcgatacaggggaggagacaaagttcgttaacccagaagacgtggcgcgtcttattttttccaagatgaaaggtgcatatagtccctggtcccagagcaatagtgaggatggctag

SEQ ID NO: 190331 - DNA, 1926 bp, synthetic construct
  misc_feature 1..1926: note = Description of Artificial Sequence: Synthetic coding sequence
  source 1..1926: mol_type = other DNA
atggccaaggccgccgccatcggcatcgacctgggcaccacctacagctgcgtaggcgtgttccagcatgggaaagtggaaattatcgccaacgaccagggcaaccgaacaaccccaagctacgtagcttttacagacaccgagaggctcattggcgacgccgctaagaaccaggtggctcttaatccccagaatactgtgttcgacgccaagaggttaattggtaggaagtttggagaccccgtggtacagtcagatatgaaacactggcccttccaggtgatcaacgacggggacaaaccaaaggtacaggtgagttacaagggggaaacaaaggctttttacccagaggagataagttcaatggtcctaactaaaatgaaagaaatcgctgaggcctaccttgggtacccagtaacaaacgctgttattaccgtgcctgcatattttaacgactctcaacggcaggccaccaaggacgccggtgtcattgctggtttgaacgtcctccggataatcaacgaacctaccgccgcagccattgcttatggcttggaccgcactgggaaaggtgagaggaatgttttgatctttgatctgggcggcgggaccttcgatgtctccatcctgactatagacgatggaattttcgaggtgaaagccactgcgggcgatacccatctgggcggggaggatttcgacaaccggttagtgaaccattttgtcgaggagttcaaacggaaacataagaaagacatttcacagaataagcgggcggttagacgtctcaggacagcctgtgagcgagccaagcgaactctgtcctcttccacacaggcctcgctggagatcgattctcttttcgagggcatcgacttttacacctccatcactcgcgctcgcttcgaggagttatgttccgacctatttcggtctacacttgagcctgtagaaaaagcgcttagggacgcgaaactcgataaagctcagatacacgacttggtcctcgtagggggctcgaccagaatacccaaagtgcagaagcttttacaggatttcttcaacggccgagatctaaataagagcattaatcctgatgaagccgttgcctacggcgccgccgtccaggccgccatcctgatgggggataaatcagagaacgtgcaggatctgctgctcttggacgttgcccctctgtcacttggactggaaactgcaggaggtgtaatgaccgcactgatcaagaggaattccacgatacctactaagcagacacaaattttcactacatacagcgacaatcagccaggggtactcattcaggtgtatgagggcgaacgtgcaatgactaaagacaataatctgctgggtaggtttgagttatctggcatcccgcctgcgcccagaggtgtaccccaaatcgaggttacgttcgacattgacgctaacggcattctcaatgtgaccgccaccgataagtcaaccgggaaggcaaataaaatcactattacaaatgacaaggggagactttccaaagaagagatcgagcgcatggtccaggaagccgagaagtacaaagctgaggatgaagtccaacgggaaagagtgagcgcgaagaacgcattagagagctatgccttcaatatgaagagcgccgtggaggatgagggcttgaaaggcaagatctccgaggccgacaaaaagaaggtcttggacaagtgtcaggaggtgatctcctggcttgatgccaacaccctggctgagaaggatgagttcgagcacaagaggaaagagttagagcaggtctgcaatcccattatatcaggcctataccagggagctgggggccccgggcccggaggcttcggggctcagggcccaaaggggggatcaggctctggaccaactatcgaggaagtggattag

SEQ ID NO: 190332 - DNA, 1431 bp, synthetic construct
  misc_feature 1..1431: note = Description of Artificial Sequence: Synthetic coding sequence
  source 1..1431: mol_type = other DNA
atggccaaggccgccgccatcggcatcgacctgggcaccacctactcttgcgttggcgtgttccaacacgggaagggtgagaggaacgtactcatcttcgaccttggcgggggaacattcgacgtttcgattttgactattgacgatgggatattcgaggttaaggcaacggctggagacacccacctgggcggagaagatttcgataacaggttggtgaaccacttcgtggaagagttcaagcgcaagcataagaaagatatatcacaaaataagagagctgtccggagactgaggacggcttgcgagagggctaagaggacactgtctagctctacccaggctagcctggagattgatagtctcttcgaaggcattgacttctacacatcaatcacgcgggcacggtttgaggaactgtgctcagatctgttccgcagcacactcgagccagtcgaaaaagcactgcgggacgctaagttggacaaggcccaaatccatgacctcgtgctcgtgggaggatctacacgaattccgaaagtgcagaaactactgcaggacttctttaacggccgcgacctgaacaaatctataaatccagatgaggctgtcgcctacggcgcagcggtccaggcggccattctcatgggagataaatcagagaacgttcaggacttgctgctgctcgacgtggctcctctgagcctgggattggagacagccggtggtgtgatgaccgctctgattaagagaaattcaaccatacccacgaagcaaactcagattttcacaacgtactccgataatcagccaggcgtgctcatccaagtttacgaaggagaacgggccatgacgaaagacaataatctgttggggagattcgagctctccggcatcccgccggcgcctcgtggtgtacctcagatcgaggttacgtttgacatcgacgcgaacggcattctgaacgtaaccgcaacagacaaatcgacagggaaagccaacaaaatcaccatcacaaacgacaaagggagactaagcaaggaggagatagaaagaatggtccaggaagctgagaagtacaaagctgaggacgaggtgcagcgggagcgagtcagtgccaagaatgccctcgagtcttacgctttcaatatgaaaagcgcagttgaagatgagggccttaaaggcaagatttccgaggcagacaaaaaaaaggttctggacaagtgccaagaggtcatttcctggttggacgccaacacacttgccgaaaaagacgagtttgagcacaagcggaaggagttggagcaagtgtgcaatcctattatctcaggcctgtatcagggtgctggcgggccaggacccggcggattcggagcccagggaccgaagggcgggtctggttccggacctacaatcgaggaagtcgactag

SEQ ID NO: 190333 - DNA, 1431 bp, synthetic construct
  misc_feature 1..1431: note = Description of Artificial Sequence: Synthetic coding sequence
  source 1..1431: mol_type = other DNA
atggccaaggccgccgccatcggcatcgacctgggcaccacctactcctgcgtcggggtgttccagcatggaaagggagaaaggaatgtgttaatatttgacctgggcggagggacttttgatgttagcattctgacaatagatgatggaatttttgaagttaaagccactgcaggggatacccacctggggggggaggattttgataaccgcctagtcaatcacttcgttgaagaattcaagcggaaacataagaaggacatttcacagaataagagggcagttaggagactgcgcactgcatgtgaacgggctaagaggactttgagtagctccacccaggccagcctggagatagactccctttttgagggaatcgacttctatacttcaattacgcgcgcccgattcgaggagttatgctcagacctattccgaagtaccctggaacctgtggagaaggccctgcgcgatgccaaactcgacaaggcgcagatccatgacctagtgttggttggaggcagtacccggattcctaaagtacagaaactgctacaggacttcttcaacggccgcgaccttaacaagtccatcaatccagatgaagccgtggcttatggggccgccgtgcaagctgcaatcctcatgggggataaatccgaaaacgtgcaggatctcctgctcctcgatgtggcaccactctcactaggcctcgagaccgcaggtggcgtgatgaccgctttgattaaacgcaactcaaccattcccaccaagcagacgcagatatttacaacgtacagcgacaatcagcctggagtgctcatccaggtgtatgagggtgaacgcgccatgaccaaggataataacctgctgggtcggttcgagctgtctgggatacccccagcacctagaggtgttccccaaatcgaggttacatttgacatagacgccaacggcattttgaacgtaactgccactgacaaaagcactggcaaggccaataaaatcaccatcactaacgataaaggacgattatcgaaggaggaaatcgagaggatggtgcaggaagccgagaaatataaagctgaggatgaggtgcagcgagagagagtcagcgcaaagaacgcccttgaaagctacgcctttaatatgaagagcgccgtcgaagatgagggattgaagggaaaaattagcgaggctgacaagaagaaggtcctcgataaatgtcaggaagttatttcttggctggatgcaaacacgctggcagaaaaagatgagtttgagcacaaaagaaaagagttggaacaggtctgcaacccgatcatctcgggcctgtatcaaggagctggtggccctgggccaggaggttttggagctcagggaccaaaaggcgggtctggcagtggccccacaattgaggaagtagattag

SEQ ID NO: 190334 - DNA, 1926 bp, synthetic construct
  misc_feature 1..1926: note = Description of Artificial Sequence: Synthetic coding sequence
  source 1..1926: mol_type = other DNA
atggccaaggccgccgccatcggcatcgacctgggcaccacctactcctgtgtgggcgtttttcaacatggaaaggtggagattatcgcgaatgaccaaggcaaccgaacgacaccctcttacgtagcctttactgatacggaaagacttatcggagacgccgccaagaaccaggtggcccttaatccccagaacactgtcttcgatgccaagaggcttatcggccgtaagttcggcgaccctgtggtgcagtcagatatgaagcactggccttttcaggttattaatgatggggacaaacccaaagtccaggtgtcctataaaggggataccaaggcgttctaccccgaggagatatccagcatggtgttgacaaagatgaaggagattgccgaagcgtacttgggctatcctgtgacaaatgccgtgattaccgtgccagcctactttaacgattcacagcgacaagcaaccaaggatgctggcgtgatcgcaggactgaacgtgctcagaattatcaatgagccaacagcagcggccattgcctacgggctcgatcgaactggaaagggtgagcgcaacgttcttatattcgatctcggtgggggcacgttcgatgtttcaattttgactatagatgacggcatttttgaggttaaggccactgccggcgacactcatctgggtggagaggatttcgacaaccgactggtcaaccatttcgtggaggagtttaagcggaaacataagaaagacatctctcagaacaagagggctgtgcggagactgcgcacagcctgcgagcgtgccaagcggactttgtcctcctccacccaggcttcccttgagattgacagtctgttcgagggcatcgatttttacacatcaatcacccgtgccaggtttgaggagctctgctccgatctgtttcgatctactcttgaacccgtggagaaagctctgagggacgctaagctggacaaggcgcagatccatgacctcgtgcttgtcggcggttctacacggatccccaaggtccagaaactgctgcaagatttcttcaacgggagagatctcaacaaaagcattaatcctgatgaggcagtggcatacggagccgccgtacaggccgccatcctgatgggagataaaagcgagaatgtccaggatctcctactgctggacgtggctcctctcagcctgggtcttgagacagctggaggcgttatgactgctcttattaagagaaactctacgattcccactaagcagacacagatatttacaacgtatagtgacaatcagccaggcgttctaattcaggtgtatgagggagagcgggcaatgaccaaagataataatctcctcggccgcttcgagctctcgggcatccctcctgctcctcgtggagtcccccagatcgaggttacatttgacatcgacgctaacggaattctgaatgtgaccgccacagataagagcaccgggaaagcaaataagatcacaattaccaacgataaggggcgcctgagtaaggaagaaatagaaagaatggtgcaagaggctgaaaaatataaggccgaagacgaggtgcagagagaacgcgtctcagctaaaaacgctctcgagtcctacgcattcaatatgaagtctgctgtggaagatgagggacttaaagggaagataagtgaagccgataagaagaaagtgctcgacaaatgccaagaagtgatttcgtggcttgatgccaataccctggccgagaaggacgaatttgaacataagcgaaaagaactggaacaggtgtgcaaccctatcatctccggactctaccagggcgctggaggcccaggcccaggaggttttggggctcagggccctaagggtggcagtggctccggccctaccattgaggaggtggattag

SEQ ID NO: 190335 - DNA, 1431 bp, synthetic construct
  misc_feature 1..1431: note = Description of Artificial Sequence: Synthetic coding sequence
  source 1..1431: mol_type = other DNA
atggccaaggccgccgccatcggcatcgacctgggcaccacctactcctgtgttggcgtgtttcaacatggcaaaggggaacgcaacgtgctgatcttcgacttgggaggaggtacattcgacgtaagcattctgactattgatgatgggatctttgaggtaaaggcaacagccggggacacccaccttgggggcgaagattttgacaaccgattggttaatcatttcgtggaggaatttaagagaaaacataaaaaagatatatctcaaaacaagagagccgtgaggaggttgagaaccgcatgcgaacgagccaaaagaacactctcttctagcacccaggcttccctggaaatcgactcgctatttgagggcatagacttctacactagcatcacccgggctcgattcgaggaactgtgctccgatctgttcagatccactctggagcccgtggagaaagcccttagggacgccaagctcgataaggcccagatccacgatctcgtactagtgggagggtcgacacgcattccaaaagtccagaagctactgcaggacttttttaatggaagggatctgaataagagcatcaaccctgacgaggcggtcgcttacggagctgcggtgcaagcggcgattctgatgggggataagagcgaaaatgtccaggacctgcttctcttagacgtggcccctttgagtctcggacttgagacagccggcggtgttatgacggcactgatcaaacggaattccactatcccgacaaaacagacacagattttcactacatacagcgataatcagcccggagtgttaattcaggtgtatgagggtgaacgagcgatgactaaagataacaatctcctcgggcgtttcgagctcagtggcatccccccagcgccgagaggggtgccacagatcgaagtcaccttcgatattgacgcgaatggcatcctgaacgtgacagctaccgacaagagcaccggaaaagccaataaaataacgatcaccaacgataaagggcgactgagtaaggaagaaattgagcgtatggtacaggaagcggagaagtataaggccgaagacgaagtccagcgggaacgcgtgagcgcgaaaaatgccctcgagtcatacgcattcaatatgaagtctgcggtggaagacgaaggattaaagggaaagatctccgaggccgataaaaaaaaggtcctggacaaatgtcaggaggtcatcagctggcttgatgccaatacactggctgagaaagacgaatttgagcataagcgcaaggagctggagcaggtatgtaatcctattatttccgggctttatcagggggctggcggtccaggtccaggtggtttcggcgcccaggggcctaaaggggggtctggttctggccccaccatcgaagaggttgattag

SEQ ID NO: 190336 - DNA, 1926 bp, synthetic construct
  misc_feature 1..1926: note = Description of Artificial Sequence: Synthetic coding sequence
  source 1..1926: mol_type = other DNA
atggccaaggccgccgccatcggcatcgacctgggcaccacctactcatgcgtgggtgtgtttcagcacggaaaggtggagatcatcgcaaatgaccagggcaatcgcaccaccccctcatatgttgcatttaccgatactgagcgcctcatcggtgacgccgcaaagaaccaagtggcactgaaccctcaaaatacggtgttcgatgcgaaacgccttattggcaggaagttcggcgatcctgtagtgcagtcagacatgaagcactggccatttcaggtgataaacgacggcgataagccgaaagtacaagtgagttataaaggcgaaacaaaggcattctatccagaagagatctcatccatggtgctgaccaagatgaaagaaattgccgaggcatacctcggctacccggttaccaatgctgtgattaccgtgcccgcttacttcaacgactcccagagacaagccactaaagacgctggagtgatcgccggtctcaacgtgctgagaatcataaacgagccgactgccgctgcaattgcgtacggccttgacaggacaggtaagggagaacgaaatgttctgatcttcgacttgggcggcggaaccttcgatgttagtatccttactattgacgacggcatctttgaagtgaaggcaacggcaggagacacacatctcgggggcgaagacttcgacaatcgattggttaaccacttcgtagaggaattcaaacgcaaacacaagaaggatatttcccagaacaagcgagcggttcgccggctgagaacggcatgcgagcgcgccaagagaaccctatcctcttccacccaggcatctcttgaaatcgactcgctgttcgaaggcatcgacttttatacttccattactagagctagattcgaggaactctgctctgatttgtttagatccacactcgaaccagtagagaaggccctgcgcgacgccaagctagacaaagcccagatccacgacctggtgctggtaggggggagcacacggatcccaaaagtgcagaaactcctgcaggacttctttaatggcagggacctgaacaagagcatcaatccagacgaggctgttgcatacggtgccgcagttcaggcagctatcctcatgggtgacaaaagcgaaaacgttcaagaccttttgttgttggacgtggctccgctctcactggggctcgagactgccgggggagttatgacggcactgatcaagcggaacagcacaattcctaccaaacaaacccagatttttacaacctactcagataatcagccaggggttcttatccaggtttatgagggggagcgtgccatgactaaggacaataatctcttgggtcgctttgaactctctgggattcctcccgctccccgaggagtgccccaaatagaggtgacatttgacatcgacgccaacggcatcctgaacgttacggctaccgataagtccacaggcaaagccaacaaaattaccatcactaacgacaaagggcgccttagtaaagaagaaatcgaacgcatggttcaagaggctgaaaaatacaaggctgaggatgaagtgcagagggagcgggtatccgctaaaaacgcattggaatcttatgccttcaacatgaagtccgctgtggaggacgaaggcctgaagggaaagatatcagaggcggataaaaaaaaggtgctggacaagtgtcaagaggtaattagttggcttgatgccaacaccctggccgagaaagacgagttcgaacataagaggaaggagctggaacaggtgtgcaatccaattatcagcggcctgtaccagggtgccggaggccccggaccagggggattcggagcgcaaggccctaagggcggatctggaagcggccccacgatagaggaggtggactag

SEQ ID NO: 190337 - DNA, 1926 bp, synthetic construct
  misc_feature 1..1926: note = Description of Artificial Sequence: Synthetic coding sequence
  source 1..1926: mol_type = other DNA
atggccaaggccgccgccatcggcatcgacctgggcaccacctactcttgtgttggtgtatttcagcacgggaaggttgagatcattgccaacgatcagggaaaccgtacaactccttcttacgtggccttcacggacacagagcgtctaatcggcgatgcggcaaaaaaccaagttgccctgaatcctcagaataccgtgttcgacgccaaacgactgatcggccgcaagttcggcgaccccgtagtacagagcgatatgaaacactggccgtttcaggtgattaatgatggagataagccaaaggtccaggtgagctacaagggtgaaaccaaggccttctacccagaggagatctcgtccatggtgcttacgaagatgaaggagatcgctgaagcttacctcggctatcccgtgactaacgccgtgatcacagtcccggcctacttcaatgattcgcagagacaggccacaaaagatgcgggtgtcatagccggcctgaatgtgctcaggatcattaacgagcccaccgctgcagctatcgcttacggattagatcgaaccggaaagggtgaaagaaacgtcctcatttttgatttaggcggaggcacattcgacgtgagtatcctgacgattgacgatgggatctttgaggtcaaggcgacggccggagatacgcacctgggtggggaggattttgacaaccgtttggtgaaccactttgtggaagaattcaagagaaagcataaaaaggacatctctcaaaacaaacgtgctgtgaggagactgagaactgcatgcgagcgtgcaaagaggacgctgagttcttccacacaagcctcactggagatagacagcctcttcgagggtatcgacttttatacctctatcacgagggctaggtttgaagagctttgttctgacctgtttagaagtaccctagagcctgttgaaaaggccctgcgcgatgctaaattagataaagctcaaattcacgacctggtgctggtgggagggtccacacgcatccccaaggtccagaagctgcttcaggacttcttcaacgggagggatttgaacaagagcatcaatcctgacgaggcggtcgcctatggtgcagccgttcaggcagcaattttgatgggcgacaagtcagaaaatgtccaggatcttctgcttcttgacgtggcaccactgagcctcgggctcgagacagcagggggggtaatgacagcgttaattaaaagaaacagtactatacccaccaagcagacacagatattcaccacctactcggataaccagcctggagtgctcattcaggtctatgagggcgaaagggccatgactaaagataataacctgctgggccgattcgagttaagcgggatcccgcctgccccacgaggagtgccacaaatagaagtgacgtttgatatcgacgccaatggtatattgaacgtgactgccacggacaagtcgaccggcaaggctaacaagatcaccataaccaacgacaaagggagactctcgaaggaagaaatcgaaagaatggtgcaagaggccgagaagtataaagccgaggacgaggtccagcgggagagagttagtgccaagaacgctctggagtcctatgctttcaacatgaagagcgccgtcgaagatgaggggctaaaggggaaaatctctgaggccgacaagaagaaagttctggacaaatgtcaggaggtgatctcatggctggatgcaaatacccttgcagaaaaggatgagtttgaacataaaagaaaagagctggagcaggtgtgtaatccaatcataagtgggctctaccagggagcaggtggtcccggccccggtggctttggggcacaggggcccaagggtgggtccgggtcggggcccactatagaagaggtggattag

SEQ ID NO: 190338 - DNA, 699 bp, synthetic construct
  misc_feature 1..699: note = Description of Artificial Sequence: Synthetic coding sequence
  source 1..699: mol_type = other DNA
atggccaaggccgccgccatcggcatcgacctgggcaccacctacagctgcgtgggcgtcttccagcatggaaaggtggaaatcatcgccaacgatcagggcaaccgaacgactccaagttacgttgcattcacagacaccgagaggctaatcggggatgccggcgtgatagcaggactcaatgtgttgcggatcattaacgagcctacagcagccgcaatcgcctacggacttgacagaacggggaaaggggagaggaatgtgcttatctttgatttgggtgggggtaccttcgacgtgtctatcctgaccatcgatgatggaatctttgaggtcaaggccactgccggagacacacacctggggggtgaggacttcgataatcggctagtgaaccacttcgtagaggagtttaaacgaaagcataaaaaggatatctcacagaacaagagggcagtgcgacggctccggaccgcctgtgagcgggcaaagagaacattatcttcatccacacaggcctcgctggagatcgactctctgtttgagggtatagacttctacacctccatcactagggcccgattcgaggaactctgctctgatctgttcagatccacgctggagcccgtcgaaaaggcaccgcctgcaagccccagatgccgcagttgttgccgcaccagcagtaccggagccacctag

SEQ ID NO: 190339 - DNA, 1926 bp, synthetic construct
  misc_feature 1..1926: note = Description of Artificial Sequence: Synthetic coding sequence
  source 1..1926: mol_type = other DNA
atggccaaggccgccgccatcggcatcgacctgggcaccacctacagttgtgtaggcgtgttccaacacggaaaagttgagattatcgctaacgatcaggggaacaggacaaccccatcctacgtcgcatttaccgatacagagagactaatcggggatgctgctaaaaaccaggttgcgttgaatcctcagaatacagtatttgatgcgaagagactgatcggacggaagtttggtgaccccgtcgttcagagcgacatgaagcactggcccttccaggtaatcaacgatggagacaagcccaaggttcaggttagctataagggcgagacaaaagccttttaccccgaggagatttcttctatggtgctcactaagatgaaggagattgcggaagcgtatctggggtatccagtgaccaacgcagttatcactgtacctgcttacttcaacgactcgcaacggcaggctactaaggacgccggtgtgatagctggtctgaatgtgctgcggatcatcaacgagcccacagccgctgccattgcttacggtctggacaggaccggcaagggagagcggaacgtgctcatattcgatttgggaggagggacctttgatgtatccattcttacgatagacgatggcatcttcgaagttaaagctactgcaggggacactcaccttgggggcgaagactttgataaccgcttagttaatcatttcgtggaggagttcaagcggaaacataagaaagatatctcccaaaacaagagagctgtccggagactgcgtaccgcctgcgaaagagccaaacggacactgtcctccagcactcaggcctccctagaaattgacagtctgtttgagggcatcgatttctacacctccattacccgcgcccgcttcgaggaactgtgctccgatctctttcgctccaccctggaacccgtggaaaaggcgttgagagacgcaaagctggacaaggctcagattcatgatctggtgctggtaggaggcagtactcgaattccgaaagtgcagaagttgctgcaggacttctttaatggtcgggacttgaacaagtctatcaatccggatgaggccgtggcttacggcgctgcagtccaggccgccatccttatgggagacaaatcagaaaatgtccaggatctcctgctgcttgacgttgctcccctctccctcggccttgaaacagccggcggggtaatgacagctctgattaaacggaattccacaatccccaccaagcagacccagatcttcacaacatattctgacaatcaaccgggggtgctcatccaggtatacgaaggagagagagccatgacgaaggataacaacttgcttggacgcttcgaactatctggcataccaccggcgccccggggcgtgcctcagattgaggtgaccttcgacatcgacgcaaatggcatcctgaacgtgaccgcaaccgacaagtcaacagggaaggccaataagatcacgattacaaacgacaaaggacgtcttagcaaggaggagattgagagaatggtgcaggaggccgagaaatacaaagccgaggacgaagttcagcgcgagagggtgtcagccaaaaacgctctggagagctatgcttttaatatgaaaagtgcagtggaagacgaaggcctgaaaggcaagattagtgaggccgacaagaaaaaagtactagataagtgtcaggaagtgatcagttggctggacgcaaataccctagctgagaaggatgaattcgaacacaagcggaaagagttggaacaggtgtgtaacccgattatttcaggcctctaccaaggagccgggggacctgggcctggtggatttggcgctcagggcccaaaaggaggctctggcagcgggccgactatcgaagaagtggactag

SEQ ID NO: 190340 - DNA, 1431 bp, synthetic construct
  misc_feature 1..1431: note = Description of Artificial Sequence: Synthetic coding sequence
  source 1..1431: mol_type = other DNA
atggccaaggccgccgccatcggcatcgacctgggcaccacctactcctgtgttggcgtgtttcagcatgggaagggcgagaggaatgtgctgatctttgacctgggaggcggcacgtttgacgtgtccatcctcacaattgatgacggtatcttcgaggtgaaagccactgccggagacacacatctgggcggagaggactttgataaccggctggtgaatcactttgtcgaggaattcaagagaaagcataagaaggatatcagccagaataaacgggctgtgcggcggttgcgcaccgcttgtgagcgggcaaagagaactctgtccagcagcacccaggccagccttgagatcgactcgctgttcgaaggcatagacttttatacttccataaccagagctaggtttgaagagttatgttccgacttgttccgtagcacgctggaaccagttgaaaaagccttgcgagacgccaagcttgacaaggctcagatacacgatctggtactggttgggggttcaactcgaattcccaaagtacagaagttgctccaggacttcttcaacggaagggacctgaataaatccattaacccagacgaggccgtcgcctacggcgcggctgtacaggccgccatactcatgggcgacaagagcgagaatgtgcaggaccttctgctgttagacgttgctcccctaagcttgggcctggagacagctggtggtgttatgacagctctcattaaacgtaatagtactattccgacgaagcagacccagatatttacaacatattccgacaaccagccaggggtcctcatacaggtctatgagggggagcgggccatgaccaaagacaacaaccttctggggaggttcgaattatctggcatccctcctgcacccaggggcgttccccagattgaagtaacgttcgacattgacgccaatgggatcctcaatgttacggccaccgacaaatctaccgggaaagcaaacaagattacaatcacaaacgataagggcaggctgtcaaaggaggaaatcgaacgcatggtacaagaggcggagaagtataaagcagaggatgaagtgcaacgagagagagtgtctgcaaagaacgctctcgaatcatatgcgttcaatatgaagtctgcggtcgaagatgaaggtctgaagggcaagatctcagaggcagacaaaaagaaggttttggataagtgccaggaagtgatctcctggctcgatgccaatacactcgctgagaaagacgagttcgagcataagcggaaggagctcgagcaggtgtgtaacccgattataagcggactttaccagggcgccggcggtcccggcccaggcggctttggtgctcagggtccaaaaggtggatctggaagcggcccaaccatagaggaggtagactag

SEQ ID NO: 190341 - DNA, 1431 bp, synthetic construct
  misc_feature 1..1431: note = Description of Artificial Sequence: Synthetic coding sequence
  source 1..1431: mol_type = other DNA
atggccaaggccgccgccatcggcatcgacctgggcaccacctacagttgtgtaggggtcttccaacatggcaagggcgagcggaacgtgctgattttcgacctcgggggcggaacgttcgacgtttctatcctgacaatcgatgacggcatcttcgaggtgaaggcaaccgctggcgatacccacttgggcggcgaggacttcgataacagactcgtgaaccactttgtggaggagtttaaacgaaaacacaagaaggacatttctcaaaacaagcgtgccgtgcggcgcctgcggacggcctgtgagcgcgccaaacgcaccctaagtagcagcacacaggccagtttggaaatcgattcgctgtttgagggtattgacttctatacctctatcactagagcgcggttcgaggagctgtgctccgatttgtttagaagcactctcgagccagtggagaaggcattgagagatgcaaaactggataaagctcagattcatgacctagtgctcgtcggtggttccaccagaatcccaaaggtgcagaagctcctgcaggatttttttaacggaagagacctcaacaaaagtattaatcctgacgaagctgtggcttacggcgcggccgtacaggcggctatcctgatgggggataaaagtgaaaacgtacaggatcttttgctgctcgatgtggcccctctgagtctgggcctggagactgcaggcggcgtgatgaccgccctcattaaacggaattcaacaatccctaccaaacaaacccagattttcactacctatagtgacaatcagccaggagtcttgattcaggtgtacgagggcgagagagcaatgactaaggacaacaacctgctgggccggtttgaactcagcggcataccaccagcacctaggggagttccccagatcgaagtgacgtttgatatcgacgcaaacgggatcttgaacgtgacggccaccgataagtcaaccggaaaagccaacaagatcactattacaaacgacaagggcaggctctcaaaagaagaaatagagcggatggtacaggaggctgaaaaatacaaagccgaggacgaggtccagcgagaacgcgtttctgctaagaatgccctggaaagctacgcattcaatatgaagtcagcggtggaggacgaaggcctgaagggtaaaatttccgaggccgacaaaaagaaagtgttagataaatgccaggaagtgatcagttggctcgatgcaaatacattagcagaaaaggacgagttcgaacacaagaggaaagagctagagcaggtgtgcaatcccatcatatcgggactgtaccagggtgccggcggtcctggccccggaggtttcggcgcgcaggggcccaagggaggcagtgggagcggcccaaccatagaagaggtggattag

SEQ ID NO: 190342 - DNA, 1653 bp, synthetic construct
  misc_feature 1..1653: note = Description of Artificial Sequence: Synthetic coding sequence
  source 1..1653: mol_type = other DNA
atggccaaggccgccgccatcggcatcgacctgggcaccacctactcgtgcgtcggagtcttccagcatgggaaggtccagatttcctccatggtgctcacaaaaatgaaagagattgctgaagcttacttgggctaccctgttacaaatgccgtgattaccgtaccggcgtacttcaatgacagccagcggcaggcaacgaaagatgctggagtgatcgccgggcttaacgtactgagaatcatcaatgagccaactgccgcagcaatagcgtatgggcttgaccgaaccggcaaaggtgaaaggaatgtcttaatttttgacctcggcggtggaacctttgacgtcagcatcctgaccattgatgacggcatatttgaggtgaaagctacagccggggacacccatctaggtggtgaggattttgataatcgcctcgtaaaccacttcgtggaggagtttaagcgtaagcacaaaaaagacattagtcagaataagagggctgtgagacggcttcgcactgcgtgcgagagagcgaaacgcacccttagtagttccactcaggctagcctggaaattgatagcttgtttgaaggaattgacttctacacgtctatcactagagcccgtttcgaggagctgtgctcagacctgtttaggtccaccttggaaccagtggagaaggctttacgcgacgctaagctggacaaagcccaaatccatgacctcgtacttgtgggaggatctactcggattcccaaagtccagaagctcctgcaggacttcttcaatgggagagacctgaacaaatcaattaatcccgacgaggcggtcgcttacggcgcagccgtccaggctgccattctgatgggggacaaatctgagaatgtgcaggatctgttgctattggacgttgcacccctgagcctgggcctagaaactgctggcggggttatgaccgcactgattaaacggaactccaccatcccaacaaagcagacacaaatctttaccacatactctgataatcaacccggggtgcttattcaggtgtatgaaggagaacgcgctatgacaaaggacaataaccttctaggcaggtttgaactcagcggcattccccccgcgccgagaggagttccacagatagaagtaaccttcgacattgatgctaatggaattctgaatgttactgctaccgacaagtccactggaaaagctaataaaatcaccatcacgaatgacaaaggccgattaagtaaggaggagattgaaagaatggtccaggaggcagaaaaatacaaagccgaagacgaggtacaacgcgaaagggtgagcgctaagaacgcactggaatcttacgcatttaatatgaaatcggctgtggaagacgaggggttgaagggaaagataagtgaggccgacaagaaaaaagtcctggacaagtgtcaggaagtgatcagctggctggacgccaacactctggctgaaaaagatgaattcgaacataagaggaaggagttggagcaggtgtgcaaccctataatcagtggcctgtatcaaggggcaggtgggcctggtccgggcggatttggagcccagggcccaaaggggggatctggatccggaccaaccattgaggaggttgactag

SEQ ID NO: 190343 - DNA, 1872 bp, synthetic construct
  misc_feature 1..1872: note = Description of Artificial Sequence: Synthetic coding sequence
  source 1..1872: mol_type = other DNA
atggccaaggccgccgccatcggcatcgacctgggcaccacctactcttgcgtcggcgtattccagcatgggaaagtggaaatcatagccaatgaccagggaaatagaaccactccaagctacgtcgcattcacggacaccgagcgcctgatcggtgatgcagcgaaaaaccaggtggccttaaatccggtagtgcaatctgatatgaaacattggccatttcaagtgataaatgacggtgacaaaccaaaagtacaggtgtcctataagggggaaaccaaagcattctacccggaagaaatttcttccatggtgctcaccaagatgaaagagatcgcagaggcatatttgggctaccctgtgactaatgccgtgattactgtgccagcatatttcaacgactctcagagacaagccaccaaggacgccggagtcatcgccggcctgaacgttctgcggataatcaacgagcccactgctgccgcaattgcgtacggcttggatcgaacaggaaagggtgaacggaacgtgcttattttcgatcttggaggggggacttttgatgtttccattctgacaattgacgatggcatcttcgaggtaaaagcgaccgccggtgatactcatctgggcggagaggacttcgacaaccgactcgtgaatcatttcgtggaggaattcaagcgtaaacacaagaaggatatctcccagaacaagcgagcagtacgcaggctcagaaccgcttgcgagcgggccaaacgcacgttaagcagttccacacaagctagcttggaaatcgactccctgttcgaggggatagatttttacactagtattactcgcgcacgcttcgaagagctctgctccgacttattccgctctaccctagagccggtggaaaaagccttgagggatgccaaactggataaagcacagatccacgatctagttcttgttggggggtcgacacgcatccctaaagtacagaaactactacaggatttttttaatggccgagatctgaataaaagcataaatcccgacgaggcagtcgcgtatggggcggcggtgcaggcggccatccttatgggcgataagagcgagaacgtccaggatctgttactacttgacgtggctccactgagcttagggctggagaccgctggaggggtgatgactgcgcttataaaaaggaatagcacaatccccacaaagcaaactcaaattttcaccacctactcagacaatcaacccggcgtcttgatccaggtgtacgagggtgaaagggcaatgaccaaagacaacaatctcctgggacgttttgaactctccggcattccaccggcccccagaggtgttccacagattgaggttacgtttgatattgatgcaaatggcatcctaaacgtcactgccaccgataaatccacgggaaaggctaataagatcacgatcaccaacgacaaaggccgacttagcaaggaagagattgagcgaatggtccaggaggccgagaaatacaaagctgaagatgaggtgcagcgcgaaagggtctccgcaaagaatgctttggaatcctatgcatttaatatgaaatccgctgtcgaagatgagggactgaaaggcaagatttctgaggcagacaagaaaaaagtgctcgataaatgccaagaggtcatatcctggcttgatgctaacaccttggccgagaaagacgaatttgagcacaagcggaaggaactcgaacaggtttgcaaccctataatttcaggactctatcagggcgcaggcgggcctggtcccggagggttcggtgcccagggaccgaagggaggctctggtagcggtccaacaatcgaagaagtggattag

SEQ ID NO: 190344 - DNA, 1653 bp, synthetic construct
  misc_feature 1..1653: note = Description of Artificial Sequence: Synthetic coding sequence
  source 1..1653: mol_type = other DNA
atggccaaggccgccgccatcggcatcgacctgggcaccacctactcttgcgttggtgttttccagcacggcaaagtgcagatctcatctatggtgttaacaaagatgaaggagatagccgaggcctatcttggataccccgtgaccaatgcagtcatcacagtgcccgcatatttcaatgactcccaacggcaggccaccaaagacgctggtgttattgccgggttaaatgtgctgaggattataaatgagccaacagcagctgcaattgcttacggcctggacagaacaggcaaaggtgaacggaacgtcttaattttcgacctgggcggcggcacatttgacgtctctatcttaaccattgatgacggaatatttgaggtcaaagctactgcgggcgacacccatcttggaggtgaggacttcgataataggctggtcaatcatttcgtggaagagttcaagcgtaagcataaaaaagatatctcacagaacaaaagggccgtgcgacgcttgcgcaccgcctgcgaaagagctaaaaggacactcagctctagcacccaggcctccttggagatcgatagtcttttcgaaggcattgatttctacacatctattacgcgggcaagatttgaagaactgtgctcggacctcttcagaagtaccctcgaaccagttgagaaggcactccgagacgctaaactagacaaggcccaaatccacgacctggtcctggtcggggggtccaccaggatacccaaggtgcaaaaactgctccaggacttttttaacggtcgtgatctcaataagtccataaaccccgacgaggctgttgcttacggggccgctgtgcaggcagcaatactgatgggggacaagtctgagaacgtgcaggacctgctcctgttggatgtcgcccctctatcactcggactggagactgcagggggggtcatgaccgccctgatcaagaggaactctaccatccccactaagcagacccaaatattcactacttactccgacaaccagccaggagttttgatccaggtgtacgaaggtgaaagagctatgactaaggataacaacctgttaggccggtttgaactctcaggcatacctcccgccccccgaggtgtgcctcaaatcgaagtcacattcgatatagacgctaatggaatactgaacgtcaccgccactgacaaaagcacaggaaaggctaacaaaatcaccattaccaatgacaagggaaggctgtccaaggaagagatcgagcgtatggtgcaggaagctgaaaagtacaaggccgaagatgaggtccaaagggaaagggtctccgcaaaaaacgcgctggagtcctatgcattcaacatgaaaagcgctgtcgaggatgaaggacttaagggcaagatcagcgaagccgataaaaagaaggtgctcgataagtgccaagaggtgattagctggcttgatgcgaacacactcgcagaaaaggatgagttcgagcataagagaaaggagctcgagcaggtgtgcaatcccattatctctggcctataccagggcgcaggcgggcccggaccgggcggattcggagctcaggggcctaaaggaggctccgggtctggaccaaccattgaagaggtggactag

SEQ ID NO: 190345 - DNA, 1653 bp, synthetic construct
  misc_feature 1..1653: note = Description of Artificial Sequence: Synthetic coding sequence
  source 1..1653: mol_type = other DNA
atggccaaggccgccgccatcggcatcgacctgggcaccacctactcatgtgtgggagtcttccagcatggcaaggtccagatcagtagtatggttcttacaaaaatgaaagagatcgctgaggcttatctggggtacccagtaaccaacgccgtcatcacggtcccggcctacttcaacgatagccagaggcaggcgaccaaggacgcaggagtgattgccggtctgaatgtgctcaggatcataaatgaaccaactgctgcagccattgcctatggcctggacaggaccgggaaaggggaaagaaacgttttgatcttcgaccttggcgggggcacatttgatgtgagtatcttgaccattgatgatggtatctttgaggtcaaggccactgcgggtgatactcacctaggaggggaggacttcgacaatagactggtcaaccattttgtggaggagtttaagcggaagcacaaaaaggacatcagccaaaataaacgcgccgtgcgcaggcttcggacagcttgcgaacgagctaagcggactctctcctcctccacccaggcctccctcgagatcgactcactgtttgagggcatcgacttctacacttccataacgcgcgcccggtttgaagagttatgcagcgacctcttccgcagcaccttggagcccgtcgaaaaagctctgagagatgccaagctcgacaaggcgcagatacatgaccttgtgttagtcggcgggtcaactcggattccaaaggtgcaaaagttgctgcaggacttcttcaacgggcgggacctgaacaagtcgatcaaccctgacgaagcggttgcttatggagctgctgtccaagcggcaatcttgatgggtgataagtctgagaacgtgcaagaccttctcctcctggatgtggcacccttgtcgctagggctggagacagcgggaggcgtgatgaccgctctgattaagaggaactctacgatccccacaaaacagacccagatcttcactacgtatagtgacaaccagcccggcgtgcttatccaggtctatgaaggtgaaagggccatgacaaaggacaataacctgctcggaaggttcgagctttccggaatcccgcccgcaccccgcggcgtgcctcaaatagaggtgacatttgacatagacgctaacgggatcctgaacgtaacagccactgacaagtccaccgggaaggcgaacaagattactatcaccaacgataaaggaaggctgtccaaggaggaaatcgagcgaatggtgcaggaggctgaaaagtacaaggctgaggacgaagtgcagagggagcgggtgtctgctaaaaatgctttggagtcctacgccttcaatatgaaatctgctgttgaagacgagggcctgaaagggaagattagcgaagctgataaaaagaaggtcctggataagtgtcaggaggtcatttcttggctggatgccaatacattggctgagaaggatgagtttgaacataagaggaaggagttagaacaggtttgcaacccaatcatcagtggtctctaccagggggcgggtgggcctggtccagggggcttcggtgcccaaggcccaaagggcggctctggatctggaccaaccatcgaggaagtggattag

SEQ ID NO: 190346 - DNA, 1653 bp, synthetic construct
  misc_feature 1..1653: note = Description of Artificial Sequence: Synthetic coding sequence
  source 1..1653: mol_type = other DNA
atggccaaggccgccgccatcggcatcgacctgggcaccacctactcttgtgtcggagtcttccagcatggaaaagtccagattagttccatggtgctaaccaaaatgaaagagatcgccgaagcataccttggttacccagtgaccaacgctgtgatcaccgttcctgcctattttaatgatagccaaaggcaggctaccaaggatgcaggtgtgatcgctggcttgaatgtgttacggatcattaacgagccgaccgccgccgcaatcgcatacgggctggaccggaccgggaagggcgaacggaacgtcctgatcttcgacctgggagggggcacgtttgacgtttcaattctcactattgacgatggcattttcgaagtgaaggccactgccggagacactcacctcggtggagaggactttgacaatcgccttgtcaatcattttgttgaggaattcaagaggaaacacaaaaaggatatcagccagaataagcgagcggtccgcagattgcggactgcatgtgagagggcaaagagaacactctcatctagcacccaggcatcccttgagattgactctctgttcgagggaattgacttctacactagcatcacccgcgcccgcttcgaggaactctgttccgatctcttccgttctaccctggaaccagtcgaaaaggccctacgggatgcaaagttagacaaagcccagattcatgatctggtgttggtcgggggatccacgcgcattcctaaggtccagaagctcctgcaggattttttcaacggccgcgatcttaataaatccataaaccccgatgaggccgtcgcatatggagccgcagttcaagccgctatccttatgggggataagtccgaaaatgtgcaggacctcctgcttctggatgttgcccctctgagcttggggttggaaaccgcgggtggcgtcatgactgcgttaataaagcggaacagtacaattccgacaaaacaaacccagattttcactacttactccgacaaccagccgggcgtgctcatccaggtgtacgagggtgagcgggctatgactaaggataacaacttactgggccgatttgagctgtcaggcattccgccagcgcctcggggtgtgccacagatcgaggtgaccttcgatatcgatgccaatggtattctcaatgtgactgccacagacaagtcaacaggcaaggctaataagatcaccatcaccaatgacaaaggacggctatctaaggaagaaattgaaaggatggtgcaggaagcagagaagtataaggctgaggacgaggtccaaagagagcgtgtttctgccaaaaatgccctcgaatcctacgcctttaatatgaaaagtgccgtggaggatgagggcctcaagggcaagatttccgaggctgacaagaagaaggtacttgacaaatgccaagaagtaattagctggctggacgccaacacactcgcagagaaagacgagtttgagcacaagaggaaggagttagagcaggtgtgcaatcctatcatatcgggcctctatcaaggagcgggcggtcccggtcccggaggtttcggagcccaaggtcccaagggaggaagcgggtctgggcccacaatagaagaggtcgattag

SEQ ID NO: 190347 - DNA, 699 bp, synthetic construct
  misc_feature 1..699: note = Description of Artificial Sequence: Synthetic coding sequence
  source 1..699: mol_type = other DNA
atggccaaggccgccgccatcggcatcgacctgggcaccacctacagctgtgtgggggtatttcagcacggaaaggttgaaatcatcgctaatgatcaggggaaccggacaaccccctcttacgttgcatttaccgacacggagcgcctaattggcgacgccggggtgatcgctgggctgaatgtgttgaggattattaatgagccgaccgctgcagccatcgcgtacggcctggacagaactggcaagggtgagagaaatgtccttatcttcgacttggggggcggtacctttgatgtctctatcctgactatagatgacggcatctttgaggtgaaggctacagcgggcgacacccaccttgggggagaagatttcgacaaccgactggtgaatcactttgtagaggagtttaagcgcaaacataagaaagatattagccagaataagcgggctgtgcgtagactgagaaccgcttgtgagcgggcaaaaagaaccctgtcttccagcacacaggcatccctggagatagatagcctgttcgaaggtatcgacttctatacatctattacaagagctcgtttcgaagaattatgcagcgacctgtttcgctcaaccctcgaacccgtggaaaaggcacctcccgctagtcctcgctgcagatcgtgctgtcggacctcgtcaacaggcgcaacctag

SEQ ID NO: 190348 - DNA, 1653 bp, synthetic construct
  misc_feature 1..1653: note = Description of Artificial Sequence: Synthetic coding sequence
  source 1..1653: mol_type = other DNA
atggccaaggccgccgccatcggcatcgacctgggcaccacctacagttgtgtgggcgtcttccagcacggcaaggtgcagattagcagcatggtgctcacaaagatgaaagagatcgctgaggcttatttagggtacccagtgactaatgcggtgattactgttccagcttactttaatgacagccagaggcaagcaactaaagatgcaggagtaatcgccggacttaacgtactgcgtattatcaacgagccgacggcagcagcaattgcctacggtctggacaggacgggcaaaggagagaggaacgtgctgatcttcgaccttggcggcggaacatttgatgtgagcatacttaccatcgatgacggaatcttcgaggtcaaggctacagccggagacacgcacctgggtggcgaggatttcgacaacaggctggtgaaccatttcgtggaagaatttaagaggaagcataaaaaggacatctcccagaacaaaagggcggtgcgtaggttgcgcactgcttgtgaaagggccaagcggaccctgtccagttccactcaggcttctctggagatcgactctctgttcgagggcattgacttttacaccagcataacccgcgctaggttcgaggaactctgctccgatctttttagatctactttggagccagttgaaaaggctctgcgagatgcgaaactggacaaggcccagatccatgatttggtcttggtgggaggaagtacacgcattccaaaggtccagaaactactccaggactttttcaacggacgcgacttgaataaaagcatcaaccccgacgaggcagtagcgtatggagccgcagtccaagcagccattctcatgggagataagagcgagaacgtccaggatcttcttctcctggatgttgcacctctgtcactaggcctggagacggctggtggtgtaatgaccgctcttattaagagaaatagcactatccctaccaagcaaacacagatctttacaacatactccgataaccagccgggtgtgctgattcaagtatatgagggtgaaagggccatgaccaaagacaacaacctgctgggcaggttcgagctgtccggcattccgcccgccccaagaggcgtgcctcagatcgaggttactttcgacattgatgccaacgggatcctcaacgtcaccgctacggacaagtccacaggcaaggctaataagataaccattacaaacgacaaggggagactgagcaaggaggaaattgaaagaatggtccaggaggccgaaaagtacaaggccgaggatgaggtccaacgggaacgagtcagcgccaagaatgcactggagtcgtacgcctttaatatgaaatccgccgttgaagatgaggggttgaaaggaaagatctcagaagcagacaaaaagaaagtcttggacaaatgccaggaggtcatctcttggctggatgccaacaccttggctgaaaaggacgagttcgagcacaagcgcaaagagctcgagcaggtgtgtaatccaattatttcaggtctctaccagggagctggcgggcccggccctggagggtttggagcccagggacccaagggaggctcgggaagcgggccgaccatcgaagaggtggactag

SEQ ID NO: 190349 - DNA, 699 bp, synthetic construct
  misc_feature 1..699: note = Description of Artificial Sequence: Synthetic coding sequence
  source 1..699: mol_type = other DNA
atggccaaggccgccgccatcggcatcgacctgggcaccacctacagctgtgtgggtgtgtttcagcacggaaaagtggagatcatcgcgaacgatcagggaaatcgaaccacgcctagttatgtggccttcactgatactgaaaggctgatcggtgatgcaggggttatcgctggcctgaatgtgcttagaattattaacgaaccgactgccgctgcaattgcctacggtctggatcggacaggcaaaggcgagcggaacgtcctcattttcgacctcgggggaggaactttcgacgtctccatcctcaccattgacgacggcatatttgaagtgaaagctacagctggagacacacatctcgggggcgaggatttcgacaatcggctggtgaatcatttcgtagaggaattcaagcggaagcacaaaaaagatatctctcagaataaaagagcggtgagaagactacgaacagcctgtgaaagggcaaaacgcaccttatcgtcatcaacacaggcgagcctagagatagactctttgttcgagggaatcgatttttatacgtccatcacacgggcgcggttcgaggagttgtgcagtgacttatttagatctactctcgagcctgtcgagaaagctcccccagcttctcctagatgccgttcttgctgccggacatctagtacaggagctacatag

SEQ ID NO: 190350 - DNA, 699 bp, synthetic construct
  misc_feature 1..699: note = Description of Artificial Sequence: Synthetic coding sequence
  source 1..699: mol_type = other DNA
atggccaaggccgccgccatcggcatcgacctgggcaccacctactcctgcgtcggggttttccaacacggaaaagtcgagatcatcgccaatgatcagggcaaccgaactactccctcgtacgttgcctttacagacactgaaaggctcatcggagacgcgggggtgattgctggactcaatgtgctcaggatcatcaacgaacccaccgcagccgctattgcgtacggcctggacagaaccggtaagggggagagaaatgtgcttatcttcgacctgggcggaggaacatttgatgtctctattctgaccatagacgacggcatatttgaggttaaggcaacagccggagatacacacctgggcggcgaggattttgacaatcggctggtgaaccactttgttgaagagtttaagcgcaaacataaaaaagatatctctcagaacaagcgcgctgtgaggcgactgcggaccgcgtgtgagagggccaaacggacgttatcaagctctacacaggcttccctggaaattgactcgctctttgaaggtatcgatttttacacaagcatcactagggcccgatttgaggaactctgcagcgacctttttcgatctacactggaaccagtggaaaaggcacctcccgcctcccctcgttgtcggagctgctgtcgaacatcctctacaggcgctacctag

SEQ ID NO: 190351 - DNA, 699 bp, synthetic construct
  misc_feature 1..699: note = Description of Artificial Sequence: Synthetic coding sequence
  source 1..699: mol_type = other DNA
atggccaaggccgccgccatcggcatcgacctgggcaccacctacagctgtgtaggggtatttcagcatgggaaagtagaaatcatcgctaacgaccaagggaatcgaacaacaccgtcctacgtggcattcactgataccgagcggctcatcggcgacgccggagtgattgctggactcaacgttttaagaatcattaacgagccaactgccgccgccatcgcctatgggttagacagaaccggaaaaggcgagagaaatgtgctcattttcgatctggggggcggcaccttcgacgtttctattcttaccattgatgatggcatatttgaagttaaagctacggcaggcgacactcacctcggaggggaggattttgataaccgactggtgaaccacttcgttgaggaatttaagcggaaacataagaaggacatttctcagaataagagggcagtgcgtcggctgaggaccgcctgtgagagggccaagagaacactcagttccagcacacaggctagtctagaaatcgactcattgttcgaaggcatagacttttatacatcaataactagagctaggtttgaggagttgtgttccgacctgtttagatctacgcttgaaccggtggaaaaggccccccctgcgtctccacgctgtaggagttgctgccgcacatccagtaccggagctacctag

SEQ ID NO: 190352 - DNA, 1926 bp, synthetic construct
  misc_feature 1..1926: note = Description of Artificial Sequence: Synthetic coding sequence
  source 1..1926: mol_type = other DNA
atggccaaggccgccgccatcggcatcgacctgggcaccacctacagctgcgtcggagtgttccagcatggtaaagtggaaatcatcgccaatgatcagggtaaccgcacaactccttcatacgtcgcctttaccgacactgagagactcatcggggacgccgccaagaatcaagtcgcgctgaatcctcagaacaccgtcttcgatgctaaacgcctgattggtcggaaatttggagacccagtggtgcaatctgatatgaagcactggcctttccaggtcatcaatgatggtgacaaacctaaagtgcaggtgtcctataagggagagactaaggccttctatcccgaggagatctcatcaatggtcctgacaaaaatgaaagagattgccgaagcctacctcgggtacccggtaacaaacgccgtcattactgtgcccgcgtatttcaacgacagtcagcggcaggcaacaaaggacgccggggtgatcgctggtcttaacgttcttcggattatcaatgagcctaccgcggcagccatcgcctacggtctggatagaaccgggaaaggcgaaagaaacgtcctcatcttcgacctcggaggcggcaccttcgacgtgagcatactcacaatcgacgatgggatcttcgaggtaaaagctactgcgggggatacacatttgggaggggaggatttcgataacaggctggttaatcacttcgtggaggaattcaaaagaaagcacaagaaagacatctctcagaataagagggcagtgcgacgcctgcggaccgcctgcgaacgagcaaagcgcacactttccagcagcacccaggcttctctagaaattgattccttgtttgagggcatcgacttctataccagcatcacgcgggcccgctttgaggagctctgctccgacctctttcgatcaacactcgaacccgtagagaaggccctgagggacgctaagctggacaaagcccagatccacgacctcgtgctggtcgggggctctactcgcatcccgaaggttcaaaagctgctgcaggacttcttcaacggccgtgatcttaataagtcaatcaatcctgatgaagccgttgcttatggggctgctgttcaggccgccattctcatgggtgacaaatccgagaatgtgcaggatctgctgttgctggacgtggccccattgagtctcggactggagacagctggaggcgtaatgactgccctaataaagaggaattccacaataccaactaagcaaacacaaatctttaccacatacagtgacaatcagccaggcgttctgatccaagtgtacgagggggaacgggcaatgacaaaggataataatttgttaggccgctttgagctcagcggcatccccccggcccctaggggagtgccacagattgaagtaacatttgatattgacgcaaatgggattctgaacgttactgccaccgacaagtctacaggaaaggcaaacaaaatcaccattactaacgataaggggcggctgtccaaggaggaaattgaaagaatggttcaggaagctgagaagtataaggccgaagatgaagtccaaagggagagagtgtctgctaaaaatgcgttagaatcgtatgcgttcaatatgaaatccgcagtggaggatgaggggttgaagggcaaaattagcgaggcagataagaagaaggtactggacaagtgccaggaggttatctcatggctggacgccaatacgctagctgagaaggatgaattcgaacataagcggaaagaactggaacaggtatgtaatcccatcatcagtggtctctatcagggcgccggtggtcctgggcccggaggcttcggagcccaagggcctaaaggcggttctggctcagggccgaccatagaagaggtggattag

SEQ ID NO: 190353 - DNA, 1926 bp, synthetic construct
  misc_feature 1..1926: note = Description of Artificial Sequence: Synthetic coding sequence
  source 1..1926: mol_type = other DNA
atggccaaggccgccgccatcggcatcgacctgggcaccacctacagttgcgtaggggtgtttcagcatgggaaagtggaaatcatagcaaacgaccagggcaatcgcactaccccatcctacgtggcattcacagataccgaaagattaataggtgacgccgcaaagaaccaggttgcgctcaacccccagaatacagtgtttgacgccaagcgacttattggaaggaagtttggcgacccagtggtgcagagcgatatgaaacactggccttttcaggtgataaatgacggagataagcccaaggtacaggtatcgtacaagggcgagaccaaagcgttttacccagaggagatcagctcaatggtgcttaccaaaatgaaggaaattgcagaagcctatctggggtaccccgtcaccaacgctgtaataaccgtacctgcatacttcaatgatagtcagcgtcaggctaccaaggatgccggcgtcattgcgggactgaacgtcctgagaatcatcaacgagccaacagcggctgccattgcctatggactggatagaacgggaaaaggcgagaggaatgtcctcatcttcgatcttggcggagggacctttgacgtttcaatcctaacaattgacgacgggatctttgaagttaaggctactgctggagatacccatttgggcggagaagactttgacaaccgacttgtgaatcattttgttgaggaatttaagagaaaacacaagaaagatatctctcagaacaagcgggccgtgaggagactgagaacagcgtgtgagagggccaagcgtacactttcatcttccacccaagcttcgctcgagattgacagcttattcgaagggatagacttctacacatccattactagagctaggtttgaggaactgtgttctgatctgtttcggagtaccctcgaaccagtggaaaaggccttgcgcgacgcaaaactggataaagcccaaatccacgatctggtgctggtggggggtagtactaggattcctaaggtgcagaagctgcttcaggacttcttcaacggcagagacttgaacaagtccattaatcctgatgaagccgttgcctatggtgccgccgtgcaggctgccattctcatgggcgataagagtgaaaacgtccaggacctgcttctcttggatgttgccccattgtcgctggggctggagaccgcaggcggtgtgatgacagcgttaatcaaacgaaactctactattccaactaaacaaacccaaatttttaccacctactctgataaccaacctggcgtattaatccaggtgtacgagggcgagcgggctatgaccaaggacaacaatcttctgggccggttcgaactcagtgggattcccccagcccccaggggagtccctcagattgaggtgactttcgacatagatgctaacgggatactgaatgtgactgccaccgataagtcaactggaaaagcgaacaagattaccatcacaaacgacaagggacgtctatccaaggaggaaatcgagcggatggtacaggaggcggaaaaatacaaagcagaggatgaggtgcaacgggaacgggttagcgccaaaaacgctctagagagctacgcatttaatatgaagtcagcagtggaagatgaaggcctaaagggcaagattagtgaagcggacaagaaaaaggtactggataaatgtcaagaggtaatctcctggctcgatgccaatacccttgccgaaaaggatgaattcgaacacaaaaggaaagagctagaacaggtatgtaatcccataatttccgggttatatcaaggggctggcggtcctggaccaggaggcttcggcgcccaaggaccaaaggggggcagtggaagcggtcctactatagaggaggtggattag

SEQ ID NO: 190354 - DNA, 1926 bp, synthetic construct
  misc_feature 1..1926: note = Description of Artificial Sequence: Synthetic coding sequence
  source 1..1926: mol_type = other DNA
atggccaaggccgccgccatcggcatcgacctgggcaccacctacagctgcgtcggagtgtttcagcacggaaaagtggagataatcgctaacgaccaggggaacagaacaacaccatcttacgtagccttcacagatactgaacggttgatcggtgatgcagccaaaaaccaggtagccttaaacccccagaatactgtctttgatgccaaaagactgatcggccggaaattcggagaccccgtggtgcagtccgatatgaaacactggcctttccaagtgatcaacgacggcgacaaacccaaggttcaagtttcttataaaggagaaaccaaagccttttacccagaggagattagttctatggtgttgacaaagatgaaggagattgccgaagcctacctgggttatcctgtaacgaacgcagtaatcactgtgcccgcgtacttcaatgattcccagcgacaggctaccaaagacgccggcgttatagccggactcaatgttctccgtattatcaatgaaccaacagctgctgccatcgcctatggattggacagaaccggcaaaggcgagcgcaatgtactaatattcgatttaggcggcggtacttttgacgtgagtatcctcaccatcgatgacggcatattcgaggtgaaagctaccgccggtgacacgcaccttggaggcgaggacttcgataaccgtctagtaaatcactttgtggaggagttcaagcgaaagcataagaaagacattagtcagaataagagagcggtcaggaggcttcgaactgcctgcgaacgagcgaagaggaccttatcctcgtcgactcaggcttctctggaaatcgattcacttttcgaaggaattgacttctacacgtctattacacgtgcccggtttgaggagctgtgtagtgacctgttccgcagtactctcgagcccgtcgaaaaggcactgagggatgccaagctcgataaagctcaaatccacgacctggtgctggtgggcggatccacacgtatccctaaagtccaaaagctgcttcaagacttcttcaatggccgggacctgaacaagagcattaatccagacgaagccgtagcatacggagcagcagttcaggcagctatcctgatgggcgataaatcagagaacgttcaggatcttctgcttctggacgtcgcccctctttccttaggcttggagaccgctggaggggtgatgaccgccttaatcaaaaggaacagcacaattccaaccaaacagactcagatatttacaacctacagcgataaccagccaggcgtgctaatacaggtgtacgagggtgaacgcgcaatgacaaaggacaacaatttactagggcgttttgagctatccggtatcccccctgctcccagaggcgtgcctcagatcgaagtgacctttgatattgacgccaacgggatcctgaacgtcactgccaccgataagagcaccggtaaggccaacaaaattaccattacaaatgacaagggcagattgtctaaggaagagattgaacgtatggttcaggaagcggagaaatacaaggccgaagatgaggtgcagagagagcgcgttagcgccaagaatgcacttgaatcctacgcatttaacatgaagtcagccgtggaggacgagggcctcaagggcaaaatatccgaagccgataagaaaaaggtgctggataaatgccaggaggtgatctcctggctggatgctaacactctggctgaaaaagacgaattcgaacacaaaaggaaggagttggaacaagtgtgtaatcctatcatttccggtctgtaccagggcgcagggggcccaggcccgggaggctttggagcccagggtccgaagggaggctcaggctcgggcccgacaattgaggaagtggactag

SEQ ID NO: 190355 - DNA, 699 bp, synthetic construct
  misc_feature 1..699: note = Description of Artificial Sequence: Synthetic coding sequence
  source 1..699: mol_type = other DNA
atggccaaggccgccgccatcggcatcgacctgggcaccacctactcttgtgttggcgtgtttcagcatggcaaggttgagattatcgcgaatgatcagggtaaccggacaaccccttcctatgtggctttcaccgacactgaacgattaataggagatgctggagtgatcgctggtcttaacgtcctccggataatcaatgaaccaactgcggccgctatcgcttacggtctggataggactggaaagggagagcggaatgtgctgatattcgatctaggcggcggcacctttgacgtcagtattttaaccattgacgatgggatctttgaggtgaaggcaaccgccggcgatacacacttgggcggagaagacttcgacaacagactggtgaaccacttcgttgaagaatttaagaggaaacataagaaggatatctctcagaacaagagggcagtgagacgactccggacagcttgcgagcgggcaaaacggaccttgagctcctccacccaggccagcctggaaatcgattctctgttcgagggaattgatttttatacttcgatcactcgggcccggtttgaggagctgtgtagtgatctgtttagaagcacacttgaacccgtagaaaaggcaccgcccgcatctccacgctgcagatcttgttgcagaacttcaagcaccggggccacttag

SEQ ID NO: 190356 - DNA, 1926 bp, synthetic construct
  misc_feature 1..1926: note = Description of Artificial Sequence: Synthetic coding sequence
  source 1..1926: mol_type = other DNA
atggccaaggccgccgccatcggcatcgacctgggcaccacctactcttgcgtcggagtgtttcagcacggcaaagttgaaatcattgccaacgatcaagggaacaggacgacaccctcatacgtggcctttaccgataccgagaggttaatcggggatgcagcaaagaaccaagtggcgctgaatccacagaataccgtcttcgatgctaagcgccttatcggaagaaaattcggcgatcctgttgtccagtctgacatgaaacactggcccttccaggtaattaatgacggcgacaagcccaaagttcaagtgagttacaagggtgagacgaaagcattttacccagaagagatctcttctatggttctgacgaaaatgaaggaaattgcggaggcctatttggggtatcccgtgactaatgccgtcattacagtacctgcttactttaatgattcccagaggcaggcgactaaggatgccggtgttattgccggtctgaatgtgctgcgcatcatcaacgagccaacagccgccgccattgcttacggactggatcgcacaggaaagggcgagcggaatgtgttaattttcgatctggggggtggcacgttcgacgtatccattctgaccatcgacgatggcatttttgaggtcaaggccacagcgggagatacgcacctggggggagaggacttcgacaatcgactcgtcaatcattttgttgaggagttcaagaggaagcataagaaagatatctcacagaacaaaagggctgtgcgacggttgagaacagcatgcgagcgtgcgaagaggaccctgagttcctccacgcaagccagtttggagatagatagtctttttgagggcatcgacttctacacaagtattacgagagctcgctttgaggagctgtgttccgacctcttccgctccaccctggagcctgtggaaaaagcgcttagagatgcaaagctggataaagcccaaatccacgatctggtgttggtgggagggagcaccagaattcctaaggtgcagaagcttcttcaggacttctttaacggaagagatctcaataaatcaatcaaccccgatgaggccgtcgcctacggtgctgctgtgcaagctgctatcttgatgggcgacaagtcagaaaatgttcaagacctcctcctcctcgacgtggccccactttcattgggcctggagaccgctggcggggtaatgaccgctctgattaaacggaattcaacaatacctaccaaacaaacacagatctttacaacttactccgacaaccagccaggcgtcttaatccaggtctatgaaggggagcgcgcaatgacgaaggacaacaacctcttgggaagattcgagctctcagggatcccacctgctccccgtggtgtaccccaaatagaagtgacctttgatatcgacgccaatggaattcttaatgttaccgccacagataagagcaccggtaaagctaacaagatcaccatcactaacgacaagggcagactgagcaaagaggaaattgaacggatggtgcaggaggccgaaaagtacaaagctgaggacgaggtacaacgcgagagagtctctgccaagaacgcattggaaagttacgccttcaacatgaagtcagcagttgaggacgagggcctcaagggaaaaatcagcgaggccgacaaaaagaaggtgctcgataaatgccaggaggtcatttcttggcttgacgctaatacactggctgaaaaggacgagttcgaacacaagagaaaggagctggagcaagtttgtaatccaatcatcagcggcttgtatcagggggcaggaggtcctgggcccggggggttcggtgcccaaggcccgaaagggggctcaggctccggacctacaattgaggaggtcgattag

SEQ ID NO: 190357 - DNA, 1926 bp, synthetic construct
  misc_feature 1..1926: note = Description of Artificial Sequence: Synthetic coding sequence
  source 1..1926: mol_type = other DNA
atggccaaggccgccgccatcggcatcgacctgggcaccacctactcttgtgtcggggtcttccagcacggcaaagtggagatcatcgcaaacgaccagggaaataggactactccctcctatgtggctttcaccgacacagagcgcttaatcggtgacgccgctaagaatcaggtggccctaaatccccagaatactgtatttgatgcgaagagattaatcggtcggaaattcggggatccagttgtgcagtcagacatgaagcattggccttttcaagtaattaacgacggtgacaagcccaaggtgcaggtgtcctacaaaggagagacgaaagctttctacccagaagagatctcgtctatggttctcacaaagatgaaggagattgcggaagcttaccttgggtaccccgtcacaaacgcagtcattacagtgccagcttatttcaacgatagccagaggcaggccacaaaggatgctggtgttatcgctgggctcaacgtgctgaggataattaacgaaccgacagctgccgctatcgcttatggactggatcgtacaggcaaaggggagagaaacgtgctcatatttgatctggggggggggacctttgacgtaagcatcctgactatcgacgacggaatctttgaggttaaggcaaccgcgggagacacacacctcgggggagaagatttcgataatagactagtaaaccacttcgtcgaggagtttaagagaaagcataagaaggatatcagccaaaataaacgggccgtgaggcggctccgaacggcttgcgaacgtgccaagaggacactgagctccagcacacaggcgtcacttgagatcgatagcctgtttgaaggaattgacttttacaccagcattacccgtgctagattcgaagaactatgtagtgatttgtttaggtcaacactggaacctgtggagaaagcccttcgggacgcaaagctggataaagcacaaattcatgatctagtgctcgtaggtgggagtacgaggatcccaaaggtacaaaagctgctgcaggatttcttcaatggccgcgatctgaacaagagcatcaatccagatgaagcagttgcctacggggcagccgtgcaagccgccattctgatgggcgacaagagcgaaaacgtacaggatcttctgttgctggatgtggcaccgctgtcattagggctcgagaccgcgggaggcgtcatgacagcgttaattaagagaaattcgacaattcccactaagcaaacacaaatttttaccacatactcagacaaccagcctggagtgcttattcaggtgtatgagggtgagagggcgatgacgaaagataataatctgctgggtcgattcgagctaagtggcatcccacccgcccctagaggggttccacagatcgaggttaccttcgatatcgacgccaatggaatcctaaacgtaaccgccacggataagtccaccggaaaggctaacaagattactataaccaacgacaagggaaggctgtccaaggaggagattgagagaatggtgcaagaggctgagaagtataaagccgaagatgaagtccaacgggaacgagtgtccgctaagaatgcgttagaaagctacgcgtttaacatgaagtccgctgtcgaagatgaggggctgaaaggcaagatttcagaagctgataagaagaaagtgctcgacaagtgccaggaggtgatctcctggcttgacgccaataccctggccgagaaggacgagttcgagcacaaaagaaaagagctagagcaggtgtgtaaccccattatcagtggcctgtatcaaggggcgggcgggcctggcccaggcggttttggcgcacagggtcctaagggcggttcaggatcgggaccaaccatcgaggaggttgactag

SEQ ID NO: 190358 - DNA, 2127 bp, synthetic construct
  misc_feature 1..2127: note = Description of Artificial Sequence: Synthetic coding sequence
  source 1..2127: mol_type = other DNA
ctgcggagctgctgcgagggccccctgcggctgagccgggtgaccccggccgtgccgcgtctgtcacgggccaacctgtgcgggtgcagacacaggcgcgtggaattcccagcttttcgccgcactgagttattgtcacggatcccgtctgcggtgagctccccacagtctcaaagtggggcccatcgccaggggacaggtatggcaaaggccgccgctattggcatagacctgggcacaacctacagttgcgtgggcgtgtttcaacatggaaaggtagagattatagctaatgaccagggcaatcggactaccccttcctatgtagccttcaccgataccgagcgactcataggcgacgctgccaaaaatcaagtggcactgaacccccaaaacactgtatttgatgctaagaggctgatcgggcgcaaatttggcgaccccgtggtgcagtcggacatgaagcactggccattccaagttatcaatgatggggacaaacctaaagtgcaggtctcttacaagggcgaaaccaaggcgttctaccctgaagaaatttctagcatggtattaacgaagatgaaagaaattgcagaggcctatctgggatatcctgttacaaacgctgttatcactgtccccgcttacttcaacgacagtcaacgccaggctacaaaagacgccggcgtaattgcgggcctgaacgtcttaaggatcattaatgaacccactgccgctgcaatcgcttacgggctcgaccgcacagggaagggagagagaaacgtcctcattttcgatctgggcggaggaacatttgatgttagtattctgacaatagacgacggcatcttcgaggttaaagcaactgcaggcgatacccaccttggcggcgaggattttgataatagattggtgaaccactttgtggaagagtttaaacgcaaacataagaaggacatcagccagaataagcgcgccgtcaggagattgaggacagcctgcgaacgggccaaacggaccctgagcagctcgacccaggctagtctggaaatcgactccctgttcgagggaattgatttctacaccagcatcacccgagcacgctttgaggaactgtgcagcgatctgttccgctccaccctcgagcccgtcgagaaagccctgcgagatgccaaactggacaaggcgcagattcacgatctcgtgctggtcggggggagcactcgaatcccaaaagtgcagaaactactgcaagatttttttaacggtcgggatctgaacaaatcaatcaatccagacgaggcagtggcgtacggagcagccgtacaggctgccatcctcatgggcgacaaatccgagaacgttcaggatctactcctcctcgacgtcgctcctctatccctcggacttgagaccgctgggggggttatgactgccctgatcaagaggaattctacaattcctactaaacagacccagatttttactacctatagcgataaccagcccggggtgctaattcaagtctacgaaggggaacgggctatgacgaaagataataaccttcttggccgcttcgaactgagcggcatacccccagccccgcggggcgtgccccagattgaagttacctttgatatcgatgctaatgggatcttaaacgtgacagctacagacaaatctactggtaaggccaataagatcaccatcacgaacgataaaggtaggctcagcaaagaggagatagaacgaatggttcaggaggctgagaagtataaggccgaggacgaggtgcaacgggaaagggtcagtgctaagaacgccctggagtcttatgcgtttaacatgaagtcagccgtggaggatgaaggactaaagggcaaaatctctgaggcagataagaaaaaggttcttgacaagtgtcaggaagtgatcagttggctggatgccaatacactggccgagaaggacgagttcgagcataagagaaaagagttagagcaagtctgtaaccctataataagtgggctataccagggggcaggcggtccaggccccggcggctttggtgctcagggccccaagggaggctcaggatcaggcccaaccattgaagaagtggattag

SEQ ID NO: 190359 - DNA, 1653 bp, synthetic construct
  misc_feature 1..1653: note = Description of Artificial Sequence: Synthetic coding sequence
  source 1..1653: mol_type = other DNA
atggccaaggccgccgccatcggcatcgacctgggcaccacctactcttgtgtaggtgtgttccagcacggaaaagtgcaaatctcatccatggtgctcaccaagatgaaggagattgctgaagcatacctgggctatccagtcaccaatgccgtgatcactgtcccagcttatttcaatgattcgcagaggcaggcgacgaaggatgctggtgtgatcgctgggctgaacgtgctgaggataatcaacgaaccaacagccgccgctattgcctatggacttgaccgcacgggtaagggtgaacgcaacgttttgatcttcgacctgggtggaggaaccttcgacgtgtctattctaaccatcgatgacgggattttcgaggtgaaagcaaccgcaggagacactcatttgggaggcgaggatttcgacaacaggctagtgaaccattttgtcgaagagtttaaaagaaaacataaaaaggatatctcccagaataagcgcgccgtcagaagactcaggacagcgtgcgagagagcaaagcgtactctatccagcagcacacaggcatcgctggaaatcgattccttgtttgagggtatcgacttctacacttcaataaccagggcccgattcgaggaactctgtagcgacctgttcaggtctaccttggaacctgttgaaaaagcattgcgggacgctaagctggataaagcccaaattcacgaccttgtgttggtcggtggaagcactcggattcccaaagtccagaaactgcttcaggatttcttcaacggaagggatctcaacaaatctatcaacccagatgaagctgttgcctatggcgccgcagttcaggcagctattctgatgggcgacaagagtgagaacgtccaggatctcttacttctagatgtcgctccactctcactcggtctggaaactgctggaggcgtgatgaccgctctgatcaaacgcaacagcaccatccccactaaacagactcagatcttcaccacatacagtgataaccagcccggcgtacttatccaggtgtacgagggagagcgagccatgaccaaggataacaatctgcttggccgctttgaactgagtggcataccccccgctcctaggggtgtacctcagatcgaggtgacattcgatatcgatgccaacggcattctcaatgtaacagcaaccgacaagtcaacgggaaaagcgaacaagatcacgatcactaatgataaagggcgcctgtcgaaagaagaaatcgaacgtatggtccaagaggcagagaagtacaaggctgaagacgaggtccagcgtgagcgggtgagtgcaaagaatgccctcgagtcctatgctttcaacatgaagagcgcagttgaggacgagggactgaagggaaagatatccgaggcagataaaaaaaaagtgcttgataaatgtcaagaggtgatttcgtggctagatgctaatacactagctgagaaagacgagttcgagcataaacggaaggagttggagcaggtgtgcaacccaatcatcagcggtctctatcagggggctggcggcccgggcccaggtgggtttggcgcccagggcccaaagggcggatctggcagtggcccaactatcgaggaagtggattag

SEQ ID NO: 190360 - DNA, 1875 bp, synthetic construct
  misc_feature 1..1875: note = Description of Artificial Sequence: Synthetic coding sequence
  source 1..1875: mol_type = other DNA
atggccaaggccgccgccatcggcatcgacctgggcaccacctactcctgcgtgggcgtgttccagcacgggaaggtagagattatcgccaatgatcaggggaataggacgacccccagttacgttgcttttacggacactgaacgtctgattggagatgccgccaaaaaccaggtggccctgaacccccctgtcgttcagtcagatatgaagcattggccctttcaggtgatcaacgacggcgataagccaaaggtgcaggtttcatacaaaggggaaactaaggcattctacccggaggagatcagcagcatggtgctcactaaaatgaaagaaattgctgaagcctacttggggtacccggtgaccaacgctgttataactgttcctgcctacttcaatgattctcagcgccaggccaccaaggacgcaggtgtcattgcagggctgaatgtgctgcgaatcatcaatgagcccacagcagccgccatagcgtacggcctggacagaaccggaaaaggcgaaagaaatgtgctgatcttcgacctgggaggagggactttcgacgtctctatactcacgattgacgacgggatttttgaagtcaaggcaaccgcaggcgacactcacctaggtggagaagacttcgataatcggctggttaatcacttcgtggaggaatttaagcgcaaacacaaaaaagatatctcacagaataaaagggcagtgaggcgactccggactgcctgtgaaagggctaagaggaccctatcctcctctacccaagcctctcttgagatagattctctttttgaaggcatcgacttttacacgagtatcacccgggcccgctttgaagaactgtgtagcgatctgtttaggtccacactagaaccagtcgagaaggctctcagagatgcaaaactcgataaagcccaaatccacgacttggtcctcgtgggcggtagcacccgaattcccaaagtccaaaaactgctgcaggactttttcaatggccgcgacttaaacaagtctattaatcccgatgaagcagtggcgtacggcgccgctgttcaggcagccattctgatgggggacaaatctgaaaacgtacaggacctgttactgctggacgtggctcctttaagccttgggttagaaaccgcaggcggagtcatgacagccctaatcaaacgcaactctaccatccccactaagcaaacgcaaattttcacaacctatagcgacaatcagcccggggtattgatccaggtttacgagggggagcgggctatgaccaaagacaacaatcttctaggtcgattcgaattgtctggaattccaccagcaccaaggggtgtcccccagattgaggttacattcgatattgatgcgaacggcatccttaatgtaaccgcgaccgataaatctactggcaaggctaacaaaatcactattacgaatgacaagggccgtctcagtaaagaggagatcgaaagaatggtacaggaggcagaaaagtataaagcggaggacgaagtccagcgagaacgcgtctcagcaaagaacgcactcgagagctatgcatttaacatgaaatccgctgtagaggacgagggcctgaaaggaaagatctccgaagctgacaagaagaaggtcctggataagtgtcaggaagtgatttcttggctggacgctaacactttggccgaaaaagacgaattcgagcacaagcgcaaggaactggaacaggtctgtaatccaatcatcagcgggctgtaccagggcgccggcgggccagggcctggcggttttggtgcccaaggcccaaaagggggatcggggtccgggccaactatcgaagaggttgactag

SEQ ID NO: 190361 - DNA, 1857 bp, synthetic construct
  misc_feature 1..1857: note = Description of Artificial Sequence: Synthetic coding sequence
  source 1..1857: mol_type = other DNA
atggccaaggccgccgccatcggcatcgacctgggcaccacctacagctgtgtaggagtgttccaacatggcaaggtcgaaatcatcgccaacgatcaaggaaaccggacaaccccttcatatgtcgcctttacagatactgagcgactgattggggacgccgcgaaaaaccaagtggtgcaatcagacatgaaacattggcccttccaggtcatcaacgacggggataaacctaaggtgcaggtgagctacaaaggggaaactaaggccttttaccccgaagagatctcatcaatggtgctgaccaagatgaaagaaattgcggaggcttatttagggtatccagtgactaacgccgtaataactgtccctgcctatttcaacgacagccagaggcaggccacgaaggatgcaggcgtgatcgccggcttaaatgtgttgagaatcattaatgagcctacagccgcggctattgcttatggccttgaccgtacaggcaagggagaaagaaatgttcttattttcgacctggggggcggaactttcgacgtttcaatactgacaatagatgacggaatttttgaggtgaaagctaccgccggcgacacccatctaggaggcgaggatttcgacaatagattagtaaaccacttcgtggaagaatttaagaggaagcataaaaaagacattagccagaataaacgagcggtcaggcgcctccgcactgcctgtgaaagggccaagcggactcttagctcctccactcaagcctccttagaaatcgacagcttgttcgagggcatcgacttttacacttcaatcacccgcgccaggttcgaggagctctgctccgacctgtttcggtccacccttgagcccgttgagaaggcactgcgggacgccaagttggacaaagcacagattcatgacctggtgctggttggaggctctacccgaatccccaaggtgcaaaagctgcttcaggatttctttaacggccgagacttgaataaatctataaatcctgatgaggccgttgcatatggagctgctgtccaggcagccatcctgatgggcgacaagtccgagaatgtccaagacttactactcctggatgtggctccgctctccctcggtcttgagaccgctggcggggtgatgacagccctgatcaaacgtaacagcaccattcccacaaagcagacccagatcttcacgacgtactctgataaccagccgggcgtgctgatccaggtgtatgaaggcgaaagagccatgaccaaagataataacctcttgggaaggttcgaattaagcggcataccacctgccccgcgcggcgtaccacaaatcgaagtgaccttcgatatagacgcaaatggcatactaaacgtgacggcaacagataagagcacgggcaaagccaacaagattacaataaccaacgacaaaggacggctaagcaaggaagaaatcgaacgcatggtacaagaagctgaaaaatacaaggctgaggatgaggtccaacgggaacgcgtgtcggccaagaatgcactcgagagctatgccttcaacatgaaatcagccgttgaggatgaaggcctgaaaggaaaaataagcgaggctgacaaaaagaaagtgcttgacaaatgtcaggaggtgatttcgtggctcgatgctaacacactggccgagaaagatgaatttgagcacaaaagaaaggagttagaacaagtgtgtaacccgattatcagtggattgtatcaaggcgctggcggtccaggtccaggcgggtttggtgctcaaggaccgaaaggaggctctggctctggccccacgatcgaagaagttgattag

SEQ ID NO: 190362 - DNA, 1857 bp, synthetic construct
  misc_feature 1..1857: note = Description of Artificial Sequence: Synthetic coding sequence
  source 1..1857: mol_type = other DNA
atggccaaggccgccgccatcggcatcgacctgggcaccacctactcctgcgtcggagtgtttcagcacgggaaagtggagattatagccaacgaccaggggaacagaacaacccctagctatgtagcctttaccgatacggagaggctgattggagatgccgcaaagaaccaggtggtgcagtcagatatgaagcactggccattccaggtgattaatgacggcgataaacccaaggtgcaggtgtcctacaagggcgagacaaaagccttctaccctgaggaaatcagctccatggttctgactaagatgaaggagatcgcggaggcatatctcggctatcccgtcaccaacgccgtgatcacagtccccgcctacttcaatgactcacagagacaagccaccaaggatgccggcgtgatagcaggactcaatgtgctgaggatcattaacgagcctaccgctgccgccatagcctatggtcttgacaggacagggaagggagaacgaaacgtgctaatatttgacctcggagggggcacgttcgacgtatcaatccttacaatagatgacggcatcttcgaggtaaaagcaacagctggggacacacacttgggcggggaggacttcgataatagacttgtgaatcacttcgtggaagagtttaaaaggaaacataagaaagatatttctcagaacaaacgtgcggtacggaggctaagaaccgcctgcgagcgggcgaagcgtactctcagctcaagcacccaagccagtcttgaaattgattcactttttgagggtattgacttttatacatcgatcaccagagctagattcgaggaactctgttctgatctctttagatcaactctggaaccggtggaaaaagcactcagagatgcaaagctggataaggcacagattcatgatcttgttcttgtcgggggttccacacggattcctaaggtgcaaaagctgctccaagatttttttaacggtcgggatctgaacaaatctataaaccccgacgaggcagtggcttacggtgccgccgtgcaagccgccatattgatgggggacaaatccgaaaacgtccaggatctgctgttgctcgatgtcgctccgctgtcgctgggcctggagacggccgggggggtgatgaccgctctgatcaagagaaatagcacaatccctacgaagcaaacacaaattttcacaacatattccgataaccaaccaggagtccttattcaagtatatgagggagagagagcaatgacaaaagacaataacctgctgggcaggtttgaactcagtgggatcccccccgcgcctaggggcgtaccccagatagaagtcaccttcgatattgacgcgaatgggatccttaatgtgacggccactgacaagtcgacaggcaaggccaacaagattactattaccaacgataaaggcagactatcaaaagaagaaatagagaggatggttcaagaggcagagaagtataaggctgaggatgaagtgcagcgagagcgcgtctctgccaaaaacgcactggagagctacgcattcaacatgaaatctgccgtggaggacgagggcctgaaggggaagatcagtgaggcagataagaaaaaggtattggacaaatgccaggaggttattagctggttggacgctaacactctggccgagaaagacgagttcgaacataaaaggaaagaactcgagcaggtctgtaatcccataatttcaggtctctatcagggagctgggggtccaggaccggggggttttggcgcacaggggcctaaagggggttcagggtctgggccgacaattgaggaagttgactag

SEQ ID NO: 190363 - DNA, 1653 bp, synthetic construct
  misc_feature 1..1653: note = Description of Artificial Sequence: Synthetic coding sequence
  source 1..1653: mol_type = other DNA
atggccaaggccgccgccatcggcatcgacctgggcaccacctacagctgcgtaggcgtgttccagcacggtaaagtgcagatatcatcaatggttctaaccaaaatgaaagaaatagcggaagcctacctgggttaccctgtaacaaacgcagtgattactgtgccagcttactttaatgacagtcagcgtcaagccactaaagatgcaggagtaatagctgggctaaacgtactgcggataatcaatgaacccactgccgccgctatcgcgtatggtctggacaggactggcaaaggagagaggaacgtcctcatctttgatctaggcggggggacgttcgatgtcagcatactaacaattgacgacgggatctttgaggtgaaggccaccgccggcgacactcatctgggaggagaggacttcgacaaccggctggttaaccactttgtcgaggaattcaaacgaaagcataagaaggatatcagccagaacaaaagggctgtgcgacgtctgaggactgcatgtgagagggccaaacgcacgctgtcaagctcaacacaggcaagtcttgagatcgacagcctcttcgagggaattgacttctatacatccataacccgcgccaggtttgaggagctgtgctccgatctgtttcgttcgacactggagccagtcgagaaagcgctcagagacgcaaagctggacaaggcacagatccacgacctcgtcctcgtgggtggatccactaggattcctaaggtccagaagctgctgcaagatttcttcaacggtagagatttgaataaatccatcaaccctgacgaggcagtcgcctacggggctgccgtgcaggccgctatcctcatgggggacaagtcagagaacgtgcaagacctcctcctgcttgacgtggccccactcagcctcggactcgagacagctggcggggttatgacagcactgattaaaagaaactccaccataccgacgaaacagacacagatcttcaccacctactccgataaccagccaggggtcttgattcaagtgtacgaaggagaacgcgccatgacaaaggataacaatctgctggggcgtttcgaactcagcggtattccacctgctcctcggggggtaccccagattgaagtgacatttgatattgatgccaatgggattctgaatgtgaccgcaactgacaagtcgacggggaaggcaaataaaattactataaccaacgataaaggccgcctgtctaaagaggaaatcgagcggatggtccaggaagccgagaaatataaggcggaggatgaagtccagagggagcgggtcagtgccaaaaatgctctggaatcctacgcattcaacatgaaatccgctgtggaggacgaggggctaaagggcaagattagtgaagcggacaaaaaaaaagtgctcgataagtgccaggaggtaatctcctggctggacgccaatacccttgccgagaaggacgagtttgagcacaagagaaaggagctggagcaggtctgcaaccccattatctccgggttgtatcagggtgcaggaggccctggacctggcgggttcggtgcccagggcccgaaagggggtagtgggagcggacccactatcgaggaggtggactag

SEQ ID NO: 190364 - DNA, 1857 bp, synthetic construct
  misc_feature 1..1857: note = Description of Artificial Sequence: Synthetic coding sequence
  source 1..1857: mol_type = other DNA
atggccaaggccgccgccatcggcatcgacctgggcaccacctactcgtgcgttggcgtcttccagcacggcaaagttgaaattattgcaaatgaccagggtaaccgcaccaccccaagttatgtggccttcaccgacactgagagactcatcggcgacgctgccaagaaccaggttgtgcagtctgacatgaagcattggccgtttcaggtcatcaacgatggtgacaagcccaaggtacaggtatcctacaaaggcgaaacaaaagcgttttaccccgaagaaatctcttctatggtgctgactaaaatgaaggaaatcgctgaagcatacctcggttatccggttacgaacgccgtcattaccgtgccggcatactttaacgatagccagaggcaggctacaaaagacgcgggggtaattgccggcctcaatgtactgcgaattatcaacgagcccaccgccgccgcaatcgcgtacggcttagatcggacaggcaaaggggaacgcaatgtgctgatatttgatcttggaggcgggacttttgatgtctcgatcttaacaattgacgacgggatctttgaagtgaaagctaccgccggagatacccatctagggggcgaggatttcgacaatcggttagtgaatcatttcgtcgaggaattcaaacgaaaacacaagaaggacattagtcagaataagcgggcagttcgacggctgagaaccgcctgcgaacgagcgaaaagaaccctgagtagctctacgcaggcaagtttagaaattgatagtctttttgagggaatcgatttttacacttcaattactagggctcggttcgaggaactgtgtagtgatctgtttcgctccactttagaaccagtggagaaagcactgagagacgccaagctggacaaagcacagatccacgacctggtacttgtgggcgggtcaaccaggatccccaaagttcagaaactcctacaagacttctttaatggtcgagacttgaataaatcaatcaacccagatgaggctgtggcttatggcgcagctgttcaagccgcaatcctcatgggagacaaaagcgagaacgtgcaggatctgttactgttagatgtggcccctttgagcctggggctggaaacagctggaggcgtgatgacggcccttatcaaacgtaactccaccatccccaccaaacaaacccagatctttacaacatactctgacaaccagccgggcgtgctcattcaagtgtacgaaggggagagggccatgaccaaagacaataatctgctggggaggttcgagctgtcggggatacccccagcgccacgaggggtgccacagatcgaagtgacctttgacatcgacgctaatggtatcctgaacgtgacagcaaccgacaaatccaccggtaaagccaataagataaccattactaatgataaggggagattgtctaaggaggagattgagaggatggtgcaggaggctgagaaatacaaggctgaggacgaggtgcagagggaacgggtctctgctaaaaacgcactggaatcgtatgcttttaacatgaaaagcgctgttgaggatgagggactaaaggggaagattagcgaagcggataaaaaaaaggttctggacaagtgccaggaagttatcagctggctggatgccaacacacttgccgagaaagacgagtttgagcataaacgcaaagaactggagcaggtgtgcaaccccattatcagcgggctctaccagggcgctggcggcccaggtccagggggcttcggagcccagggaccaaagggcggttccggatcaggacctactatcgaggaggtcgactag

SEQ ID NO: 190365 - DNA, 1653 bp, synthetic construct
  misc_feature 1..1653: note = Description of Artificial Sequence: Synthetic coding sequence
  source 1..1653: mol_type = other DNA
atggccaaggccgccgccatcggcatcgacctgggcaccacctactcatgcgtgggagtcttccagcacggtaaggtgcagatttccagcatggtcctgaccaagatgaaagaaatcgccgaggcataccttggatatccagtcacaaatgctgtcatcactgtgcctgcctacttcaacgatagtcaaaggcaggccacgaaggacgcgggcgttattgcggggctgaatgtcctccgaatcatcaatgaaccaacggccgctgccatcgcttatgggcttgaccgaacgggcaaaggagaacggaatgttttaatattcgatctgggcggggggacattcgacgtaagcattctgacaatagacgacggcatcttcgaagtgaaggctactgccggggacacacaccttggcggcgaggactttgataatcgactcgtcaaccacttcgtggaagagtttaagaggaaacataaaaaggacatcagccagaacaaaagggcagtgcggcgcctgcggacggcttgtgagagggctaaaagaaccctgagctccagcacacaggcctccttggaaattgatagccttttcgagggcattgacttttatacttctatcactagggcaagattcgaagagctgtgcagtgaccttttcaggagtaccctggagcccgtggagaaagcactgcgcgacgccaaactagacaaagcacagattcacgacttagtgctggtcggtggatctacccgaattcctaaggtgcagaagttgctgcaagatttttttaacggccgtgacctgaataagtccatcaaccccgatgaggcagttgcatacggcgctgccgtgcaggcggccattcttatgggcgataaatccgagaacgtccaggacctgttgctgctggatgtggccccattatccctagggctcgaaacggcaggcggagtcatgaccgctttaattaaacggaactctaccatcccaacgaaacaaactcagatattcactacctatagtgataatcaaccaggtgtgctcattcaggtgtatgagggtgaacgtgccatgacaaaggataataatttgctcggtcgtttcgagctcagcgggatccctcctgctcccaggggagtgccacagatcgaggtgactttcgatatcgacgctaacggaattctgaacgtgacagcaactgacaaaagcactggcaaggccaacaaaataacaattacaaacgataaaggaagactgagcaaggaggagatcgagagaatggtgcaggaggccgagaagtacaaagccgaagatgaggtgcagagagaacgtgtgtccgctaaaaacgcactcgagtcttatgcattcaacatgaaaagcgctgtggaggatgaggggttaaagggcaaaatctccgaagcagataaaaaaaaagtgttggacaagtgtcaggaagtaatatcatggctggacgcaaataccctcgcagaaaaggatgagtttgagcacaagaggaaagaactggaacaagtctgtaacccaatcataagtggcctgtatcaaggtgccgggggccccggccctgggggtttcggcgctcagggcccaaagggaggttctgggtcagggcccaccatcgaagaggttgactag

SEQ ID NO: 190366 - DNA, 1761 bp, synthetic construct
  misc_feature 1..1761: note = Description of Artificial Sequence: Synthetic coding sequence
  source 1..1761: mol_type = other DNA
atggccaccgccaagggcatcgccatcggcatcgacctgggcaccacctattcctgcgtgggagtgtttcagcatggcaaggtggagattatcgccaatgatcagggaaacagaacaactcccagttacgtggcatttaccgataccgagaggctcatcggtgacgctgcaaaaaaccaggtagccatgaatccccaaaatacagtctttgacgctaaacgactaatcggaagaaaatttaacgacccagtggtgcaggctgatatgaagttgtggccattccaagttatcaatgacagtcagcgtcaggccacgaaagatgcgggcgttatagcgggcctcaacgttctgaggatcatcaatgaaccaaccgcggctgcaattgcatacggcctagataagggaggacaaggagaacgtcatgtcctgatcttcgacctcggaggtggcaccttcgacgtgagcatcttgaccattgatgacgggatcttcgaagtgaaagccaccgccggcgacactcatctgggaggggaggacttcgacaatcgacttgtgtcccacttcgttgaggagtttaagaggaagcataagaaggatatctctcagaataaacgtgctgtccggaggttgaggactgcctgcgaaagggctaaacgaacgctgagttccagcacacaagccaacctcgagatagattcactgtatgagggaattgatttctatacaagcattacaagagctcgattcgaagagctctgtgccgatctgttcaggggaaccctcgagcctgttgaaaaagcactgcgcgatgccaaaatggacaaagcaaaaatccatgacatcgtactcgtcggagggtcaactcgtatccctaaagttcaaaggctgttacaggattacttcaacggacgcgacctcaacaagtccatcaacccagatgaggctgtggcatatggagccgccgttcaggcagcaatcctgatgggcgataagtccgagaaggtgcaggacctacttctgttagatgttgcccctctatccctcgggctcgagactgcgggcggcgtgatgacggcactgattaaacgcaacagtaccatccctaccaaacagacccaaatctttaccacctactccgacaatcagccaggggtgcttatccaggtctacgagggtgaacgtgctatgaccaaagacaacaatcttctgggaagattcgatcttacagggatcccgccagccccccgcggtgtcccacaaatcgaggtgacctttgatatcgacgcaaatggaattctcaacgtgacagcaacggacaaatcaaccgggaaagtgaataaaataacaatcaccaatgacaagggaagattgagcaaggaagagattgaaaggatggttctcgacgctgaaaagtataaggctgaggatgaggtccaacgggagaagatagcagccaagaacgccttggaatcctacgcatttaatatgaaatccgtggtcagcgacgaaggtctgaaagggaagatctccgagtcagataagaacaagatcttggacaaatgtaatgagctcttgtcttggctcgaggtcaaccaactggcagagaaagatgagttcgatcacaaacgaaaagagttggagcagatgtgcaacccaattattaccaagctgtaccaaggtggctgcaccgggcccgcctgtggaacaggctacgtacccggccgccccgccacgggacctaccatcgaggaagtggattag

SEQ ID NO: 190367 - DNA, 1926 bp, synthetic construct
  misc_feature 1..1926: note = Description of Artificial Sequence: Synthetic coding sequence
  source 1..1926: mol_type = other DNA
atggccaccgccaagggcatcgccatcggcatcgacctgggcaccacgtactcctgtgttggcgttttccagcacggaaaagtggaaattattgcgaacgaccagggcaacagaacgactcctagttacgtcgcattcactgacaccgagcgactgattggggacgctgccaagaatcaggttgccatgaacccacagaacacagtgtttgacgcgaaaaggctcataggtcggaagttcaatgatcccgtggtacaagctgacatgaagctctggccattccaggtcatcaacgagggaggtaagcctaaggtgcttgtttcttataaaggcgagaataaggcgttctacccagaggagatcagctctatggtcctgactaagctgaaggagaccgctgaagctttcttggggcaccccgtgacaaatgctgtgatcactgtccctgcatatttcaatgactctcagaggcaagctactaaagatgctggcgtgatcgccggcttaaacgtccttaggattattaatgagcctaccgccgctgccattgcgtacgggttggacaaaggtggacagggcgaaagacatgttctaatcttcgacttaggaggagggactttcgatgtgagtattctaactatcgacgacgggatttttgaagtcaaggctactgctggagatactcacctaggcggagaagactttgataataggctggtctcccacttcgtggaggaattcaaacggaaacataagaaggatatcagtcagaacaaaagagcagtgaggcgcctgcgaactgcttgcgagagagccaagcggacgctgtcatccagcacacaggctaatctggaaatcgacagcctttatgaagggatagatttctatactagcataacgcgggcaaggtttgaagagctgtgcgctgatctttttcggggcaccctcgagcctgtggaaaaggccctgcgtgacgctaagatggacaaagcaaagatccacgatatcgtcctggtcgggggatctacaagaatccctaaagtgcagagattgttacaggactacttcaacggaagggacctcaataaaagcattaatcccgacgaggccgtggcttacggagcagcagttcaggccgctatcttgatgggtgacaaatcagagaaggtacaagatctactcctcttagatgtggcaccattgtcgttaggcctggaaaccgctggaggggtcatgactgccctgatcaaacggaacagtactattcctacaaaacagacccagatctttaccacctactccgacaatcagcccggagtactcatacaggtatatgaaggagagcgagccatgacgaaagataataatctattggggcgctttgatttaacggggattcccccagcccctcgcggcgtgccccagatcgaggtgacttttgacatcgacgcaaatggcatacttaatgtaactgctaccgataaatctactggcaaggtcaacaagatcactatcactaatgacaaagggcgtttatccaaagaggagattgagcgtatggttctggacgcagagaagtacaaggcggaagatgaggtgcagagggagaagatagccgctaagaatgctctggagtcctatgcttttaacatgaagtcggtcgtgagcgacgaaggcctgaaagggaagatctctgagagcgataagaataaaattctggacaaatgcaatgagttgcttagctggctcgaagtaaatcagctggctgagaaagacgaatttgaccacaaaagaaaggagctcgagcagatgtgcaatcctatcataacgaaactttatcagggcgggtgtaccgggccagcttgcggaacaggatatgtacccggccggccggctaccggccccacaatcgaggaggtggattag

SEQ ID NO: 190368 - DNA, 1926 bp, synthetic construct
  misc_feature 1..1926: note = Description of Artificial Sequence: Synthetic coding sequence
  source 1..1926: mol_type = other DNA
atggccaccgccaagggcatcgccatcggcatcgacctgggcaccacctattcatgtgtgggcgtgttccaacatggcaaggtcgaaattatcgccaacgaccaaggcaacaggactacgccttcatacgtggcgttcaccgatactgaaagactgatcggcgacgccgccaagaaccaggtggccatgaatccacaaaacaccgttttcgacgccaagagactgattggtcgaaaattcaatgacccagttgtccaagccgacatgaagctttggcctttccaggtgatcaatgagggaggtaagcctaaggtcctggttagttacaagggggaaaacaaggccttttacccagaggagatttcatccatggtcttgaccaaactcaaagagacagccgaggcctttctgggccacccggtgactaatgccgtcataacggttccagcttacttcaatgactcccagcgccaagcaactaaagatgctggcgtgattgctgggttgaacgttctgcgcatcatcaatgaaccgacagccgcagccatagcttacgggctggacaagggcggtcagggtgagcggcacgtgctcatttttgatctgggaggcggaacgttcgatgtaagcattttaaccattgacgatgggattttcgaggtaaaggccacagctggagacacccatctgggcggcgaggacttcgataacagacttgtcagccacttcgtagaagaattcaagaggaaacacaagaaagacatcagccagaataagcgggctgtgcgcaggctcaggaccgcttgtgagcgcgccaagcgtacactgagtagttctacccaagcgaaccttgaaatcgatagcttgtacgaggggattgatttctacacttctatcaccagagccaggttcgaggagttgtgcgcagacctgttcaggggcaccttggagcccgtcgagaaagcactgcgagacgccaagatggataaagcaaaaatccacgatattgtgctcgtggggggcagtacccggattcccaaagtgcaaagactcttgcaggactatttcaatggtagggatctgaacaagtctattaatcccgacgaagcagtggcctatggggcggctgtgcaggctgcaattctgatgggcgacaaatctgaaaaagtgcaagatctcctactgctagacgtggctccccttagcctgggcctggagacggcaggaggggtcatgacggctttaattaaacgtaatagtactatccccaccaaacagactcagatcttcaccacttactcagataaccagccaggcgtcctgatacaagtgtatgagggggagcgggcaatgactaaggataataatcttcttggccggttcgacctgacaggtatccctcctgcgccacggggggtccctcagatagaggtgaccttcgacattgacgccaatggcatccttaatgtcactgcgatggataagagtacaggcaaggtgaataagattactattaccaacgataaaggacggctcagcaaggaggagattgagcgcatggtactggacgcagaaaaatacaaagccgaggatgaggttcaaagggagaagattgcggccaagaatgcactggagtcgtacgcatttaacatgaaatccgtggtgagtgacgaagggctcaaaggcaagatctcggaaagcgacaagaacaaaattctagataaatgcaatgaactgctgtcatggttggaagtgaaccagctggctgagaaggatgaatttgatcataagcggaaggagctcgagcagatgtgtaatcccataattacaaaactttaccagggggggtgcactggccctgcatgtggcaccggctacgtgccagggcggcccgcaaccgggcccacaatcgaggaagttgactag

SEQ ID NO: 190369 - DNA, 1926 bp, synthetic construct
  misc_feature 1..1926: note = Description of Artificial Sequence: Synthetic coding sequence
  source 1..1926: mol_type = other DNA
atggccaccgccaagggcatcgccatcggcatcgacctgggcaccacttactcatgtgtcggagtctttcagcacggtaaggtggagattattgctaacgatcagggaaatagaacaacaccgtcttacgtagcattcactgacacagagcggttaatcggggacgccgcaaaaaaccaggtcgccatgaacccgcaaaacacagtctttgacgccaagagactcatcggaagaaagtttaatgacccagtggtccaggccgacatgaagctctggccattccaggtcattaacgagggtggtaagcctaaagtgctggttagttataaaggcgagaacaaggccttttaccccgaggagatcagttcaatggtactcacgaagcttaaagaaactgccgaagcctttcttgggcacccagtgaccaatgcagtcatcacagtgcctgcgtacttcaacgactcgcagcgacaggcaacaaaagacgctggggttatcgcggggttgaatgtcctcagaattatcaatgagcctacggccgccgccatcgcttacggattggataaaggcggacagggtgaaaggcacgtcctcatattcgacctcggagggggtactttcgacgtgtcaatactcactattgatgacgggattttcgaagtgaaagcgactgccggcgacacacatctcgggggagaggattttgacaataggctagtgagccacttcgttgaggaatttaagaggaagcacaaaaaggatattagccagaacaagagagccgttcgccgcctgagaaccgcttgcgaacgggccaaacgcaccctgtctagttccacacaggcgaatttagaaattgatagcctttacgaaggaattgatttctacaccagcatcactcgagcccgcttcgaagaactctgcgctgatctcttcagaggcactttggaaccagtggagaaggcattacgtgacgctaagatggacaaagccaaaattcatgacattgtactcgtaggggggagtacgcggatccccaaggtgcaacgccttctgcaggattacttcaatgggagagatttaaacaagtctataaatccagacgaggccgtcgcctacggagcagcggtgcaggcagcaatattgatgggcgataagagtgaaaaagtgcaggatctgcttctcttagacgtggcacctctgtccttgggcctggagaccgccggaggcgtcatgaccgccctaatcaagcgcaatagtactatccctaccaagcaaactcagatctttacaacctattcagacaatcaacctggggtgcttatccaggtatacgagggcgaacgtgctatgacaaaagacaacaatctgttaggtagatttgacttaacgggtataccccctgccccaagaggcgtgcctcaaatcgaggtgacgttcgacattgacgcaaatggcattctgaacgtcacagctacggacaagtccaccggaaaggttaacaaaatcaccatcacaaacgataaaggcagattatctaaagaggaaattgaacgcatggtgctggacgccgaaaaatacaaggctgaagacgaagtccagagggaaaaaatcgcagccaagaacgcattggaatcctacgcattcaacatgaaaagcgtcgttagcgacgaaggccttaaaggaaagatcagtgagagcgacaaaaataagattcttgataagtgtaatgaactcctgtcgtggctggaggtcaatcaattggctgagaaggacgaatttgaccacaaacgtaaggagttggaacagatgtgtaacccaataatcaccaaactgtatcagggagggtgcactggcccagcttgcggcacaggctacgttccaggtaggccagccactggcccaactatagaagaagttgattag

SEQ ID NO: 190370 - DNA, 1926 bp, synthetic construct
  misc_feature 1..1926: note = Description of Artificial Sequence: Synthetic coding sequence
  source 1..1926: mol_type = other DNA
atggccaccgccaagggcatcgccatcggcatcgacctgggcaccacttactcatgtgtgggtgtctttcagcacgggaaagtcgagattattgcaaacgatcagggaaatcgcacgacaccttcttatgtcgcttttactgacacggaaagattgataggtgacgccgctaaaaaccaggtagcaatgaatccgcagaatactgtgttcgacgcaaaaaggttgattggaagaaagtttaacgaccccgtggtacaggcagacatgaagttatggcccttccaggtcatcaatgagggaggcaagcctaaagtgctggtttcttataagggcgagaataaggctttttacccagaggagatctcgtccatggtactaacaaaactgaaggaaactgcggaggccttcctcgggcaccccgtgaccaatgctgtgattactgtgcccgcatactttaatgattcccagaggcaggccaccaaggacgccggcgtgattgccggcttaaatgtgcttcggattatcaacgaaccgactgcggccgcaatcgcctacgggctggacaaaggcggccagggtgagaggcatgtgctgatatttgacctgggggggggaacttttgacgtgtccatcttaacaatcgacgacggaatcttcgaagtgaaagcaacagccggagatacccacttgggaggggaggacttcgataaccgcctggtgagccatttcgtggaagagttcaagaggaagcacaaaaaggatatttcccagaacaagcgcgcggttcgtcgacttcgtactgcatgcgagcgtgccaaaaggaccttatcttcaagtactcaggcaaacctcgagattgacagtctctacgaggggattgacttctatacgtcgatcacacgtgctcgcttcgaggaactgtgcgccgatttatttcgtggaactctggaacccgtagaaaaggcactacgtgacgccaagatggataaggccaagatccatgacattgtgctcgtgggcgggagtacacgcatcccaaaagtacagcggttgctacaagactactttaatggaagggatctgaacaaaagtataaatcccgatgaagctgtcgcctatggagcagcggttcaggctgccattctgatgggcgacaagagcgaaaaggttcaggatctcttactcctggatgtggcccccttgtcgctgggcctggaaactgccggaggggtcatgactgcactcatcaagagaaattcaacaatccctactaagcagacccagattttcactacatactccgacaaccagcccggggtgcttatccaggtgtacgagggcgagcgggcaatgactaaggacaataacctgcttgggcgatttgatcttaccggaataccacccgcaccccgaggcgttcctcagatcgaagttacttttgacatagacgcaaatggtatcctgaacgtcactgccactgacaagtcaaccggcaaagtcaacaaaattacaataacaaatgataaggggcggctgtcgaaagaagagatagaacgtatggtactggacgctgagaagtataaagcggaggacgaggtacaacgagagaaaattgctgccaaaaacgccctggagtcgtatgcctttaacatgaagtcagtggtcagtgatgaggggctgaaaggtaagatatctgaaagcgacaagaacaagattttagataaatgcaacgagctgttatcctggttagaggtgaaccagctcgccgagaaagatgagtttgaccataaacggaaggaattggagcagatgtgcaatcccatcataactaagctgtaccaaggtggttgcactggcccagcatgcggtaccggctatgttccggggaggcctgctaccgggcctactatcgaagaggtcgattag

SEQ ID NO: 190371 - DNA, 699 bp, synthetic construct
  misc_feature 1..699: note = Description of Artificial Sequence: Synthetic coding sequence
  source 1..699: mol_type = other DNA
gccaagggcatcgccatcggcatcgacctgggcaccacctacagctgcgtaggagtatttcagcacggaaaggtcgagataatagccaatgaccaggggaacagaacaactccatcctatgtggccttcacagatacagagcgtcttattggagatgcaggcgtgatagcgggactgaacgtcttacgaatcatcaacgagcctactgccgctgctatagcatacggcctggataaaggaggccagggagaaaggcacgtgcttatctttgaccttggtggagggacattcgatgtgagtattctcacaatcgatgatggtatttttgaggttaaggctacggccggcgacacccacttaggaggagaggacttcgacaatcgcctggttagccacttcgttgaagaatttaagcgtaagcataaaaaggatatctcccagaataaacgggcggtccgtagacttcggacagcctgcgagcgagcaaagcgaactctcagttcatctactcaggcaaatctcgagatcgatagtctgtacgagggcatagatttctatacctccattacgagggccagattcgaagaattatgtgccgatctgtttcgagggaccctggagcctgttgagaaaggggccccacctgcgtctccccggtgctccggttgttttcggactacctctatggacgttatctag

SEQ ID NO: 190372 - DNA, 1926 bp, synthetic construct
  misc_feature 1..1926: note = Description of Artificial Sequence: Synthetic coding sequence
  source 1..1926: mol_type = other DNA
atggccaccgccaagggcatcgccatcggcatcgacctgggcaccacctattcctgcgtgggggtgttccagcacggcaaggtggagatcatcgccaatgatcagggcaacaggacaaccccctcttatgtggcattcactgatacagagcggctcatcggggacgcagcgaaaaatcaggtggcgatgaatccacaaaataccgtgttcgacgcaaaacgactgattgggcgaaagtttaacgaccccgtggtccaagcagatatgaaactgtggccctttcaggtgatcaatgaggggggaaaacccaaagtgttggtgtcctacaagggggagaataaagcattttatcctgaagaaatatcctccatggtgctgaccaaattgaaagaaaccgcagaggcctttttgggccacccagtgacaaacgctgtgatcacagtgcccgcctattttaatgactctcagcgacaggctacgaaagatgcaggtgtgatcgcgggcctgaatgtcctgcggatcattaacgagccaacagctgccgctatcgcctatggactcgataaaggaggacagggcgaacggcacgtgttaatattcgacctcggaggcggcaccttcgacgtgagcatcctcacaatcgacgatgggatattcgaagtgaaagcaacggccggtgatactcacctgggcggggaagacttcgacaatagactagtgagccattttgtagaggaatttaagagaaagcataaaaaggacatatcacagaacaagcgtgctgtgcggcgcctgaggacggcgtgcgaaagggccaagagaaccctcagctcttctacccaggctaacctggagattgattccctgtacgagggtatcgatttctacacctccatcacacgtgccagattcgaagaactgtgcgcagaccttttcagagggacacttgaacctgttgaaaaggctctgcgcgacgctaagatggataaggcaaaaattcacgacattgtcttggtcggtgggtcaacaagaatccctaaggtacagcgactcctccaggattacttcaatggccgagatttaaacaagtcaataaacccggacgaagccgtcgcctatggtgccgctgtgcaggcggcaattttgatgggcgacaaatctgaaaaggtacaagatttactcttgctcgacgtcgcgcccttatccttaggcttagagacagccggaggcgtaatgaccgcgctgatcaaaagaaactcaactattcctaccaaacagacccagatctttacaacatatagcgataatcagcctggcgtgctgattcaggtgtatgaaggtgagcgggccatgaccaaagataacaatctgttgggaaggttcgacctgacggggatcccaccagcgccccgcggcgtgcctcaaatagaggtcaccttcgatatcgatgctaatgggatcctgaatgtgactgcaatggataagtccacagggaaggtgaacaaaatcacaattaccaatgacaaaggacgcttaagtaaggaggagatcgagcgcatggtgctggatgccgagaaatacaaagcagaggatgaggtccagagagaaaagatcgctgccaagaatgcccttgaatcctacgcttttaatatgaaatctgtggtcagtgatgagggccttaaggggaagatatctgagtctgataaaaacaagatcttggacaaatgtaatgaactgctcagttggttagaagtgaaccaacttgccgaaaaggacgagttcgaccataagagaaaggagctggaacagatgtgcaatcctattatcacaaagttataccagggaggctgcacaggacccgcctgcggaaccggctacgttcccggacgacctgccactgggcctacaatcgaggaggtcgactag

SEQ ID NO: 190373 - DNA, 1599 bp, synthetic construct
  misc_feature 1..1599: note = Description of Artificial Sequence: Synthetic coding sequence
  source 1..1599: mol_type = other DNA
atggccaccgccaagggcatcgccatcggcatcgacctgggcaccacatactcctgtgtcggcgtgtttcagcacgggaaggtcgagatcatcgctaatgaccaaggaaataggacaactccatcttacgtcgcctttacggacacagagagactgatcggagacgccgctaaaaatcaggtggctatgaatccacagaatacggtgttcgacgctaagcggcttatcggtcgaaaattcaatgacccagttgtccaagcggatatgaagctgtggccttttcaggtgataaacgagggcggcaagccaaaagttttggttagttataagggggagaacaaggcgttctaccccgaggagattagcagtatggtactaaccaaattgaaagagaccgctgaggcgttcctggggcatccagttaccaacgctgtcattactgtcccagcttatttcaatgattcccagcgtcaggcgaccaaagatgcaggcgttatcgcaggcctcaacgttttgcggataataaacgagcctaccgcagccgccatagcttacggcctggataaggggggacagggagagcgacatgttctcattttcgatctcggggggggaactttcgacgtgtctattcttacaatcgatgacgggattttcgaggtaaaggccaccgcaggagatacacatctaggcggggaagattttgacaaccgcctggtgagtcatttcgtcgaggaattcaaacgaaaacataagaaagacattagtcagaacaaacgggctgtccgtcgactaagaactgcgtgtgagagagctaagaggaccctctcatcgtctacacaggctaacctcgagatcgacagtctttatgaaggcatcgacttctatacttctatcacgagagcccggttcgaggagttatgcgcagatctgtttcgcggaaccctggagcccgtggagaaggccttaagagatgccaagatggacaaggccaagatccatgatattgtgctggtgggtggttccacacggatccctaaggtacaaagacttttgcaggattatttcaacggccgcgatctgaacaagagcattaatccggatgaagccgtggcctacggcgctgccgtccaggccgcaatcctcatgggcgacaagtccgaaaaagtgcaggatctgcttttactcgatgtagccccattatcattaggactggaaaccgctggaggcgtgatgaccgcactaatcaagcggaatagcaccatcccaactaagcagacccagatcttcaccacatattccgacaaccagccaggagttttgattcaagtgtacgagggagagagagccatgactaaggacaacaacctgttagggcgatttgatctcaccggcattcctccagccccgaggggagtccctcagattgaggtgacgtttgatatcgatgctaatggaatcctgaacgtcaccgctatggataaatctacgggaaaggtcaacaagattactattaccaatgataaggggcgtctaagcaaggaagagatcgagcgcatggtcctagatgccgaaaaatacaaggccgaagacgtgtag

SEQ ID NO: 190374 - DNA, 699 bp, synthetic construct
  misc_feature 1..699: note = Description of Artificial Sequence: Synthetic coding sequence
  source 1..699: mol_type = other DNA
gccaagggcatcgccatcggcatcgacctgggcaccacctacagctgcgtgggggtgtttcagcatggaaaagtggagatcatcgctaatgatcagggaaaccgcacgaccccctcatatgtagcgttcaccgacactgaaagactcatcggggacgcaggtgtgatcgcaggtctcaatgttttacgcattattaacgaacccacggcagcggcaattgcctatggacttgataagggcggacagggggagcggcacgttctcattttcgatctgggcggaggcacttttgatgtgtctatcctgactatcgatgatggcatcttcgaggtcaaagccaccgccggcgatacccacctggggggggaggatttcgataatagacttgttagtcacttcgtcgaggagtttaaacgcaagcacaagaaagatattagtcagaacaagcgtgctgtgcgcaggcttagaacagcctgtgagcgggccaaaagaacactgagtagttccactcaggccaatctggagattgatagcttgtacgaaggcattgacttctatacaagcatcactcgtgctaggttcgaagaattgtgtgctgacttgtttcgtggcacactggaacccgtggaaaaaggagcccccccggccagcccgcgttgtagtgggtgtttccgaactaccagtatggatgttatttag

SEQ ID NO: 190375 - DNA, 1926 bp, synthetic construct
  misc_feature 1..1926: note = Description of Artificial Sequence: Synthetic coding sequence
  source 1..1926: mol_type = other DNA
atggccaccgccaagggcatcgccatcggcatcgacctgggcaccacttactcttgtgtgggagtgttccagcacggtaaagtggaaattattgcaaatgatcagggaaaccgcaccactcccagctatgtagccttcactgatacagagcgactgattggcgacgcagcgaagaatcaagttgccatgaacccccagaataccgtgttcgatgcaaagagactgataggaagaaaattcaatgaccccgtggtgcaggcagatatgaagctttggccattccaggtgataaatgagggaggcaaacccaaggttttggtctcctacaagggtgagaacaaagcattctaccctgaggagatcagctccatggtcctgacaaaactaaaagaaacggccgaggcatttctgggccaccccgtgacaaatgcagtcattacagtccccgcgtactttaacgatagccagagacaagccaccaaggatgcgggagtgatcgccggacttaatgtgttacgaattattaatgaaccaacagccgccgcaatcgcctatgggctggataaaggcgggcagggagagaggcacgtgctgatctttgatctcggcggggggaccttcgacgttagcatcctgactatcgacgatggcatctttgaagttaaggcaactgcaggagatactcacttgggcggcgaagattttgataatcggctggttagccactttgttgaagaatttaagaggaaacataagaaggatatttcccagaacaagagggcagttcgccggctccggacggcctgcgaacgggctaagagaaccctgtctagcagtactcaggccaatctagaaatcgactcattgtacgaaggaatcgatttctatacttctatcaccagggcccgattcgaggagctgtgtgcggatctgttccgggggaccttggagcctgtggagaaagccctgagggacgcaaaaatggataaggcaaaaatacacgatattgtgcttgtgggagggtccactcgcatcccaaaggttcaaagactgctacaggactattttaacggccgggacctcaacaagagtattaatccagacgaagccgtagcctatggcgcagcggttcaagctgccatccttatgggtgataaaagcgagaaagttcaggacctgcttctgctcgatgtagccccgctctccctgggtctcgagaccgcgggtggagtgatgacagccctcataaagaggaatagcaccatccccaccaagcagacacagatcttcacaacatattccgacaaccaacccggtgtgctgattcaagtgtacgagggggaacgcgcaatgaccaaagacaacaaccttctggggagattcgacttgactggcatcccccctgccccaagaggtgtgccacagattgaagtgacgttcgacatcgacgctaacggcatattaaatgttacggctaccgacaaaagtaccggtaaggtaaataagattacgatcacaaacgacaaaggccggctttcaaaggaggagatagagaggatggtccttgacgctgaaaagtacaaggctgaggatgaagtgcagcgtgagaaaatcgcggctaagaatgccctggagtcctatgctttcaatatgaaatcagtggtgagcgatgaaggtctaaaagggaagattagtgaatctgacaaaaataagatattggacaagtgtaacgagctcctcagctggttagaggtcaatcagctggcagagaaggatgagttcgaccacaagcggaaagagctagaacagatgtgcaatccaatcataaccaagctgtatcagggcggttgcaccgggccagcctgcggcaccggctacgtacccggacgtccagccacgggaccaaccatcgaagaggtcgactag

SEQ ID NO: 190376 - DNA, 1599 bp, synthetic construct
  misc_feature 1..1599: note = Description of Artificial Sequence: Synthetic coding sequence
  source 1..1599: mol_type = other DNA
atggccaccgccaagggcatcgccatcggcatcgacctgggcaccacctatagttgcgttggcgttttccagcatggaaaggtcgaaatcatcgcgaatgaccagggtaatcgtacgacaccttcctatgtggcttttacagatacagagaggctgatcggggatgcagctaaaaaccaggtggccatgaacccgcaaaacaccgtattcgatgctaagaggctaataggacgaaagttcaatgatcctgttgtgcaggcagacatgaaactctggccatttcaggttataaatgaggggggaaagcccaaggtcctcgtttcttacaagggtgagaacaaggccttctaccccgaggagatcagtagcatggttttgactaagttgaaggagactgccgaggctttcctgggtcatcctgtcacgaatgctgttatcaccgttccagcttacttcaatgatagtcaacgacaagccaccaaggatgcgggtgtcatcgcaggtcttaacgtcctcaggattatcaacgaaccgaccgccgctgcaatcgcgtacggactagataaggggggccagggagaacgacatgtgctgatttttgatctcggcggaggtacattcgatgtgtccattctgaccattgacgatggaattttcgaagtgaaggcgactgctggggatacacatctggggggggaagacttcgacaaccggctggtaagtcatttcgtcgaagaattcaaaaggaagcataagaaggatataagccagaataagagggctgtgcgaaggctgcggactgcctgcgaaagagccaaaagaactctgtcctcatcaacacaggccaatttagaaattgattctctttacgaagggattgatttctatacgagcatcacaagggcccggttcgaggagttgtgcgctgacctcttcagagggactctggagcctgttgaaaaagccttgcgggatgctaagatggataaagcaaaaatccatgacatagtgttggtgggaggctctacgcgaatccccaaggtgcaacggctcctgcaggattactttaacggccgtgacctcaacaagagcatcaacccggacgaggccgtcgcatacggcgcggccgtgcaagcagcgatcttgatgggggataagtccgaaaaggtgcaagacctcctcctgctggacgtcgcgccactgtcactgggcttggagaccgccggtggagtcatgacagccttaatcaaacggaatagtaccatcccgacaaagcagacacagatttttacgacctattctgataaccagcccggcgttctcatacaggtatatgagggcgaacgggcaatgactaaggacaataacctgttaggccggttcgacctgacaggcatccctcccgctcccaggggcgttccccagatcgaagtgacatttgatattgatgctaacgggatcctgaacgtgaccgccatggacaaatcgaccgggaaagtaaataaaatcacaatcactaatgacaagggcaggctgtctaaggaagaaatcgagaggatggtccttgatgcagagaaatacaaggccgaggatgtgtag

SEQ ID NO: 190377 - DNA, 1599 bp, synthetic construct
  misc_feature 1..1599: note = Description of Artificial Sequence: Synthetic coding sequence
  source 1..1599: mol_type = other DNA
atggccaccgccaagggcatcgccatcggcatcgacctgggcaccacgtatagctgtgtgggggtgttccagcatgggaaggttgagatcatcgctaacgaccagggcaaccgcactacaccctcgtatgttgccttcacggatacagaacggctgatcggggatgcggctaagaaccaggttgcaatgaatcctcaaaatacggtgtttgacgctaaacggctaattggaaggaagtttaatgatcccgtcgtgcaagccgatatgaaactgtggccattccaggtgattaacgaagggggcaagcctaaagtcctcgtaagttacaaaggagaaaataaagctttctatcccgaagaaatttcgtccatggtactgaccaagcttaaagaaaccgccgaggcatttcttggtcacccagttactaatgccgtaattaccgttcccgcttattttaatgactctcagaggcaggcaacaaaagacgcgggtgtgatagccgggctgaacgttctccgtataatcaacgagcccacagcggcagccattgcatacggcttggacaagggaggtcagggtgaaaggcatgtgttgatctttgatcttggaggaggtaccttcgatgtttccatattgacaatcgacgatggaattttcgaagtcaaagccacggcaggagacacgcatctgggcggcgaggacttcgataacaggcttgtaagtcacttcgtggaggaattcaaacgaaagcacaaaaaggacatttctcagaataagcgtgctgtgaggaggctccgcaccgcttgtgagagggccaaacggaccttgtcatccagtactcaggccaacctggaaatcgacagtctgtacgaggggattgatttctacaccagcattacacgggcccgcttcgaggagctgtgcgcggacttatttcgtggcacactcgaacccgtcgagaaggcactccgagatgccaaaatggacaaggccaaaattcatgacatcgttctggtcggaggctctacacggatccccaaggtgcagcggctgctgcaagattattttaatgggagggacttgaacaagtcaataaatccagatgaggcggttgcttatggcgccgccgtccaggcagccatactaatgggagacaagagcgaaaaggtgcaggatttactgcttctggatgtggcacccctgtccttggggctcgaaaccgccggtggagtcatgacagctctgataaaacgcaattctactattccaaccaagcaaacccagatttttaccacatactctgataaccagccaggagtgttaatccaggtgtatgaaggggagcgtgccatgaccaaagacaacaatttactgggtaggttcgacttgactgggatcccacctgcccctcgcggggtcccacagatcgaggttacttttgatatcgatgctaacggcattttaaatgtcaccgccacggataagtccactggaaaggtcaacaagatcacgatcactaacgacaaagggcggctcagcaaagaagagatcgaacgaatggtactggatgctgaaaaatacaaagcggaggacgtttag

SEQ ID NO: 190378 - DNA, 1926 bp, synthetic construct
  misc_feature 1..1926: note = Description of Artificial Sequence: Synthetic coding sequence
  source 1..1926: mol_type = other DNA
atggccaccgccaagggcatcgccatcggcatcgacctgggcaccacctactcttgcgtgggagtgttccaacatggcaaagttgagatcattgctaatgatcagggaaatcgcactaccccaagttatgtggcttttactgacacggaaaggctgatcggcgacgcagccaagaatcaggtcgccatgaatccccagaacacggtgttcgatgccaagagactgatcgggagaaaattcaacgaccctgtagtgcaggcagatatgaagctgtggccatttcaggtcatcaatgaaggcggtaaaccaaaagttctggtcagttataaaggcgaaaataaagccttttatcctgaggagataagcagcatggtccttacaaagcttaaagagaccgcagaggcatttctgggccacccagtgactaatgctgtcatcacggtgccggcctacttcaacgacagccagaggcaagccaccaaagatgctggcgtcatcgccggcctgaacgtcctccggatcataaacgagcctactgccgccgccatcgcttatggcctggataaaggcggtcagggcgaacggcacgtcctgatttttgatctcggtggcggcacctttgacgtcagcattctaactatcgatgatggaatcttcgaggtgaaggctactgctggcgacacccacctaggtggcgaggattttgataacagactagtgagccatttcgtggaagagtttaagagaaagcacaaaaaagatatctctcaaaacaaacgagctgtccgccgactgagaaccgcgtgcgaacgggctaaacgcaccctttcttctagcacacaggccaatctggaaatagatagtctgtatgaagggatcgacttctacacttcgataacacgggcacgtttcgaagaactctgcgctgacttgttccgtggcactttggagcctgtggagaaggccttacgcgacgcgaaaatggataaagctaagattcatgatatcgtcttggtaggcggttcaacaaggattccgaaagtgcagagactgctgcaagactactttaatggtcgggacctcaacaagtcgattaaccccgacgaagccgtggcatatggagcggcggtacaagccgctattctgatgggtgacaagtcagagaaagtgcaggatcttctgttgctggacgtcgctccactatcacttggactggagaccgcaggtggtgtgatgaccgccctcataaaacgaaactctaccatccctaccaaacagactcagatttttacgacttactctgacaaccaacccggtgtgcttatccaagtatacgagggggaaagggcgatgacgaaagataacaacctgttaggcaggttcgatctaactggtattccccctgccccgcgcggtgtgcctcagatcgaagttactttcgacatcgacgccaatgggattttgaacgtgacggctatggacaagtctaccggcaaggtgaataagattacaatcaccaatgacaagggacgcctgtcaaaagaagaaatcgagagaatggtgttggacgccgagaagtataaagctgaagacgaggtccaacgtgagaagatcgctgcgaagaacgcattggaaagctacgctttcaacatgaaaagcgtagtgagcgatgaaggccttaagggcaaaattagtgagtcagacaagaacaagatcttagataaatgcaatgagctactgtcatggctggaagtaaaccagctggccgaaaaggacgaattcgaccacaaaagaaaggaattggaacaaatgtgcaaccctataatcactaagctctaccaggggggatgcaccggtcctgcgtgtgggactgggtatgtacccggccggccagccaccggcccaactatcgaggaggtggattag

SEQ ID NO: 190379 - DNA, 699 bp, synthetic construct
  misc_feature 1..699: note = Description of Artificial Sequence: Synthetic coding sequence
  source 1..699: mol_type = other DNA
gccaagggcatcgccatcggcatcgacctgggcaccacctacagctgcgtgggggttttccagcacggaaaagtagagattatcgcaaacgaccagggcaatcgtaccacacccagttatgttgctttcacagacacggaaaggcttatcggagacgccggtgtaatcgccggactgaacgtgttacgaatcatcaatgaaccaacagcggctgcaatcgcttatggcctcgacaaaggtggtcagggcgaacggcacgtgttaatattcgacctggggggcgggacgtttgatgtgagtatcctcactatcgatgatggaatttttgaggtgaaagccacagccggagacacccacctcgggggagaagatttcgacaacagactagtttctcatttcgttgaagaatttaagaggaagcataagaaagatatttcacaaaacaagagggccgtgagacgactgagaaccgcctgcgaacgggcaaaacgtactctcagctcttccacgcaggccaatctggaaattgattcgctgtatgagggcattgatttctacacctccatcacgagggccagatttgaggaactctgtgccgacctgtttaggggaactctggagccagtggaaaagggagctccccccgcctctcctcggtgctcgggatgctttagaacgacctccatggatgtcatttag

SEQ ID NO: 190380 - DNA, 699 bp, synthetic construct
  misc_feature 1..699: note = Description of Artificial Sequence: Synthetic coding sequence
  source 1..699: mol_type = other DNA
gccaagggcatcgccatcggcatcgacctgggcaccacctacagctgtgtgggagtcttccagcatggaaaggtggaaatcattgcaaatgaccaaggtaatagaacaacaccaagctatgttgcattcacagatacagaaaggctaatcggtgacgccggggtcattgcaggcttgaatgtcctccgcatcatcaacgagcctacagccgctgccattgcctatggcctggataaggggggtcaaggagagaggcatgtgcttatcttcgatctgggcggcggcactttcgatgtttcgatcctcactatagacgatgggatctttgaggtgaaggctaccgccggggacacacacctcggcggtgaggatttcgacaatcgacttgttagccacttcgtggaggagttcaagcgcaagcacaagaaagatatctcacaaaacaaaagagccgtgcgacgccttcggaccgcatgcgaaagagccaagagaacccttagctccagcacgcaagcaaatctggagatcgattcattgtacgagggtatagatttttatacctccattacccgcgctcggtttgaagagctttgcgctgatctctttcgcggaacactcgagcccgttgagaaaggagctccacccgctagcccaagatgctccggatgcttccggactacttcgatggatgttatctag

SEQ ID NO: 190381 - DNA, 1926 bp, synthetic construct
  misc_feature 1..1926: note = Description of Artificial Sequence: Synthetic coding sequence
  source 1..1926: mol_type = other DNA
atggccaccgccaagggcatcgccatcggcatcgacctgggcaccacatacagctgtgttggcgtcttccagcatggaaaggtggagatcattgcaaatgaccagggaaacaggaccacaccttcttatgtggcatttacagataccgagagactcataggggatgcggccaagaaccaggtcgctatgaacccacagaatactgtgtttgatgcaaaaagactgataggtcgcaagtttaatgatcctgtggtgcaggctgacatgaaactgtggcccttccaagtgataaacgaaggagggaagccaaaagtgctcgtttcttacaagggcgaaaacaaagccttttatcccgaagagatctccagtatggttctgacaaaactgaaagaaactgcggaggcctttctggggcaccctgttaccaatgctgtgatcaccgtgccagcttacttcaacgattcccagagacaggcgacaaaagacgccggcgtaattgcaggactgaatgttttgcggattataaacgagcctactgcagccgccattgcctacggtctggataaagggggtcaaggagagaggcatgttttgatctttgacctaggggggggaacgttcgacgtttccattttgacgatcgacgatggtatcttcgaggtaaaagccacggccggagacacacatctcgggggagaggactttgataataggttggttagccacttcgtcgaggagttcaagagaaaacacaagaaggacatctcccagaataaacgagccgtgcgccggctgcgaacggcatgcgagcgcgctaagcgtacactgtcatcttctacacaggccaacctggagattgattccctgtatgaagggatcgatttctacacaagtatcacgcgtgccaggtttgaggagctgtgcgctgacctgtttcgtggcaccttggaacccgtggaaaaagcattgagggatgccaaaatggacaaggctaagatccacgacatcgtcctggtgggaggtagcacccgtatccctaaggtgcaacgcctactccaggactactttaatggcagagacctgaacaagtcaattaacccagatgaagctgtagcctatggggcggccgttcaggcggctatcctaatgggagacaaatcagagaaagtacaggacctgttattgttggatgtagcccccctgagtcttggactggaaaccgcgggaggggtgatgaccgctctgattaagcgcaactccaccatccccactaaacagactcagatatttaccacatatagcgacaaccagcctggagtcttgatccaggtatatgagggagagagggccatgactaaggataacaacctcctgggtcgttttgacttgaccggtatcccccccgccccaaggggcgttcctcagatcgaagtcacattcgatatagatgccaacggcatcctgaacgtgacagccatggataagagcaccggtaaagtgaataagattactattacgaacgacaagggccgcttatccaaggaagagattgaacgcatggttcttgacgccgaaaaatataaagctgaagatgaggtgcagcgtgaaaagatcgctgctaaaaacgccttagagagctatgcatttaatatgaagtcagtggtgagtgacgagggtctcaaagggaagatcagcgagagcgacaagaataaaattctggataagtgcaacgaactcctaagttggctggaggtgaaccagctagctgagaaagatgagttcgaccacaagcgcaaagaattggaacagatgtgtaatcctatcatcaccaagctgtatcagggcggttgcactggtcctgcctgcgggacgggatacgtgccagggagacctgcgaccggacctactattgaggaagtagattag

SEQ ID NO: 190382 - DNA, 1920 bp, synthetic construct
  misc_feature 1..1920: note = Description of Artificial Sequence: Synthetic coding sequence
  source 1..1920: mol_type = other DNA
atgagcgcccggggccccgccatcggcatcgacctgggcaccacctatagttgtgtaggagtgtttcagcatggaaaggttgagatcatcgctaacgatcagggcaacagaaccacgccttcatatgtcgcatttacagacactgagaggctaattggggatgccgccaaaaatcaggtggcaatgaaccccaccaacacgatttttgatgccaaacggcttattggccggaaatttgaggacgcaacagtgcagagtgatatgaagcactggccattcagagtggtcagcgaaggaggaaagccgaaggttcaagtcgagtataagggagaaacgaaaaccttcttcccagaagagatttcctccatggtcctgaccaaaatgaaggagatcgcagaagcttatttaggtggcaaggtgcattccgcggtgattaccgtgccggcctattttaatgatagtcagcggcaggccactaaggacgccggcaccatcacaggcctgaacgtcctgcgaattattaatgagcccacagccgccgccattgcttacggactcgataagaaagggtgtgccggtggggagaaaaacgtcctgatcttcgacttggggggggggacatttgatgtgtctatcctgactatcgaagacggcatctttgaagttaagtccaccgccggagatactcacctcggtggggaggattttgacaaccgcatggtgagccatctggccgaagagttcaagaggaagcacaagaaggacataggccctaataagagagccgtaagacgccttcgtactgcctgcgaaagagctaaacgcactctaagcagtagcactcaagcaagtattgagatcgactcactgtatgagggagtagacttctacacttctatcactagggcaaggttcgaagaactgaacgccgatctttttcgcggcacgctggaaccggttgagaaggctctgcgggatgccaagttggacaagggacagattcaggaaattgtgctcgttggcggctccacacgcattcctaagattcagaaactgttgcaggacttcttcaatggcaaggagcttaacaaaagtattaaccccgacgaagctgtagcctacggagctgccgtccaggccgccattttgatcggcgacaagtctgagaatgttcaagaccttctcttattggatgtgacacccctgagtctcggcatcgaaactgccggtggggtcatgacccctctgattaagagaaacaccaccatcccaaccaaacaaactcagacttttaccacatatagcgacaaccagagctctgtgctagttcaggtatatgagggcgagcgggctatgacaaaagacaataacttactcggaaagtttgacctcacgggcataccaccagctcccagaggtgtgccccagatcgaagtaaccttcgacattgatgccaacggcatactgaacgtcaccgccgccgacaagtccaccggcaaggagaacaaaatcacgataacaaacgacaaagggagattgtccaaggatgatatcgatcggatggtgcaagaggctgagcggtacaagtcggaggatgaggcaaacagggatcgggtggccgctaagaacgctctggaatcatatacctacaatatcaagcagacagtggaagacgagaaactgcggggtaagatctcagagcaggacaagaacaagattctggacaagtgtcaggaggttatcaactggctggatcgcaatcagatggcagagaaggacgaatatgagcacaaacagaaagagctcgagcgagtgtgcaaccccattatcagcaaattatatcagggtgggcctggcgggggaagcggggggggaggttctggtgcgtctggggggcccaccatcgaagaggtggattag

SEQ ID NO: 190383 - DNA, 1920 bp, synthetic construct
  misc_feature 1..1920: note = Description of Artificial Sequence: Synthetic coding sequence
  source 1..1920: mol_type = other DNA
atgagcgcccggggccccgccatcggcatcgacctgggcaccacctattcctgcgttggagtgttccaacacggcaaggtagaaatcatcgcaaatgatcagggaaacaggaccacccccagctatgtggcattcacggatactgaacggttgattggtgacgcagccaagaaccaagtggccatgaacccaacaaatacaattttcgacgctaaaagattgatcgggaggaagttcgaagatgccaccgtgcaatcagatatgaagcattggccttttagggtcgtgtcagagggtggcaaaccaaaggtgcaagtagagtataagggggaaacaaagactttctttccggaggaaatctctagcatggtcctaacaaaaatgaaagaaatcgccgaggcctatctgggagggaaagtgcactccgccgtgatcactgtgcctgcttacttcaatgatagccaaagacaggctacgaaggacgccggaacgatcacaggcttgaatgtgttgcggattataaatgagccgacagctgcagccatcgcgtatgggttagacaaaaaaggttgtgcaggcggcgaaaagaatgtgctcattttcgacctggggggaggcacgttcgacgtgagcattcttaccattgaggatggcatctttgaggtcaagtctacagcaggggatacacacttgggtggagaggactttgataaccggatggtctcccacttggccgaggagtttaagcggaaacacaaaaaagatatcgggccgaacaagcgcgcagtccggaggctgcggacagcatgtgaacgggccaaaaggacattatctagtagtacgcaggccagcatcgagattgatagcctctacgaaggagtggatttctatacatctatcacaagggcaaggtttgaggaactcaatgcggatttgtttcgcgggaccctggaacccgtagagaaagccctcagggacgccaagctggacaagggccagattcaagagatcgtgttggtgggcggaagtacccgaatcccaaagattcagaagcttctgcaagactttttcaatggtaaagaactcaacaaatccatcaaccctgatgaggcagtggcctacggagctgccgtccaagccgccattctgattggtgacaaaagtgagaacgtgcaggacttactcttgctggacgtcaccccgttgagccttgggatcgaaaccgctgggggtgtcatgactcctcttataaagaggaacaccaccatcccaacaaaacagactcagacattcactacctattcagataaccagagctccgtgttagttcaggtctatgagggcgagcgcgctatgactaaagataacaacttgctgggaaagttcgatttgacgggcattccgcccgctccacgaggagtgccccagatcgaagtgacgtttgacatagatgcgaacgggattttgaacgtgaccgctgcagataaatctacggggaaggaaaataaaataaccattacaaacgataaaggaaggctgtccaaggatgacatcgaccgcatggtgcaggaagcagaacgatacaaatctgaagatgaagcaaatcgcgatcgggtggcagccaagaacgccctggagtcctatacgtacaacataaagcagacagtggaagatgagaaactgagaggcaagatctcagaacaggacaagaataaaattctcgataaatgccaggaggtaatcaattggctcgatcgcaaccagatggcggagaaggacgagtatgaacataaacagaaagagctggagagagtatgcaatcctatcatctcaaagctttaccagggggggccaggcggcgggagcggaggtggagggagcggggcctcaggagggccaacgatcgaagaagtggattag

SEQ ID NO: 190384 - DNA, 1242 bp, synthetic construct
  misc_feature 1..1242: note = Description of Artificial Sequence: Synthetic coding sequence
  source 1..1242: mol_type = other DNA
atgagcgcccggggccccgccatcggcatcgacctgggcaccacctacagttgcgttggtgtatttcagcacggcaaagtagaaatcattgcaaatgaccaggggaatcggactacaccctcatacgtggctttcactgataccgaaagactcatcggtgacgctgccaaaaaccaggttgctatgaacccaaccaacacaatattcgacgctaaacggctcattgggagaaaatttgaggagctgaatgcggacctgttcaggggcactctggaaccagttgagaaggccctcagggatgcaaaactggataaggggcagatccaggagatagtactggtgggcggctctaccagaattccaaagatccaaaaactactccaggacttctttaatggcaaggagctcaacaaatctatcaacccagatgaggccgtggcctatggcgctgctgtacaggctgccattctgattggggataaatccgaaaacgtacaagaccttctactgctggacgtcactcctctctcacttgggatagagactgccggtggagtaatgactcccctcatcaagagaaacacaacgattccaactaagcaaacccagaccttcaccacttattccgacaaccagtcatccgtcttggttcaggtgtacgaaggcgagagggcgatgactaaggacaacaacctgctcgggaagttcgatctgaccgggattccgcctgccccacggggcgtaccgcaaattgaagtcacctttgacatcgatgcaaacggaattctcaacgtcacagcagccgataaaagtactgggaaagagaataaaatcactatcacgaacgacaaaggcaggctcagcaaggatgacatagatagaatggtgcaggaagccgaacggtataagtccgaggatgaggccaatcgggacagagttgcagctaaaaatgccttggaaagttacacatacaacatcaaacagactgttgaggatgaaaaactgaggggcaaaatctctgagcaagacaagaataagatactcgacaagtgccaggaggtgattaactggctcgatagaaaccagatggccgaaaaggacgaatacgaacataagcagaaagaacttgagcgggtgtgcaatcccataatcagcaaactttaccagggagggccgggtggtgggagcgggggtggcggcagtggcgcttccggaggtccaactatagaagaggtggactag

SEQ ID NO: 190385 - DNA, 2523 bp, synthetic construct
  misc_feature 1..2523: note = Description of Artificial Sequence: Synthetic coding sequence
  source 1..2523: mol_type = other DNA
atgagcgtggtgggcatcgacctgggcttccagagctgctacgtggccgtggcacgcgcggggggcatcgaaacaatcgccaatgagtacagtgaccgctgtaccccggcctgcatctcattcggccccaagaacagatctatcggtgccgccgccaaaagtcaggtgatcagcaacgctaagaatacagtgcaaggattcaagcggttccacggaagggcttttagcgacccgtttgttgaggcagaaaagtccaacttggcctatgacattgtgcagctgccaactggcctgaccgggatcaaagtgacgtacatggaggaagaaagaaattttaccaccgaacaggtcacagctatgctgctcagcaagctcaaagagaccgcggagagtgtgcttaaaaaaccggtggtcgattgcgttgtgagcgttccatgcttttacaccgacgctgaaaggcggtccgtaatggacgctacacagattgcaggattaaattgcctgcggctgatgaacgaaaccaccgccgtggccctggcctacggaatatacaagcaggacttacctgctctagaagaaaagcctcgaaatgtcgtgtttgttgacatgggccatagtgcttaccaggtgagcgtgtgtgccttcaatcgaggtaaattaaaggtgctggccaccgctttcgataccacactgggggggagaaagtttgacgaggtgttggtgaaccatttttgtgaagagttcggcaagaaatacaaacttgatattaagtcaaagatcagagccctgttgaggctatcacaggagtgtgagaagctgaaaaagctgatgtcggctaatgcctccgacttaccattgtccattgaatgtttcatgaacgatgtcgacgtgtcggggacaatgaatcgtggaaaattcctggaaatgtgcaacgacttgcttgctcgcgtggagcccccactgcgtagcgtgctagagcagaccaaactgaaaaaagaagacatttacgccgtggaaatcgtggggggagccaccagaatcccagccgtcaaagagaagatttccaagttttttggaaaagaacttagtacaacactcaacgccgacgaagcagtgacccggggctgtgctttgcagtgcgcgatcctctcccctgcatttaaggttagggaattctccatcaccgatgtggtaccttacccgatttctctaaggtggaactcccctgccgaagagggaagctctgattgtgaggtttttagcaagaaccatgccgcccctttcagtaaggttctcacattttatcgcaaggagccttttacgctggaggcctattattcctcccctcaggacttaccataccctgatccagcaatcgcgcagtttagtgttcagaaggtaacaccccagagtgacggaagttccagcaaggtgaaggtgaaagtacgagtgaacgtacatgggatattctccgtttcctctgcctctctcgtcgaagtgcacaaatccgaggaaaacgaagagcccatggaaaccgatcagaatgctaaggaggaggagaagatgcaagtcgatcaggaagaacctcatgtggaagaacagcagcaacagaccccagccgagaacaaagctgaatccgaggagatggaaacgagtcaagctggtagtaaagacaaaaagatggatcagccaccccaagctaagaaagcaaaagtgaaaacgtcaaccgttgatctccccattgagaaccagctcctttggcagattgacagggagatgctgaatttgtatattgagaatgagggtaagatgatcatgcaggataagctggagaaagaacgaaatgatgctaagaatgccgtcgaagagtatgtgtacgagatgagggataaactgagcggagaatatgaaaaattcgttagtgaggacgaccgcaattcctttaccctgaaactcgaggacacagaaaactggctatacgaggatggagaggatcagcccaaacaggtgtacgttgacaaattagccgaactcaagaacctcggccaaccaatcaaaattcgcttccaggaatcagaggagcgtccaaaattgttcgaggaacttggcaagcagatccagcagtacatgaagattatctcctctttcaaaaacaaggaagatcagtatgatcatctggatgctgccgatatgacgaaagttgaaaagtctaccaatgaggctatggaatggatgaataacaaactgaatctgcagaacaagcagtccctaactatggacccagtggtcaagtcaaaggagattgaagctaagataaaagagctgactagcacctgctctccgatcattagtaagccaaaacctaaggtggagccacccaaagaggaacaaaaaaatgcggaacagaacgggccggtggatgggcagggagacaatcctggcccacaggccgccgagcaaggtactgacacggccgtcccttcagacagtgacaagaaactgcccgagatggacatcgactag

SEQ ID NO: 190386 - DNA, 447 bp, synthetic construct
  misc_feature 1..447: note = Description of Artificial Sequence: Synthetic coding sequence
  source 1..447: mol_type = other DNA
atgagcgtggtgggcatcgacctgggcttccagagctgctacgtggccgtcgctcgggctggagggatcgaaactatcgcaaacgaatactctgaccggtgcaccccagcctgcatttctttcggcccaaagaataggagcattggcgcagccgccaagtctcaggtgatcagtaatgccaaaaataccgtacagggtttcaagagattccatggacgagccttttcagaccctttcgtggaagcggaaaagtcaaatcttgcatacgatattgtacagctgcccaccggcctgaccggaattaaagtgacctacatggaggaagaacaaaacggacctgtggacgggcagggcgacaacccgggtccccaggctgctgagcaaggcactgatactgcagttccatctgactcggacaagaagctgcccgaaatggacatagactag

SEQ ID NO: 190387 - DNA, 1422 bp, synthetic construct
  misc_feature 1..1422: note = Description of Artificial Sequence: Synthetic coding sequence
  source 1..1422: mol_type = other DNA
atgagcgtggtgggcatcgacctgggcttccagagctgctacgtggcagtagccagggcaggcgggatcgagaccattgccaatgagtactctgaccggtgcacgccagcctgtatcagttttggcccaaaaaacagaagtatcggtgcagctgccaagtcccaagtgatttctaacgcaaaaaacactgtgcagggcttcaagaggtttcatggacgggccttctcagatccttttgtggaggcggagaagtctaatcttgcatatgacattgtgcagttaccgacaggcttgacaggaattaaagtgacctatatggaagaggaaagaaatttcacaacagagcaggtgacagccatgctactgagtaaactcaaggagacggcagagagcgtgttgaagaagcccgttgttgactgcgtggtgtccgtcccctgcttctacaccgatgcggaaaggaggtctgtaatggacgcaactcagatagccggacttaattgtctgcgcttaatgaatgaaacaactgccgtggccctggcatacgggatctataagcaggacctgcccgccctggaggagaaaccacggaacgtcgtgttcgttgacatgggacacagcgcataccaggtttcagtgtgcgcatttaaccgcggcaaactgaaagttcttgccacagcctttgatactaccttgggggggcgcaagtttgatgaagtgttggtgaaccacttctgcgaagagtttggaaagaagtataaactcgatattaagtcgaagatccgggccctactccgcctcagtcaggagtgtgagaaacttaagaaattgatgtcagccaacgcctcagatttgccactttccattgagtgtttcatgaatgacgtcgacgtctcaggaaccatgaatagaggcaaattcttagagatgtgtaacgatcttctcgctagagtggaaccaccactgcgttctgtgctagagcagaccaagttaaaaaaggaggatatttatgccgtcgaaattgtgggtggtgccacacgcatacccgcagttaaggagaagatctctaaattctttggcaaagagttatcaaccaccctaaatgccgatgaggcagttactcgcggatgtgcactccaatgcgccatcctgtcgcctgctttcaaagtgcgtgaattcagtatcacagacgtggtcccttaccccatctcactgaggtggaattcaccagccgaggagggtagttcagattgcgaggtgttttcaaagaaccacgcggctcccttcagcaaagtccttaccttctatcggaaggagccgtttactttggaggcttattactcatcgcctggctttgctttgagccgatcctgctactccatcatcaaatcgctgctctcactcatggctcctgtccagaagtag

SEQ ID NO: 190388 - DNA, 1965 bp, synthetic construct
  misc_feature 1..1965: note = Description of Artificial Sequence: Synthetic coding sequence
  source 1..1965: mol_type = other DNA
atgaagctgagcctggtggccgccatgctgctgctgctgagcgccgccagagccgaagaagaggacaaaaaggaagatgtcggtacagttgttggcattgacctcgggactacatattcgtgtgtgggcgtgttcaaaaacggacgcgtggagattatcgccaatgatcagggaaatcggattaccccctcctacgtagcctttacccctgaaggtgagcggctgatcggagacgcagccaaaaaccagctgacatccaaccccgagaacacggtttttgacgccaagcgtcttattggccgaacatggaatgacccttctgtccagcaggatatcaaattcttgccttttaaggtagtagaaaagaagaccaaaccttatatacaggtggatatagggggaggccagacgaagaccttcgctcccgaggaaatcagcgcgatggttttgacgaagatgaaggaaacggcggaggcttatttgggaaagaaggtcacccatgccgtggtcactgtaccagcttactttaatgacgcgcagcggcaggctactaaagacgcaggaacaatcgctggtctaaatgtaatgcgcatcataaacgaaccgaccgccgccgccatcgcttatggactggataaacgtgaaggcgagaagaacattctcgtttttgatctcggcggtggaacattcgatgtgagtctgttgacaattgacaatggagtatttgaggttgttgccaccaacggggatacccatctagggggcgaggattttgaccagcgggtgatggagcactttataaagttgtataagaagaaaactggcaaggatgttcgtaaagacaatcgtgctgtgcagaaactgcgacgcgaagtcgaaaaagccaaacgggctctgagctctcagcatcaggctcgaatcgagatagaaagcttttacgaaggcgaagacttctctgaaactctgacgcgagcaaaatttgaagagcttaatatggacctgtttcggagtacaatgaaacctgtgcagaaggtcctggaggactccgacctgaaaaaaagtgacatcgacgagatagttctggtgggcggttctacccgcatccctaaaattcagcaactcgtcaaggaatttttcaacggaaaggagccgtctcgtggcatcaaccccgatgaagctgtcgcttatggggcagctgttcaagccggggtcctttcgggtgaccaggacaccggcgatttggtgctcctggacgtgtgcccactcaccttaggcatcgagactgttggaggggtgatgaccaagctgatcccccggaacactgttgtgccaactaagaagtcccagatcttttcgactgcatctgataaccagcctaccgttacaatcaaagtttatgagggggagaggccactgactaaagataatcacctactgggcacattcgatctcactggaatcccccccgccccccgtggagtcccccagatagaggtgaccttcgaaattgatgtaaacggcatcctccgggttacagctgaggataagggaactggtaataagaacaaaatcactattacaaacgatcagaaccgattaacgcctgaggagattgagagaatggtgaacgacgctgagaaatttgctgaagaagacaaaaagctcaaggagcgcatcgatacccgaaatgaacttgagtcatacgcctacagtctgaagaatcagatcggcgacaaggaaaaactcggaggaaagctgagttctgaggacaaggaaacgatggaaaaagccgtggaagagaaaatcgagtggttggagagtcatcaggacgcagatatcgaggattttaaggcgaagaagaaagagctcgaggagattgttcagcccatcataagtaaattgtatggtagtgccggtcccccccccacgggcgaggaagacacagcggagaaagacgaactgtag

SEQ ID NO: 190389 - DNA, 837 bp, synthetic construct
  misc_feature 1..837: note = Description of Artificial Sequence: Synthetic coding sequence
  source 1..837: mol_type = other DNA
atgaagctgagcctggtggccgccatgctgctgctgctgagcgccgctagagccgaagaggaagacaaaaaggaggacgtaggcacggtggtgggaatagatctcggcacaacatattcttgcgttggcgtttttaaaaatggccgggtcgaaattatcgccaatgaccagggcaaccgcattactccgtcgtacgtggcttttactcccgagggcgagcgtttaatcggagacgcggctaagaatcagttgacttcaaatccagagaatactgttttcgacgcgaagagactgattggacggacctggaatgacccaagcgtccagcaagatattaagtttctgccttttaaggttgtagaaaagaaaactaaaccgtatatacaagtcgatattggcggggggcagacaaaaacgtttgctcctgaagaaatctctgccatggtgctgacgaaaatgaaggagactgctgaagcctatctgggcaagaaagttactcatgcagttgttacggtgccggcttatttcaatgatgctcagagacaggcgacaaaggatgccggcactatcgccggcttgaacgtgatgcgtattattaatgagccaactgcagcagcaatagcttatggacttgataaaagagaaggtgaaaaaaacattttggtctttgatttgggaggtggaacctttgatgtgtctcttctgactattgataatggcgttttcgaggtggtcgccacaaatggcgacactcaccttggcggcgaagactttgaccagagagtgatggaacatttcattaagctgtataagaagaagaccttcctccgtccatag

SEQ ID NO: 190390 - DNA, 1932 bp, synthetic construct
  misc_feature 1..1932: note = Description of Artificial Sequence: Synthetic coding sequence
  source 1..1932: mol_type = other DNA
atgcaggccccccgggagctggccgtgggcatcgacctgggcaccacctattcttgtgtgggagtgttccagcagggccgcgttgagatactggctaacgaccaggggaatcggactacaccctcgtatgtggctttcactgataccgagagacttgtaggggatgccgccaagagccaggcagccttgaatccccacaacacagtctttgacgcaaaacggcttatcgggagaaagttcgccgatacgacggtgcagagtgacatgaagcactggccttttagggttgtaagtgagggaggtaagcccaaggtcagggtatgctatcgtggggaagataagacattctatccagaagaaatatcttctatggtcctatcaaaaatgaaggaaacagccgaagcttatctggggcaacccgtgaaacacgcagtaatcaccgtgccagcctactttaacgactcacagagacaggctacaaaggacgccggtgcaatcgcaggccttaatgtgctgcggatcattaatgagcctacggccgcggcaatcgcatatggtttagacagacgcggcgcaggagaaaggaacgtgttgatcttcgaccttggcggcgggacatttgatgtctctgtgctcagtattgacgccggcgtgttcgaggtgaaggccaccgccggggatacgcatttagggggcgaagattttgataacaggctggtcaatcactttatggaggagtttagaagaaagcatgggaaggacctgagcggcaataagcgggcgttgcggcgcctcagaactgcttgcgagcgcgctaagaggaccctgtcctcttctacccaggcgacgcttgagatcgattcgttatttgagggagttgatttctacacgagtattacccgtgcacgtttcgaggaactgtgttccgatctgtttagatctactcttgaacccgtggagaaggctttgagggatgccaagctcgataaggcgcagatccacgacgtggtgctagtaggcggctctacacggattcccaaggtccagaaacttctccaggacttcttcaacgggaaggaactgaacaaaagtattaaccctgatgaagcagtggcctacggagcagctgtgcaggcggccgtcctcatgggagataagtgtgagaaggtgcaggatctgctgctgctggacgttgcgcccttaagcttaggtctggagacagccggtggggtgatgacaacattgatccagcggaacgccaccatcccaactaagcagactcagacatttactacctattctgataatcagcccggtgtgtttatccaggtgtatgaaggggagcgcgccatgacaaaagataacaacctgctcggacgttttgagctttccgggattccacctgcacctaggggtgtacctcagatagaggttacgtttgacattgatgctaatggcattctgtcggtcacggcgacggaccgctcaactgggaaggcaaataagatcactatcactaacgacaagggtagactgtccaaagaggaagtggagcgaatggttcatgaggccgaacaatataaggcagaggacgaagcacaaagagatcgcgtggctgccaagaactctcttgaggcacatgtctttcatgtcaagggtagcctgcaggaagaatccctgagggacaaaattccggaagaggaccggcgcaaaatgcaagataaatgccgcgaggtattagcatggctggaacacaaccagttggccgaaaaggaagagtatgaacatcaaaaaagggagctggaacagatctgtaggcctatcttctcgagactgtatggcggtcccggcgtgccaggcggctcttcgtgcgggacgcaagcacggcagggggatcccagcacaggaccaattatcgaggaggtagactag

SEQ ID NO: 190391 - DNA, 1860 bp, synthetic construct
  misc_feature 1..1860: note = Description of Artificial Sequence: Synthetic coding sequence
  source 1..1860: mol_type = other DNA
atgcaggccccccgggagctggccgtgggcatcgacctgggcaccacatattcttgtgtggcatttaccgataccgagaggctggtgggggatgctgctaagtctcaggccgctctaaaccctcacaacaccgtttttgacgccaaaagactgattggcagaaagtttgctgacacaaccgttcaaagtgatatgaagcattggccttttcgggtggtcagtgaagggggcaaacctaaggtcagagtttgctatcggggggaggacaaaaccttttaccccgaggagatttcaagtatggttttatctaagatgaaagagacagccgaggcctaccttgggcagccagtaaagcacgccgtaatcacagtccccgcttactttaacgacagccaaaggcaggccactaaagacgccggcgctattgcgggattgaatgtcttaagaattatcaatgaaccgacagctgcagccatcgcctacggcttggatcgtagaggcgcaggcgaacgcaacgtattaattttcgacctggggggaggaacattcgacgtctccgttttatctatcgacgctggagtttttgaagtgaaggcaaccgccggcgacactcacctcgggggcgaggacttcgataacagactcgtcaatcattttatggaagagtttagacgtaagcatggaaaggacctcagcgggaacaagcgcgccctcagacgtctgcgcacagcctgtgaaagagcaaagcggactctgagttctagcacccaggctacactagaaattgactctcttttcgagggggttgatttctatacaagcatcaccagggcaaggttcgaggagctttgctctgacttgtttcgctctacactcgaaccagtggaaaaggcactccgtgatgctaaacttgacaaggctcaaatacacgacgtggtgctggtcggaggatccacaagaataccgaaagtgcaaaagcttctccaggatttcttcaatggcaaggagcttaacaaatctatcaaccccgatgaagccgtggcatacggcgccgccgtacaagccgccgtgctcatgggtgataaatgcgaaaaggtacaggatcttctgctgttggatgtggctcccctgagtctgggccttgaaacagccgggggtgtgatgacaactctcatccagcgcaacgctaccatcccgacgaagcagactcaaacattcactacctatagcgataaccagcccggcgttttcattcaagtctatgagggtgagcgtgccatgacaaaggacaacaatctgctgggcagattcgaactgtcggggattccgcccgcccctcgcggcgtcccgcagatagaggtcaccttcgatatagacgccaacggtattctgagcgtcactgccaccgaccgatctactggcaaggccaataagataaccattacaaacgataagggcaggctgtccaaggaggaggtggaaaggatggttcatgaagcagaacagtacaaagcagaggacgaagcccagagggaccgagtggccgcgaagaattctttggaggcccatgtgttccatgtaaagggtagtctccaggaggaatcactgagggataagatacctgaggaggaccggagaaagatgcaggataagtgccgagaagtcctggcctggctagagcataatcaactcgccgagaaagaggagtatgaacaccagaaaagagaattagagcagatctgtcgtccgattttcagtcggctctacggggggccaggagttccaggtgggagttcctgcggtacacaagcccggcagggagatcctagtaccgggccaataattgaggaggtggactag

SEQ ID NO: 190392 - DNA, 2337 bp, synthetic construct
  misc_feature 1..2337: note = Description of Artificial Sequence: Synthetic coding sequence
  source 1..2337: mol_type = other DNA
atgagcaagcggaagctgatccccaagctgagcatccagagccccgtactgcacacaaatctgaatgtgcagtccacccacccccctctgaaaaaagaggatctccatcgcattagtaaagacagtttggagagcgattctgagagcctcacccaagagattatgtgccattccgagtttgatgaccgcatcaggggcaacgggatggagccagactcattggacgaagaggagtcccctcgctggggctcactccatgaaatggaggaagaggcttccggaaaggcagcgcagatggcgagagaacagaatcaccacacatgggaccagggggcaaacaacagacaacaaccaattgaagataaatactcggacctgcgatacgatccaaactggaagtctaaaaaggaggaaggacagctactgtccgttgaggccttgcctgagagtactgattcatccttggagaaccttccgctggctccactctacccttcacaggaaacaagcatggaactgtccggtggaaagggtgagcagaaggaatccccccaatcagccgcctccctcctggggtccgagttcctcagccctaactacgagcatggcgcccggaggtccaagccatttagtgagttgtctgactccgacctcgaggagaaatctagcagcctgtcgccctatgtgaaatcttcgtcatcccataacgaggttttcctaccgggctctaggggcccccgaagaaggaaatctaagcaacatttcgtcgaaaagaataaactgacactgggcctccccactccaaaaacggactcgtatctgcaactacacaacaaaaagcgaggcgaatcccacccggagcagataagctaccctgtgagagtgacagacaagacatcgattcagaacgctaaagagatggaaaacgctgccatcgatccggaagataaatggcaccagagagcccaacagctgaaaaattatcaggagcactggtcgcagtacgaatcgaccaagagttctaacgtcccaaggggccagccttccgacatggtgaacgaccaccagccttcccgaaggcctgccaaactcaagatcaggaagcagtgtaaacatcaaaatgggcttaagtcctccaccactgaggaggttaccgcctcccagggaaatcaaaacaaccccccgagacagcagcagaatcagaataaacccctcgatacaagcacgaaacctgagtccattgttatcatgcacgcaagcaataacgacgtgcaggcttctcgcgcactgcgcagtcataacctgaaagaaactagtaacaccttcgcaccaccaaagcaggccttcgacaaggtgctcagtaaaaacagcaccgggtgcgacagtggactcaatgtgaacaaagaacgaggacacaaggatcaggaggagaaaaggttctcttatcagcagctccacactctatcagatatggacctcaacaacctgaatgaactgtcgaagaggcacgtgctcctgtcgcagaaaggaagtcaattcgtgtaccacataaacacccatgggtccacgaagaacaagaaacagctgaaacagccttacaccgagacaaaatacaggaacctcgagatgctttggaagtttcactcctcatcagactctcagacagtacgcgctagtcccgactcctggctgacgcagattatggagcagcaccagcaggccttagtccaactgactgatgtccaaccaagcgagggtgctctgtcatccgttaccctaccccccatcttatctagggtggaatctgaaagtcaactctctagtgaaaggtcccagcgcaatcaggtgaaaatctccagaagtaatagcgagggctacttgtttcagctggagaaaggaaaaaagcataaaaaacgtagtagcagcaaaaataccaaactgaagggctatcaaaagagagacgtgaagctggggggactcggtcctgacttcgagtccattagagataaaactcagaaactgatccagcaaaaagagtacgctaaacaggtgaaggagtataacatgaagactctgtctatcctgagtaagccccagactgaaaagacacagaagaagagtgccattccaagacagaaagctcttgagtacgccaaaactattcccaaaccaaaaccttcaaatctcacacaccaggcctctaaggaacagaaaaatcccacttacgcaggtaaagaagagagtctccccgaaatcagccttttggagatattacagaatcggcacgaaagggagaagcaggctgtcgccgcgttcaaggtgcttcatatagtgtag

SEQ ID NO: 190393 - DNA, 1482 bp, synthetic construct
  misc_feature 1..1482: note = Description of Artificial Sequence: Synthetic coding sequence
  source 1..1482: mol_type = other DNA
atgagcaagggccccgccgtgggcatcgacctgggcaccacctactcctgcgttggcgtttttcaacacggtaaggtggagatcatcgccaatgatcagggtaaccggactactcctagttatgtcgcttttaccgacacagagcgcctgataggagacgcagccaagaaccaggttgccatgaatcccaccaatacagtcttcgacgccaagaggctaataggccggagatttgacgatgcagtggtgcagagtgacatgaagcactggccctttatggtggtaaacgacgccgggcggccaaaagtccaggttgagtataaaggggaaacgaaaagtttctacccagaagaggtctcaagcatggtcttaaccaagatgaaagagatagcagaagcttatcttgggaaaactgtgacaaatgctgtagtgaccgttcccgcatactttaatgattctcagcgtcaggccactaaagacgcaggcaccatcgcaggactgaacgtgctgcgaatcattaacgagccaacagccgccgccatcgcatacggcttggacaagaaagtaggcgcagagcgaaacgtgctcattttcgacctgggcggaggcacatttgacgtatccatcctgaccattgaagacggaatcttcgaggttaaaagcacggcaggagatactcatcttggaggtgaggactttgacaatagaatggttaaccactttattgcagaattcaagcggaaacataagaaggacatttctgaaaataaaagggccgtgcgtcggctgcgcactgcttgcgagcgagctaagcggacactgtcctcatctacccaggcctctatcgagatagacagcctctacgaggggatcgacttctacacatcaatcactcgggccaggttcgaagagttgaacgcagatctttttaggggcactttggatccggtcgagaaggctctgcgcgatgccaaattagacaaatcccagattcacgacattgtactggtgggcggcagcacccgcattccaaaaatccagaagttgctgcaggacttctttaacgggaaagagttgaataagtccataaatcccgacgaggcagtggcttacggagctgctgttcaagctgcaatcctgtcgggcgataaaagtgaaaacgtgcaagatctgctgctactagacgtaactccactgtctttgggcattgagaccgccgggggagtcatgactgtgttgataaagagaaataccacaatcccgacaaaacaaactcaaacgtttaccacatactcggataaccagcccggcgtgctgattcaggtatatgagggagagagagctatgaccaaagacaacaacctactgggcaaatttgaactgaccggtatgccgggaggcatgcccggcggattcccagggggcggggctccccccagcgggggagcatctagcggacctactatcgaggaggtagactag

SEQ ID NO: 190394 - DNA, 1884 bp, synthetic construct
  misc_feature 1..1884: note = Description of Artificial Sequence: Synthetic coding sequence
  source 1..1884: mol_type = other DNA
atgagcaagggccccgccgtgggcatcgacctgggcaccacctactcctgtgtcggagtcttccagcacggcaaggtggagattatagctaacgaccagggcaatcgcactacgccaagctatgttgcgttcacagacaccgaacgtctgatcggagatgccgctaagaaccaggtagccatgaacccaacaaacacagtgttcgatgccaagaggcttattggccgcaggttcgatgatgcggtggtgcagtccgatatgaagcactggccttttatggtcgtgaacgatgctggacgccccaaggtgcaggtggagtacaaaggcgagactaaatctttttacccggaggaggtctcatcgatggtgctcacaaaaatgaaggaaatcgccgaagcatacttggggaaagccacgaaggatgcaggcactatcgccggactgaatgtcctccggatcattaacgaaccaactgcggctgccatcgcatatggcttggacaagaaggtaggggctgaaaggaacgttttgatttttgatttaggcggggggacctttgatgttagcattttaaccatcgaagatgggatctttgaagttaaatctacggcgggcgacacgcacctgggcggagaggatttcgataacagaatggtgaatcactttatcgccgagtttaaacggaaacacaagaaagacattagtgagaataaacgggctgtccgcaggcttcgcacagcttgtgagcgagcaaagcgcacattaagtagtagcacacaggcatcaattgagatcgactcgttgtatgaaggcatcgatttctacactagcattacacgggcccgattcgaagagcttaacgcagatttgttccgaggcactctggaccccgttgaaaaagctctgagagacgccaagctggacaagtcacagatccacgatatcgtgttagtgggaggttccacccgtatccccaaaattcagaagctcttgcaagacttttttaacgggaaagaactcaataaaagcatcaacccagacgaagctgtagcgtacggggccgcagtccaagccgctattctgagtggcgacaagtctgagaatgttcaggatctactgctgttagacgtgacacccctgtctcttggtattgaaaccgctggcggcgtgatgaccgtcctgatcaagaggaatactactatcccgactaagcaaacccagactttcacgacatattcagacaaccagcctggtgttctgattcaggtgtatgaaggagaacgggccatgacaaaggacaataatttactgggaaagtttgaactgaccgggattcccccagctccccgcggggtgccacagatagaagtgacctttgatattgatgccaacggaatccttaacgtgagcgccgtggacaagtccactgggaaagaaaataagattacaatcactaatgataagggcagactcagtaaagaagacattgagcggatggtgcaggaggcggaaaaatataaggctgaggacgagaagcagagagacaaggtgtcaagcaagaacagcttggagtcgtacgcctttaatatgaaggctaccgtcgaggacgaaaagttgcagggaaaaattaatgacgaagacaagcagaagattctggacaagtgcaatgaaatcataaactggctggacaagaaccagaccgctgagaaggaggagtttgaacatcagcagaaagagctcgagaaggtatgcaaccccataattaccaagctctatcagtccgctggaggaatgcccggaggtatgccaggggggtttccgggaggtggcgcccccccttctgggggcgccagctccggaccaaccatcgaagaagtggattag

SEQ ID NO: 190395 - DNA, 1941 bp, synthetic construct
  misc_feature 1..1941: note = Description of Artificial Sequence: Synthetic coding sequence
  source 1..1941: mol_type = other DNA
atgagcaagggccccgccgtgggcatcgacctgggcaccacctactcctgtgtgggagtgttccagcatggtaaggtcgagattatcgcaaacgatcagggaaacagaactaccccatcctacgtcgcctttacagacactgagcgactgatcggcgacgctgctaagaatcaagttgccatgaatccaacaaacaccgtgtttgatgctaaaagactaatcggcaggcgcttcgatgatgcggtggtgcaaagtgacatgaagcattggcctttcatggttgtgaatgatgccggaaggcccaaagtgcaggtggagtataaaggcgagaccaaatctttttatcccgaagaggtgtccagcatggtgctgactaagatgaaagagattgcagaggcttacctgggaaagacagtgaccaacgctgtcgtgacagtgccagcatacttcaatgactctcagcgccaggcaaccaaggacgcgggcacaattgctggtcttaacgtgctgagaatcatcaatgaacctaccgcagcggcaatcgcttacggtctggataagaaggtgggtgcagagagaaacgtactaatcttcgatttaggtgggggaacatttgatgtgtccatcctgaccatcgaggatgggatattcgaggtcaagagcacagctggtgacacccatctgggcggagaagactttgacaatcgcatggtaaatcacttcattgctgagtttaagagaaagcataagaaggacatctccgagaacaaaagggctgtcaggcgactgagaacggcatgcgagcgagcgaagaggaccctttcatcatctacccaggcaagcattgagattgattccctgtacgaaggtattgacttctatacttccatcactcgggcccgcttcgaagagcttaacgctgatctctttcgcggaacattggatcccgttgaaaaagcgctgcgcgacgcgaagctggacaagagccagattcacgacattgtccttgtgggcggcagtactcgaatacccaagatccagaagctgctccaggacttcttcaatgggaaggagctcaacaaatccatcaatcccgacgaggccgtcgcttatggcgccgcagtccaggccgccatattaagcggcgataagagcgaaaatgtccaagacctgctgctcttggacgttacacccctctcactaggaatcgagacagctgggggcgtcatgaccgtgcttattaagcgcaatacaaccatccccacaaaacagactcagactttcactacatatagcgacaaccagcctggcgtgctgatccaggtgtatgagggtgagagggcaatgacaaaggacaataatctcctgggaaaatttgaattgactggaattccccccgcacctcgtggggtgccgcagatcgaagtcacctttgacatcgacgccaacggtatcttgaacgtctctgctgttgataaatcaacaggcaaggaaaacaagatcactatcactaatgacaagggtcgattgagcaaagaggacatcgagcgcatggtacaagaggctgagaaatataaagcagaggacgagaaacagcgggataaggtaagtagcaaaaactcacttgagtcttatgccttcaatatgaaggctacagtggaagatgaaaagttacaggggaagataaacgacgaggataagcagaagatccttgataaatgcaacgaaatcataaactggctggataaaaatcagacagcggagaaagaggaattcgagcatcagcagaaggagctggagaaagtctgcaacccaattataactaagctttaccagtcagccgggggtatgcctggagggatgcctggtgggttccccggggggggagcgccaccatcaggtggagcctcatcaggaccaacaattgaggaggtagattag

SEQ ID NO: 190396 - DNA, 1503 bp, synthetic construct
  misc_feature 1..1503: note = Description of Artificial Sequence: Synthetic coding sequence
  source 1..1503: mol_type = other DNA
atgagcaagggccccgccgtgggcatcgacctgggcaccacctactcctgtgtcggcgtcttccagcacggcaaagtggaaatcattgccaacgatcagggaaaccgcacaactcctagttacgttgcctttacggacaccgaacgtctgatcggagacgctgccaaaaaccaagtcgccatgaaccctacaaatacagtgttcgatgcaaaacgcctgattggacggaggttcgacgatgctgtggtgcaatccgatatgaaacactggccctttatggtggtgaatgacgccggcagaccaaagcataaaaaggacatatcagagaacaaaagagctgttaggaggctgagaaccgcctgtgaaagagcaaagaggaccctttctagctctactcaggcttctatcgaaattgattctctgtacgaaggaattgacttttacacttctattacccgggcacgttttgaagaactgaatgcagatctgttcaggggcaccctggatcccgtcgagaaggctctgcgcgacgccaaattggacaagtcccagatccacgacatcgtcttagtcggcggcagcacaaggataccaaaaattcagaaactgctgcaggatttttttaatggcaaagaattaaacaaaagtatcaatccagatgaggctgtggcatacggcgccgccgtgcaggcagcaattctgagcggcgacaagtctgagaacgtccaggacctgttgttgctcgacgtcacgccactgtccctgggtatcgagactgccgggggtgtgatgaccgtgcttattaaaagaaatactaccattccaactaaacagacccaaactttcacaacctacagcgataaccagcctggagtactgattcaggtgtacgaaggcgaaagagccatgactaaggacaacaacctgctgggcaaatttgaactaactggcatcccaccagctcctaggggtgtccctcagatcgaagtcactttcgatatcgatgccaacggcattctgaatgtgagcgctgtcgataaaagcacagggaaggagaataagatcactataacaaatgataagggacgcctctccaaagaggacatagagcgtatggttcaggaggcagaaaaatataaggctgaggacgagaagcaaagggataaagtgtcgagcaagaattccctggaatcctacgccttcaacatgaaagctactgtggaggacgagaaattgcaggggaagatcaacgacgaggacaaacagaaaatcctcgataaatgtaacgagataattaactggctggacaagaatcagactgctgaaaaagaagagtttgaacaccagcagaaggagctggagaaagtctgcaatccgattatcacaaaactctaccagagcgccggcggaatgcccggaggaatgcccggggggttcccggggggaggagcccccccaagcggaggagctagctcaggacccaccatcgaagaagtggactag

SEQ ID NO: 190397 - DNA, 1233 bp, synthetic construct
  misc_feature 1..1233: note = Description of Artificial Sequence: Synthetic coding sequence
  source 1..1233: mol_type = other DNA
atggtgaaccacttcatcgccgagttcaagcggaagcacaagaaggacatcagcgaaaataaaagggcggtcagacgattgagaactgcgtgtgagcgtgctaaaaggaccctttccagcagcacacaagccagcattgaaattgatagcctgtatgagggaattgacttttacacctccatcacgagagctcggttcgaggaactgaacgccgatctctttcgaggaacgctggaccctgttgagaaagctctgcgggacgccaaactcgataaaagccagattcacgatattgttcttgtggggggatccacgcggatccccaagatacagaagctgttacaggacttctttaacggtaaagagctgaataaaagcataaaccccgatgaagctgtggcctacggtgccgcagtgcaagcagctatcttatccggtgataaatctgagaatgtgcaagatctcttattactggatgtaacgcctttaagtctaggcatcgagaccgctggaggagtcatgacagttcttattaaacgtaatacaactattcctacaaaacaaacccaaacgtttactacatatagcgacaatcagcctggggtactcattcaggtgtatgaaggagagagagccatgaccaaggacaataaccttctggggaagttcgaacttacgggcataccccccgccccacggggggtgccccagatagaagtgaccttcgatatcgatgctaacggaattctgaatgtcagcgctgtggataagagcactggcaaggagaataagatcaccattacgaatgataagggaaggttaagtaaagaagacattgaacgcatggtccaagaagcagaaaagtacaaggccgaagatgaaaagcagcgtgacaaagtgtcttccaagaattctttagagtcgtacgcattcaatatgaaagcgaccgtcgaagacgagaagctgcaggggaagatcaacgacgaggataagcagaaaatcctggataaatgcaatgagatcatcaactggttagataaaaatcagaccgcggagaaggaagaatttgagcatcaacaaaaagagctggaaaaggtgtgtaacccaattatcaccaagctctatcagagtgccggcgggatgccgggaggcatgcctggagggttccccggaggcggagctccgccatcagggggggcttcttccggccctaccattgaagaggtggactag

SEQ ID NO: 190398 - DNA, 1941 bp, synthetic construct
  misc_feature 1..1941: note = Description of Artificial Sequence: Synthetic coding sequence
  source 1..1941: mol_type = other DNA
atgagcaagggccccgccgtgggcatcgacctgggcaccacctactcatgtgtaggcgtgtttcaacacggtaaggttgaaatcatagccaatgaccaaggcaaccgtaccaccccttcctatgtggcctttactgatactgagagactgattggggatgccgccaagaatcaggttgctatgaaccctacaaataccgtctttgatgctaagcgcctgatagggagacgattcgatgacgctgtggtccaatcagacatgaaacactggcccttcatggtagtaaacgatgccggccggcctaaagtccaggtcgagtataaaggcgagacaaagagtttttatcccgaagaggtcagcagcatggttctgacaaaaatgaaggaaatagctgaggcctacctgggaaaaaccgttacgaacgccgtcgtgactgttccggcctatttcaacgactcccagcggcaggccactaaggacgccgggacaatagctgggctgaatgtgctccgcatcatcaacgagcctaccgcggccgctatcgcctacggcctggataaaaaggtaggggccgaacgcaatgtgctcatcttcgacttaggcggagggaccttcgacgtgtcaattctgaccatagaggatgggatctttgaggtcaagagtacagctggagacactcatcttgggggcgaagactttgataacagaatggtgaatcactttatcgccgagtttaagaggaaacataagaaagacattagtgagaataagagagcggtgagaaggttgagaaccgcctgtgagcgggcaaagcgtactctttcatctagcacccaggcctctatagaaatcgatagtctctatgagggaatcgacttttatacttctattactagagcaagatttgaggagcttaacgcggacctgttccgcggtaccctcgaccccgtagaaaaggcattgagggatgcaaaactcgataagtcccaaattcacgacattgttctggttggcggatccacccgtattcccaagatccagaagctgctccaggacttttttaatggcaaagagctgaataaatcaatcaacccagatgaagctgtggcctatggcgccgccgtgcaggccgcaatcctatccggtgataaatccgaaaacgtacaggaccttcttttacttgatgtgacaccactatctttagggatcgagactgcaggaggggtcatgaccgtgctgatcaagcggaatacaacaatcccaaccaagcagacacagacgtttacaacttattccgacaaccaacccggggttctaatccaagtatacgagggtgaaagagcgatgacaaaggataataatctcctagggaagtttgaactgactggcatccccccagcaccccgaggggtgccacaaattgaagtcacattcgacattgatgctaatggtatactaaacgtgtcggcggttgacaagtctaccggaaaagagaacaagattactatcacaaacgataaaggaagactgagcaaggaagatatcgagcggatggtgcaagaagctgaaaagtacaaggcagaggatgagaagcagcgggataaggtgtccagcaagaattcactggaaagttacgcatttaatatgaaagctactgtggaggatgaaaaactccaggggaaaattaacgatgaggataagcagaagattcttgataagtgcaacgagattattaattggctggacaagaaccagaccgccgagaaggaggagtttgaacatcagcagaaagaactggagaaggtctgtaaccctatcatcacaaaactgtatcagtcagccgggggcatgcctggcggcatgcccggcggcttcccgggagggggagctcctccatctgggggtgcatcctccggtcctactattgaagaagtggactag

SEQ ID NO: 190399 - DNA, 2040 bp, synthetic construct
  misc_feature 1..2040: note = Description of Artificial Sequence: Synthetic coding sequence
  source 1..2040: mol_type = other DNA
atgatcagcgccagccgggccgccgccgcccggctggtgggcgccgcagcctcccgaggccctacagcagcgaggcatcaagatagttggaacggtttatctcacgaggcctttaggctggtctctagaagggattacgccagcgaggccatcaagggcgccgtggtgggaatcgacctgggtactacaaacagctgcgtcgcagtcatggaaggcaaacaggccaaggtgctcgagaacgccgagggcgcacgaactacaccctccgtggtcgcttttacggcagatggagagcggttagtgggaatgccagctaaacgacaggcagtgacaaatcctaataacaccttttatgcgacaaaaaggctgatagggaggcgctatgatgaccctgaggtgcagaaagatattaagaatgtgcctttcaagattgtgcgagcttctaatggcgatgcttgggtcgaggcacacgggaagctttactcgccttcacagatcggagcatttgtgctaatgaaaatgaaagagacagcagagaattatctgggccacacagctaaaaatgctgtaataactgtccctgcctacttcaatgattcgcaaaggcaagccactaaggacgcgggccagatcagcggactaaatgtactgcgcgttatcaatgagcccactgccgccgctctcgcttacggactagacaaaagcgaggacaaagtgatcgctgtttacgacctaggcggtgggacattcgatatcagtatcctggaaattcaaaagggcgtcttcgaggtcaaatcaactaacggggacaccttccttgggggagaagactttgaccaggcgttgcttcgccatatagtaaaagaattcaagcgtgagaccggagttgaccttaccaaggacaatatggctctacagcgcgtccgcgaagcagccgagaaggccaaatgcgaactctccagctcagtgcaaaccgatattaatctgccctaccttaccatggactcctccgggcccaagcacctgaacatgaaactgacccgagcccagtttgaagggattgtcaccgatctgataagacgcactatcgctccttgtcagaaggccatgcaggacgccgaggtgtcgaagagtgacatcggtgaagtcatcttagtgggaggaatgaccaggatgccaaaagtacaacaaaccgtgcaagacctcttcggcagagccccaagcaaggcggtcaaccctgatgaggccgtcgccatcggagcagccattcaaggaggggtcctcgccggcgatgtcacagatgtcctattgctggacgtgacgccactgtcactgggaatcgaaaccttaggaggggtgtttactaagcttattaatagaaatacaaccattccgactaagaagtcacaggttttcagcaccgccgccgatggacaaactcaggtggaaattaaagtgtgccaaggagaacgagagatggcaggcgataacaagcttctcggtcaattcactcttatcggcattccgccagcccctagaggggtgccacagattgaggttactttcgacattgacgccaatgggatcgtgcatgtgagtgcaaaagataagggaacaggacgggaacagcagatcgttatacagtcttctggcgggctttcgaaggacgacatagagaacatggttaagaacgctgaaaagtacgccgaagaagaccggagaaagaaggagagagtggaggccgtcaacatggcggaaggaatcatacacgatacggagacaaagatggaggagtttaaagaccaacttcccgcggacgagtgcaacaaattgaaagaagaaatttccaaaatgagggaactactcgccaggaaggatagcgagacgggggagaatatccggcaggccgcctccagcctgcaacaggcatcactgaagctgttcgaaatggcctacaagaagatggctagcgagagagaagggtccggaagcagcggtacaggcgaacagaaagaagatcaaaaagaggaaaagcaatag

SEQ ID NO: 190400 - DNA, 1998 bp, synthetic construct
  misc_feature 1..1998: note = Description of Artificial Sequence: Synthetic coding sequence
  source 1..1998: mol_type = other DNA
atgatcagcgccagccgggccgccgccgcccggcaccaggacagctggaacgggctctctcacgaggccttcagactcgtctcgaggcgcgattatgcctccgaagccataaaaggcgctgtcgtgggcatagacttgggtacaactaatagctgtgtggccgtaatggagggcaaacaggcaaaagtgctggaaaacgccgagggtgcacgaacaacacctagcgtggtcgcctttactgctgatggcgaaagattggttgggatgccagcaaaacgacaagcagttactaaccccaataacacattctatgctacaaaaaggctgatcggcaggcgctatgacgaccctgaggtgcagaaagatattaagaacgtaccattcaaaattgtccgcgcgtccaatggtgatgcctgggtagaggcacacgggaagctatactcgcccagccagataggtgctttcgtactcatgaagatgaaagagaccgcagagaactacctgggacacacagcaaaaaacgctgttatcacagtgccagcctatttcaatgacagccaacgacaggccacgaaggacgccgggcagatatcaggcttgaatgtactgcgggtgatcaatgaaccaacagctgcagcactcgcctacggactggacaaatcagaggataaggtcattgcggtgtacgacctgggtggtgggaccttcgatatttcaattctggaaatccagaaaggcgttttcgaggtaaaatccaccaatggcgatacattcttgggtggagaggattttgatcaggcactgctccgccacatagtgaaggaattcaagagagagacaggagttgatcttacaaaggacaatatggccctccaacgcgttagagaagccgctgagaaggcgaagtgcgaattatcctcatcagtgcagacagatattaaccttccctatctaaccatggacagcagtggccccaagcatctaaacatgaagctaacacgtgcccagttcgagggcatcgttacagatctgatccggagaacaattgcaccttgccaaaaggctatgcaggatgctgaggtgtccaaatccgatattggggaagttattctggtcggaggaatgacaagaatgcctaaggtccaacagacagtacaggacctgtttgggcgagccccgtccaaggccgtgaatccagacgaggcggtcgcaatcggggcagcgattcagggcggagtgcttgctggagacgttaccgacgtcctactgcttgacgttacccctttatctctcggcattgaaacactagggggagtctttactaaactgattaatcggaatactacaatccctaccaagaagtcccaggttttcagtacggctgctgatggccagacccaggttgagattaaagtttgtcagggagaacgggagatggccggcgataataagctcctgggacaattcactctgatcgggattccacccgcccctaggggagtacctcagatcgaggtgactttcgacattgatgcaaatggcattgtacacgtgtcagcgaaagacaaaggaaccggtcgagaacagcaaatcgtgatccaatcatccggcggcctgtccaaagacgacattgagaatatggtgaagaatgctgagaaatacgctgaggaagatagacggaagaaggagagagtggaagcagtgaatatggcggagggcataatacacgacaccgaaaccaagatggaggaattcaaagaccaactgcctgctgacgagtgcaacaaacttaaagaggagatttccaagatgagggagttactcgcaagaaaggacagtgagaccggtgagaatatccgacaagcggcaagtagcctgcagcaggcgagcctgaagctgtttgaaatggcctataagaagatggcttctgagcgggaaggctcaggctcgtcagggacaggcgagcagaaagaggaccagaaagaggagaagcagtag

SEQ ID NO: 190401 - DNA, 1899 bp, synthetic construct
  misc_feature 1..1899: note = Description of Artificial Sequence: Synthetic coding sequence
  source 1..1899: mol_type = other DNA
atggccctggtgatgcggctgctggacctgttccagggcggcatcatgcaccagaaacaaagtcgggagcagcttctcgtcttaatctgggtgcttcccacccctgcctggcagctgtggaaggtcaacaagcaacggtgttggcgcatgcctaaagtcccagagccccccctgcagctttggcccttacagcagatggtatcagaccttctcgagtgcagacccagcgatcgcttgtcccccacccaaaccattcattttatgttaccatcggtctcccttgccggagatatgatgatcctgaaatacaggaaaactctgaagatgttccctttaaagctcagcgtgccgcccatggtgatgcccgtgctgatgaagatgaaagagacagccgaaaactacttagggcatacagccaaaaacgcggtgatcactgtgcctgcctatttcaacgattcccaacgacaagccaccaaggatgcgggccagattagcgggcttaacgttctcagggtgataaacgagccgacagcagctgctttggcctatgggttggacaagtccgaagataaggtgattgccgtgtacgacctcgggggaggaacttttgatatttcaatcctcgagatccagaaaggagttttcgaggtcaaatccactaatggagacacgtttttgggcggggaggactttgatcaagctctgctcaggcacatcgtgaaggagtttaagcgcgaaacaggcgtggaccttacaaaggacaatatggcactccagagggtccgggaagcagcagagaaggccaaatgtgaactctcatcatcagtccagacggacattaacctgccctatctgactatggatagttcggggccgaaacacctcaatatgaagttaacacgtgctcagttcgagggtatcgtgactgacttgatacggcgcaccattgcgccatgccaaaaggccatgcaggatgcggaggtgtccaaatccgacatcggagaggtcatcctggttggaggaatgacaaggatgccaaaagttcagcagaccgttcaggacctcttcgggagggctcccagcaaagcggttaaccccgacgaagcggtggccattggcgccgcaatccaaggcggggtgcttgctggcgacgttactgacgttcttttgttagatgtcacaccccttagcctaggaatcgagaccctaggcggcgtattcaccaagcttatcaacagaaacacgactatacccaccaagaagagtcaggtttttagcaccgccgcggatggccagactcaggtggagatcaaggtctgccagggcgagcgcgaaatggcaggggataataagctgctaggacagttcacactgataggtataccccccgctccccgtggcgtgccccagatagaggtgactttcgacatcgacgcaaacggcatcgtccatgtctccgcaaaagataaggggaccggccgggagcaacagatcgtgatccaatccagcggcggcttgtctaaggacgatatcgaaaatatggtcaagaacgcagagaagtacgccgaggaagatagacgtaagaaggaacgtgttgaggcggtgaatatggccgagggcattattcacgacacagagaccaagatggaggaatttaaggatcagcttcccgccgacgaatgtaacaagcttaaagaagagatctctaagatgagagagctgttagcacgaaaagactccgaaaccggagaaaatatccggcaagccgctagctctctgcagcaagcttctcttaagctgttcgaaatggcatataaaaagatggctagcgagcgggagggctccggcagcagcggtaccggtgagcagaaagaagatcagaaggaggagaaacagtag

SEQ ID NO: 190402 - DNA, 2175 bp, synthetic construct
  misc_feature 1..2175: note = Description of Artificial Sequence: Synthetic coding sequence
  source 1..2175: mol_type = other DNA
atgcccgaggaggtgcaccacggcgaggaggaggtggagaccttcgcctttcaggccgagatcgctcagcttatgagcctcattatcaatactttttatagcaacaaggaaatcttcctgcgggaactgattagtaacgcctctgacgccctcgacaaaatccggtatgagagtctaactgatccatccaaattggattctggtaaggaacttaagatcgacattatcccaaatccccaggagcgcacattaacattggtggacacaggcatagggatgactaaagcagacctgattaataatctaggaacgatcgccaaaagcggaaccaaggcgttcatggaagccctacaggccggagccgatatcagtatgattggtcaatttggagttggcttctactcagcatatcttgtggctgaaaaagtggtggtgattacgaaacacaatgacgacgaacagtatgcctgggagagctctgctggtgggagctttaccgtacgagcagaccatggcgagcctatcgggaggggaacaaaagttatcctgcacctgaaggaggaccaaactgaatacctagaggagcgcagagtcaaggaggtagtgaaaaaacatagccaattcattggataccccatcacactgtatcttgaaaaggagagggagaaggaaatttcggacgacgaggccgaagaagagaagggggagaaagaggaggaagataaagatgatgaggagaagcccaagatcgaggatgtcggcagcgacgaagaagatgattccggaaaggacaagaaaaagaagaccaagaagattaaagagaaatacatagaccaagaagagctgaataagactaaaccaatttggacacgtaatcctgatgacatcacccaggaagaatatggggagttctataagtctttgacgaacgactgggaggaccacctggccgtcaagcatttctcagtggagggtcagcttgaatttagagctctgctgtttataccgcggcgggctcccttcgatctcttcgagaataagaaaaagaaaaacaacataaaactgtacgtccggagggtgttcattatggactcttgtgatgagctgattccagagtatcttaacttcatacgcggggtggtcgactctgaggatctcccgctgaacatctcacgagaaatgctacagcagtccaagatcctgaaggtgattcggaagaacattgtgaaaaagtgccttgagctattttctgagctagcagaagacaaggaaaattataagaagttctacgaggccttctccaaaaacttgaagttaggcattcatgaggattctacaaatcgacggcggctatccgagttgttgcgctaccatacgagccagtcaggcgacgaaatgacttccctgagcgaatatgtttctcgcatgaaggaaacccaaaaatctatatattacatcaccggggagtctaaagaacaagtagctaacagcgctttcgtggaacgggtaagaaagcggggatttgaggtggtgtacatgacagagcctatcgatgaatactgcgttcagcaactgaaagagtttgacgggaagagcctggttagtgtgacaaaggaggggcttgagctgcccgaggacgaagaggaaaaaaaaaagatggaagaatcaaaggctaaattcgagaacctttgtaagttaatgaaggaaatcctggacaagaaggtagaaaaagtcaccatctctaacaggctcgtgtcctcaccgtgctgtatcgtcacgagcacctacgggtggactgctaatatggagcgcataatgaaggcgcaggccttacgagacaatagtacaatggggtacatgatggccaagaaacatcttgaaattaatccggatcacccaatagtggaaacattacgacaaaaggctgaggcagacaaaaacgacaaggcagttaaagatttggtcgtactgctgtttgaaacagcccttctctcatccgggttttctctggaagatcctcagacacattctaaccgtatataccgtatgataaagctcggattaggcattgacgaggatgaggtggctgccgaagaacccaatgctgctgttccagatgagatcccaccccttgagggggacgaggacgcttctcggatggaggaggtcgactag

SEQ ID NO: 190403 - DNA, 2175 bp, synthetic construct
  misc_feature 1..2175: note = Description of Artificial Sequence: Synthetic coding sequence
  source 1..2175: mol_type = other DNA
atgcccgaggaggtgcaccacggcgaggaggaggtggagaccttcgcattccaagcagagatagcccagctgatgtccctgattattaacacattttactcgaacaaagagatttttctcagagaactcatatcaaacgcctcagatgcccttgacaaaattcggtacgagagtctcaccgatcccagcaaattggatagcgggaaggagcttaaaatagatataatcccaaaccctcaggagcgcacactcacactggtcgacacagggatcgggatgacaaaagcagacctcattaataatctgggaacaatcgctaagtccggaactaaagcatttatggaggccctgcaggccggcgccgatatcagcatgattggacagttcggggtgggattttattctgcgtaccttgttgcggagaaggtggtggtcattactaagcacaatgatgacgaacaatacgcttgggagtcgagcgcaggtggtagcttcactgtgcgtgctgaccacggcgagccaataggaagaggaaccaaggttatcttacacctcaaggaggaccagacggagtatttggaggagagacgtgttaaagaggttgtaaaaaagcacagccagtttatcggttatccaataaccttgtatctcgagaaagagagagagaaggaaatcagcgacgatgaggctgaggaggaaaaaggggagaaggaagaggaggataaagatgacgaggaaaagccgaagatcgaggatgttggatctgatgaagaggacgattcaggtaaggataaaaaaaaaaaaacgaaaaaaatcaaggagaagtatatcgaccaggaggagttgaataaaaccaagcctatctggacacgaaacccagacgatattacccaggaagaatacggcgagttctataaaagtctgacgaatgactgggaggaccacttagccgtcaagcatttctcggttgagggccagcttgagttcagggcattactgttcattcccagaagagccccattcgatctgttcgagaacaagaaaaaaaaaaataacatcaagctgtacgtgcgccgtgttttcatcatggatagctgtgacgagttgatccccgagtatctcaacttcattcgcggagtcgttgattctgaagacttgcccctgaacatctctagggaaatgctgcagcagagcaagatcctgaaggtgatccgaaagaacattgtgaagaagtgcctggagctcttcagcgaactggccgaggacaaagagaactataagaaattctacgaggctttttcaaaaaacctgaaactcgggatacacgaggatagcactaatcggcggcggttgtccgagctgctccgataccacacctcccagtcaggcgacgaaatgacatcccttagcgaatatgtttctcgtatgaaggagacccagaaaagcatttattatatcaccggggaatctaaggagcaggtggcaaatagcgcctttgttgagagagttcgtaagcggggttttgaagtggtatatatgacggaacccatcgacgaatactgtgtgcaacagttgaaggagtttgatggtaaaagtctcgtgtccgtgaccaaggaggggctagagctgcctgaggatgaagaagaaaaaaagaagatggaggaaagtaaggccaaatttgaaaacctgtgtaagctgatgaaagagatccttgacaagaaagttgaaaaggttacaatttccaaccgtctggtttcttcgccttgttgtattgtgactagtacctatggatggaccgcaaatatggaacgaatcatgaaggcccaggcgttgcgagataattcaacgatgggatatatgatggccaaaaagcacctggaaattaatcccgaccatccaattgtagaaaccctgagacagaaagccgaagcagataaaaatgataaagccgtgaaggatctcgtagtcctgctctttgagacagctctgctgtcgagcggcttttccctcgaagatccccagacgcattccaacaggatttatcggatgattaagttgggactgggcatcgacgaagacgaggttgccgcagaggaaccaaatgctgcagtccccgatgaaattccaccactcgaaggggacgaggatgcctcccgaatggaggaagtggactag

SEQ ID NO: 190404 - DNA, 465 bp, synthetic construct
  misc_feature 1..465: note = Description of Artificial Sequence: Synthetic coding sequence
  source 1..465: mol_type = other DNA
atggacagctgcgacgagctgatccccgagtacctgaacttcatcagaggcgttgttgattctgaggaccttccactgaatatcagtcgcgagatgctgcagcagtccaagatactgaaggtgattcggaaaaacattgtgaaaaaatgcctggagctcttctctgagctcgcggaagataaagagaattataaaaagttctacgaagccttcagtaagaacctgaagctggggattcacgaggatagtacaaacagacggaggctgtccgaactccttcgctaccatacaagccagagcggcgatgaaatgacgtcgttgagcgaatatgtaagccgcatgaaggaaacccagaaatccatctattacatcaccggggaatctaaggaacaggtgtgtccttgcccaacgtggctcccgttgttggtgagctccgtcttcttcccgttgctctccctgtgttag

SEQ ID NO: 190405 - DNA, 489 bp, synthetic construct
  misc_feature 1..489: note = Description of Artificial Sequence: Synthetic coding sequence
  source 1..489: mol_type = other DNA
atggacagctgcgacgagctgatccccgagtacctgaacttcatccgaggcgtcgttgattctgaggatctcccacttaacatcagtcgagagatgctccagcagtccaaaatcttgaaagtgatacggaaaaacattgtaaagaagtgccttgaactcttcagcgagctggccgaggacaaggaaaattacaagaagttctacgaagccttctccaaaaacctgaagctggggattcacgaggattcgacaaatcgtcggcggctgagcgagctcctgcgttatcacacctcacagagcggggatgaaatgacctccctgtctgaatatgtaagtagaatgaaagaaacgcagaagagtatctattatatcacgggtgagtcaaaggagcaggtggcaaactccgcttttgtggagcgctgtccttgtcccacttggttacctctgttggtctcctccgttttctttccactcttgtctctgtgttag

SEQ ID NO: 190406 - DNA, 552 bp, synthetic construct
  misc_feature 1..552: note = Description of Artificial Sequence: Synthetic coding sequence
  source 1..552: mol_type = other DNA
atggacagctgcgacgagctgatccccgagtacctgaacttcatccgcggcgtggtggactctgaagaccttccacttaatataagtcgcgaaatgttgcagcagtcaaagatcttgaaagtgatcaggaagaacattgttaagaagtgcctcgagcttttcagcgagctggctgaggacaaagagaactacaagaaattctacgaagccttcagcaagaatctaaaactgggcatacacgaggattctacgaaccgaagacggctgagcgagcttctgaggtaccacacttcccagagcggagacgagatgaccagcctaagcgaatacgtgagcagaatgaaagaaacgcagaaatctatttactacatcacaggatccccgtgctggtgtttagttttcttctctttgagttgcccctgtgtggaaggatctaaactgagagtgagttctccgataccgagtctcttgttaactgctggcctggatgtggtgtactgtggactcttctacttcctgcacttcgttctaaaactcaagtacgctaaatag

SEQ ID NO: 190407 - DNA, 2175 bp, synthetic construct
  misc_feature 1..2175: note = Description of Artificial Sequence: Synthetic coding sequence
  source 1..2175: mol_type = other DNA
atgcccgaggaggtgcaccacggcgaggaggaggtggagaccttcgcgtttcaggctgagattgcacagttgatgtctctgataatcaacaccttttactcaaataaagagatcttcctgagggagttgattagtaatgcctctgacgccttagataaaatccgctacgagagtctgaccgaccctagcaagctggactctgggaaggaactcaagatcgacatcattccgaaccctcaggagagaacactgacccttgtcgatacaggaattggaatgaccaaggccgatctgatcaacaatctgggaacaatcgccaagtccggcacaaaagcctttatggaggctctgcaggccggagccgacatttccatgatcggccagtttggcgtcggcttctatagcgcatatctcgtcgccgagaaagttgtggtgattaccaagcacaacgacgatgagcagtacgcctgggagagctccgctggcgggagctttacggtgcgggccgatcacggggagcccatcggaagaggcaccaaggttatcctccacttaaaggaggaccagaccgaatacctggaggagcggagagttaaggaagtggtgaagaaacacagccaattcatcggctacccaatcaccctgtatctggaaaaagagcgggaaaaagaaatcagtgatgacgaggctgaggaggagaaaggcgaaaaggaggaagaggataaggatgatgaagagaaacccaaaatcgaagacgtgggctccgacgaggaagacgatagcggcaaggataaaaaaaagaagacaaaaaagatcaaggaaaagtatatcgaccaggaggagctgaataaaactaaacccatttggacacgaaatcccgacgacatcacgcaggaggagtacggggagttttataagagcttgaccaatgactgggaagaccacctggccgtgaagcacttttccgtcgaagggcagttagagttccgcgccctcttattcatcccacgccgtgcccccttcgacttgtttgagaacaaaaaaaagaagaataatataaagctctatgtgcggcgcgttttcataatggattcatgcgacgagctcattcctgaatatctgaattttattaggggtgtcgtcgattctgaggatcttccgctgaatatttcccgagagatgttacagcagagcaagattctgaaggtaattcgcaagaacattgtcaagaagtgtctcgagctcttctcagagctagcagaggataaggaaaactacaaaaaattttatgaagcctttagtaaaaatctgaagctggggattcacgaggattcgacaaataggaggcgactttcagagctgcttcgataccatacatcacaaagcggcgacgaaatgactagtctgtcagagtatgtttctcgaatgaaggagacacagaagtctatctactacatcactggcgaaagcaaagagcaggttgcaaactcagcgttcgttgagagggttcgaaagaggggctttgaggtggtttatatgaccgagcccatcgatgaatattgcgtacaacagctcaaggagtttgacggcaaatctctggtgagcgttaccaaggaaggcttggagttgccagaggacgaggaggaaaaaaaaaagatggaggagtcaaaggccaagttcgaaaacctctgcaaattgatgaaagagattctggataaaaaggtggaaaaggtaaccatcagcaaccggttggtgtcgagcccctgctgcattgttacctccacctacgggtggactgcgaacatggaacgaattatgaaggcccaggcccttagggacaattctaccatgggctacatgatggccaaaaaacacttagaaattaatcccgatcaccctattgtcgaaactctgcgacaaaaggccgaagcggacaagaatgacaaggctgtaaaggacctcgtcgtgttactctttgagactgcacttctctcctccggcttctccctggaagatccacagactcactccaatagaatctacagaatgatcaagctggggctcggtatcgacgaggacgaagtggccgccgaggaaccaaacgctgccgtacctgatgagatcccccccctggaaggtgatgaggacgcctcacgaatggaagaggtggactag

SEQ ID NO: 190408 - DNA, 429 bp, synthetic construct
  misc_feature 1..429: note = Description of Artificial Sequence: Synthetic coding sequence
  source 1..429: mol_type = other DNA
tgattcatccggggcgtggtggacagcgaggacctgcccctgaacatttcaagagagatgcttcaacagtctaagatactgaaagtgatcagaaagaatattgtgaagaagtgcttggaactttttagtgagttagcggaagacaaagaaaactacaagaagttctatgaagcattctctaaaaatcttaagctgggcatccacgaagactccacaaatagacggcggttgagtgaattgttgcggtaccatactagccagtccggcgacgagatgacttcactgagcgagtatgttagcagaatgaaagaaacccagaagtctatctattacatcactggcgagagtaaggaacaggtgtgcccatgccccacatggcttccactgcttgttagcagcgtatttttcccgctgctgtccttatgttag

SEQ ID NO: 190409 - DNA, 453 bp, synthetic construct
  misc_feature 1..453: note = Description of Artificial Sequence: Synthetic coding sequence
  source 1..453: mol_type = other DNA
tgattcatccggggcgtggtggacagcgaggacctgcccctgaacatctctagggaaatgcttcagcagtctaaaatacttaaggtgattagaaaaaatattgtgaaaaaatgtttggagctgtttagcgaattggctgaagataaggagaattacaagaagttctacgaggcctttagcaagaaccttaaactcggcatccacgaggatagcactaaccgcaggaggttatcagagttactcagataccatacaagccagtctggcgacgagatgacatcactgtctgagtacgtgtccagaatgaaagaaacccaaaagtcaatctattatataacaggggaaagcaaggagcaggtggctaactcagcatttgtcgaacgatgcccctgcccaacttggctgccactcctggtgagcagtgtgttctttccgctgctgtccctatgctag

SEQ ID NO: 190410 - DNA, 516 bp, synthetic construct
  misc_feature 1..516: note = Description of Artificial Sequence: Synthetic coding sequence
  source 1..516: mol_type = other DNA
tgattcatccggggcgtggtggacagcgaggacctgcccctgaacatctcccgggagatgctccagcaatccaagatactgaaggttatacgaaaaaacattgttaagaagtgcttggaactgtttagcgagctggcagaggataaagaaaactacaaaaagttctacgaggcttttagcaagaacctcaaactgggcattcacgaggactcgacgaataggcgtcgcctgtccgaactgctgaggtaccatacaagtcagagcggagacgagatgacgagtctcagtgaatacgtgtcccgtatgaaagagacacagaagtctatctattacataacaggcagtccctgttggtgccttgtctttttctccttaagttgcccctgtgtggagggttctaagctgcgtgtgagttcacctatcccctcactgctgctgactgcaggactggacgttgtgtactgcggtttgttttattttcttcacttcgttctgaagttgaaatacgcaaaatag

SEQ ID NO: 190411 - DNA, 507 bp, synthetic construct
  misc_feature 1..507: note = Description of Artificial Sequence: Synthetic coding sequence
  source 1..507: mol_type = other DNA
atgcccgaggaggtgcaccacggcgaggaggaggtggagaccttcgcattccaggccgagattgctcagctgatgagccttataattaataccttctatagcaataaggagatattcctgcgggagctgattagtaatgcttcggacgctttggacaagatcagatacgagtctttgactgatcctagtaagttggattctggaaaggaattaaagatagacatttctatgatcggacaattcggggtgggattttattccgcatatctcgttgcggagaaagtggtggtcataacaaagcacaacgatgacgagcagtacgcttgggaatcctccgctggggggtcgtttaccgtgagagcagatcacggcgagccaatcggcagggggaccaaggttatcttacacctcaaggaagatcagacagaatacttagaggagcgccgggtcaaagaggttgttaagaagcactcgcaattcattggttatccaatcactctctactag

SEQ ID NO: 190412 - DNA, 483 bp, synthetic construct
  misc_feature 1..483: note = Description of Artificial Sequence: Synthetic coding sequence
  source 1..483: mol_type = other DNA
atggagatccccgtgcccgtgcagcccagctggctgcggcgggccagtgctcctctcccaggactgtcagcaccggggcgactcttcgaccagaggttcggcgaggggctcttggaagccgaattggcggcactctgcccaacaaccctcgcaccctactatttacgagctccaagcgtcgctttgccagtagcccaagttccgactgatccaggccacttctctgtgctgctggacgtaaagcatttctcccctgaggaaatagccgttaaagtggtgggtgagcacgtggaggtgcacgcacggcacgaggagaggccagatgagcacggcttcgtcgcccgagagttccacaggcggtatagactgccacctggggtggatcctgcagcggtgacgagcgccctgtctcctgaaggcgtcctctctatccaggcggccccagcctcggctcaggcccccccacccgcggccgctaagtag

SEQ ID NO: 190413 - DNA, 483 bp, synthetic construct
  misc_feature 1..483: note = Description of Artificial Sequence: Synthetic coding sequence
  source 1..483: mol_type = other DNA
atggagatccccgtgcccgtgcagcccagctggctgcggcgggcctcagctccgcttcccggcctatctgcccccgggagactctttgaccagaggttcggagaaggcctgctggaagcagagcttgccgccttatgtccaactaccttagctccatattatcttcgagctccgagtgtagccctcccagtggctcaggtgcccactgatcctggccacttttcagttctcctagacgtgaaacacttttcgcctgaagaaatcgctgtcaaagtcgtcggcgaacacgtggaagttcacgcaaggcacgaggagcgccctgatgagcacgggtttgtagcccgagaatttcaccgacggtacaggctgccccctggcgtggatcctgctgcggtcaccagtgctctgtcacccgagggcgtactttctatccaggcagcccctgcaagcgcccaggctcctcccccagcagccgccaagtag

SEQ ID NO: 190414 - DNA, 591 bp, synthetic construct
  misc_feature 1..591: note = Description of Artificial Sequence: Synthetic coding sequence
  source 1..591: mol_type = other DNA
atggagatccccgtgcccgtgcagcccagctggctgcggcgggcctccgctccactgcccggactttcagcgcctgggaggttattcgaccagcgcttcggcgaggggctactggaggcggagcttgctgctctgtgtcccactaccctcgccccatactatctgcgtgctccgtctgtcgcactgcctgtggcccaggtgcccaccgaccccggacactttagtgttctgttggacgtaaaacattttagcccggaagaaattgccgtcaaagtggtcggggaacatgtggaagtgcatgcacggcatgaagaaagaccggacgagcacggtttcgtggcacgcgagtttcatcgcagatacaggttgccacctggagtggatccggccgctgtgacatccgcattgagtccagagggggtgttgtctatccaggcggcgcccgcaccccgagaacctcctcaggcccctagtattaaggcggacttaacacccccttctcaaatgagtagggtccgccaaggtctttcaagtcatcccttactcgactccgcgttgacctccattctggacacagcactgatcacatag

SEQ ID NO: 190415 - DNA, 1590 bp, synthetic construct
  misc_feature 1..1590: note = Description of Artificial Sequence: Synthetic coding sequence
  source 1..1590: mol_type = other DNA
atggacctgcccgtgggccccggcgccgccggccccagcaacgtgcctgcatttctgactaagctgtggactctggtctcagaccccgacaccgatgccctaatctgttggagcccatcaggcaatagttttcacgtgttcgatcaggggcagtttgcaaaagaggtcttgcccaagtatttcaagcataataacatggctagcttcgttcgccagctgaatatgtacggctttcggaaggtggtgcatatcgagcagggtggactggtcaaaccagaacgggacgacacagaatttcagcatccctgttttcttcgggggcaggagcagctgctcgaaaatatcaaaagaaaggtgacttcggtgtccaccctcaaatcagaagacattaaaatccggcaggactccgtgactaagctcctaaccgatgtgcagttaatgaagggcaaacaggaatgtatggattcaaagcttctagccatgaagcacgaaaatgaagcattatggcgtgaagtcgcatcgctgagacagaaacacgcccagcagcagaaagtcgttaacaaactgattcagttcctcatctccctagtacagtccaatcggatcctaggcgtgaagcgaaagattccactcatgttaaacgactccggcagtgcccatagtatgcctaaatattcgcgtcagttcagcctcgagcacgtacacggctcggggccgtattcagccccttccccagcatattcgagttccagcttgtacgctcccgatgccgtggcttccagcggaccaattatctccgacatcaccgagctcgcccccgctagtccgatggccagcccaggtggttccattgacgagagacccttatcttcttctccgctagttagagtaaaagaagaacctccttccccaccgcagagtcccagggtggaggaggcatcccccggcagaccatcgtcagtcgatactctcctatcccctacagccttaatcgactctatcttacgtgagagtgagccagctccggccagcgttacggcactgacagacgctcgcggtcatacagacacggaggggcggcctccgagcccaccgcctacttctactccggaaaagtgtttatccgtagcctgtcttgataagaacgaactgtctgaccacctggacgctatggatagcaatctcgacaacctccagaccatgttgagtagccacggattttctgtggatacatccgcactgctcgacttatttagcccttctgtgaccgtgccagatatgagcctgcctgacttggatagcagccttgcatctatacaagagctgctctcaccacaggagcccccacgcccgccagaagccgagaactcctctcctgattcggggaagcagctggtccattacacagcgcagccccttttcctgctggatccaggctccgttgacactgggagcaacgacctgccagtgttgtttgaattgggggaagggtcttacttctcagagggcgacggttttgcggaggatcccaccatctctcttttaaccggttccgagcctccgaaagcaaaagatcccaccgtaagctag

SEQ ID NO: 190416 - DNA, 1611 bp, synthetic construct
  misc_feature 1..1611: note = Description of Artificial Sequence: Synthetic coding sequence
  source 1..1611: mol_type = other DNA
atgaagcagagcagcaacgtgcccgccttcctgagcaagctgtggacgcttgttgaggaaacccacacgaacgaatttatcacttggtcccaaaacgggcaatccttcttagtactggatgagcaacgcttcgccaaggagatcctgccaaaatacttcaaacacaacaatatggcttcttttgtccgtcagttaaatatgtacgggttcagaaaggtcgtgcacattgacagcggcattgtgaaacaggagcgggatgggcctgtggagttccagcacccttactttaagcaggggcaggacgacctcctggaaaacatcaaaaggaaggtttcgtctagtaagccagaggaaaacaaaattaggcaagaggacttaactaaaattatttcttccgctcaaaaggtccagatcaagcaagagacaattgaatccaggttgagcgaactgaaaagcgaaaacgagagtctgtggaaggaagtgtctgaactgagagcaaaacacgctcagcaacagcaggtcatccgaaagatagtccagttcatagtgactcttgtccaaaataaccagcttgtgagtctgaagcgtaagcgccctttgttactgaacaccaatggggcccaaaagaaaaatctgttccagcacattgtcaaggaacccaccgataaccatcatcacaaagtaccacacagccgcacggaagggctgaaaccgcgggaaagaatctcagatgatattataatctatgacgtgaccgacgacaacgctgacgaggaaaatattcctgtgatccctgaaactaacgaggatgtgatctctgaccccagtaattgcagtcagtatcctgacattgtcatcgtggaagatgacaatgaggacgaatacgccccggttatccagagcggcgagcaaaacgaaccggcgagggagagcctttcctctggcagcgatggctcatcaccactgatgtcatccgcagtccagctgaacggcagttcgtccctgactagcgaggaccccgttacaatgatggactccattctgaacgataacattaacctgctgggcaaagttgagctactcgattaccttgacagcatagactgcagcttggaggactttcaggctatgctcagtgggagacaattcagcatcgaccctgacctactcgtggacctctttacaagttcagtgcagatgaatcccacagattacatcaacaataccaagtccgagaataagggtttggaaactaccaaaaataatgtggtacagcctgtctcagaggaaggcaggaagagcaagtctaaacccgataagcagctgatacagtacacagcattccctcttctggccttcctcgatggaaaccccgcatcgagcgttgagcaggcatccaccacagcgtcaagcgaagtgctctcctctgttgacaagcctattgaagtggatgaactgctggatagttccctggatccagagcccacccagagtaagctggtaaggcttgagccactgaccgaggctgaggcatccgaagcaacacttttctacctgtgtgaactagcccctgcacccctggactctgatatgccactgctcgacagctag

SEQ ID NO: 190417 - DNA, 1557 bp, synthetic construct
  misc_feature 1..1557: note = Description of Artificial Sequence: Synthetic coding sequence
  source 1..1557: mol_type = other DNA
atgaagcagagcagcaacgtgcccgccttcctgagcaagctgtggacactggtcgaggagacccacacaaatgaattcatcacttggtcgcagaacgggcagtcatttttggtgcttgacgaacagaggtttgcaaaggaaattttgcccaagtactttaagcacaataacatggcctctttcgtcagacagctgaacatgtacgggtttaggaaagtagtgcacattgattcaggcattgtgaagcaggaacgggacggacctgttgaatttcagcatccatacttcaagcagggccaggacgatctgctggagaacattaaacgtaaggtctcctcatccaagcccgaggaaaacaagatccggcaagaagatctgaccaagattatctcaagtgctcaaaaggtgcagattaaacaggagacaatcgagagtagactgtcggaattgaaaagcgagaacgaatctctgtggaaggaggtgtctgaattacgcgccaaacatgcccaacagcaacaggtgattaggaagatagtgcagttcattgttaccctggtgcagaacaaccagcttgtgtcactgaagcggaaacgccctcttctgctaaataccaacggcgcccagaagaagaacctgttccagcacattgttaaggaaccaaccgacaatcaccaccataaggtgccccatagcagaaccgaaggactcaaacctcgggagcgaatctccgatgacattattatttacgatgtgactgatgacaacgccgacgaggagaatatcccagtgattccggaaaccaatgaagacgtgatctcggacccttcaaattgttctcaatatccagatatcgtgatagtagaagacgacaatgaagacgaatacgctcccgtgatacagtctggtgagcaaaacgaacccgcccgcgaatcactcagttctggcagcgatggttcttcccctctcatgagttccgcagtacagctgaacggctcttctagcctgacctcagaggaccccgttaccatgatggattccattttaaatgacaacattaatttgctgggcaaagttgagctcttagattatctcgatagcattgattgctcgcttgaggatttccaggccatgttgtctgggaggcagttctcgatcgatccagatcttcttgtggacagtgaaaataagggactagagaccactaagaataatgtcgtgcagcccgtctcagaggaaggccggaagtctaagtcaaagccagataagcagcttattcaatacacggcttttcctctgttagcattcctggatggcaatccagcctctagcgttgagcaggcctctacaaccgctagcagcgaagtcctgtcttctgtggataaacccatagaggtcgatgagctgcttgactcctctcttgatcccgagccaacacaatcaaaattagtgagactcgaacctctgacggaggcggaggcttccgaggctacactgttttatctctgtgaactcgcccctgccccactggattcagatatgcccctcctagatagttag

SEQ ID NO: 190418 - DNA, 1005 bp, synthetic construct
  misc_feature 1..1005: note = Description of Artificial Sequence: Synthetic coding sequence
  source 1..1005: mol_type = other DNA
atgggcgaggccggcgccgccgaggaggcctgccggcacatgggcaccaaggaggaatttgtcaaggtccgcaagaaagatctggagagactcacaacggaagtaatgcagatccgcgattttctgccgcgcatcctcaatggggaggttctagaaagttttcagaagctgaagattgttgagaagaacctggagaggaaggaacaagagttagagcagcttaagatggactgtgaacacttcaaagccaggttagagaccgtacaagctgacaacattcgggaaaagaaagagaagctggccttacgacagcagctgaatgaggctaaacaacaattactccagcaggccgagtactgcactgagatgggggctgctgcctgtacgctgttgtggggcgtttcatcatccgaagaagtggtgaaggctattctcggcggagacaaagcgctcaagttcttttcaattactggacagacgatggagtccttcgttaaaagcctagatggggatgtccaggagcttgatagtgacgagtcccagtttgtgttcgcactggcgggcatcgtgacaaatgtcgcagccatcgcctgcggcagggagttcctggtcaattcatcccgcgttctgctggatacaatacttcagctgctgggggacctgaaacctgggcagtgcactaagttgaaggttctgatgctgatgagcctgtacaatgtgtctattaatctcaaaggactcaagtatatctccgagagccccggatttattccgctcctatggtggctgctcagcgatccggatgctgaggtttgcctgcacgtgctgcgcctggtccagtccgtggtgctggagcctgaagtattcagtaagagcgcgtcagagttccggtctagtctgcctttgcagaggattctggccatgtcaaagtcacgaaatccgcgcctgcaaacggctgctcaggagttgctggaggacctgcgcacattagagcacaacgtttag

SEQ ID NO: 190419 - DNA, 780 bp, synthetic construct
  misc_feature 1..780: note = Description of Artificial Sequence: Synthetic coding sequence
  source 1..780: mol_type = other DNA
atggactgcgagcacttcaaggcccggctggagaccgtgcaggccgataacattcgggagaaaaaagaaaagttggcacttcgtcagcagcttaatgaagccaagcagcagcttttgcagcaggccgaatactgcaccgagatgggggctgccgcatgcacgctactgtggggagtttcttcctccgaggaagttgtcaaggccatattgggaggagacaaagcgctgaagttcttttcaattactggccagaccatggagtccttcgtgaaaagcctggatggtgatgtgcaagagctggatagtgatgaaagccagttcgtgtttgctctggctggcatcgtgactaacgtggctgcaatcgcatgcgggcgggagtttctcgtcaacagctccagagtgctgctcgatacgattttgcagctcctaggtgaccttaagcctggacagtgcacaaagctgaaagttctgatgctgatgagcctgtataacgtttccattaatcttaaaggtctaaaatacatttcagagtcacccggctttatcccgttactttggtggctccttagtgatcccgatgccgaagtttgtctacacgtgctccggcttgtccagtctgtagtcctggagcccgaagtgttcagtaagagtgcatccgaatttaggtccagtttgcccctgcagcggatactggcgatgagtaaatcaagaaaccccagactgcagacagccgcccaggaactgctggaggatctccgcactcttgaacacaacgtgtag

SEQ ID NO: 190420 - DNA, 1479 bp, synthetic construct
  misc_feature 1..1479: note = Description of Artificial Sequence: Synthetic coding sequence
  source 1..1479: mol_type = other DNA
atgcaggaggcccccgccgccctgcccaccgagcccggccccagcccagtccctgcttttctcgggaaactctgggccctggtgggggacccaggcacagaccacctcatccgctggtcaccgagcggcacatctttcctggtgagcgaccagtcccgctttgctaaggaggttctcccacaatacttcaagcacagcaatatggccagctttgtgcggcaactgaacatgtacggatttcggaaggttgtctctatcgagcaaggagggctgctcagacccgagcgggaccatgtggaattccagcatcccagttttgtccgaggtagagaacaactcttggagcgtgttagaagaaaagtgccagccctgcgcggcgatgatgggaggtggagaccagaggatctgggaagactcctcggtgaggtgcaagctctgagaggcgtgcaggaatctactgaggcccgcctcagggaacttaggcaacagaacgaaatcctgtggagggaagtggtaacattgcgccagtcccacggacagcaacatcgggtgattggcaaactgatccagtgcttgttcggacccctgcaagcgggcccttcaaatgctgggggcaaacggaagctttctttgatgttggacgaaggcagctcctgccccacaccagctaaattcaacacatgccctctccccggcgccctgcttcaggatccttattttattcaaagtcccctcccagagactaaccttggtcttagcccacaccgggcacgtggccccattatttccgacattcccgaggatagtccatctcccgaaggcaccagactgtctccgagctcggacggacggcgcgagaagggcctcgcgctgcttaaggaggagcccgccagccccggtggcgacggtgaggccggccttgcactcgccccaaatgaatgtgacttctgtgtgacagcccctccgccgctacctgtggccgtggtgcaagctattctggaagggaaaggatcattcagcccggaagggccccgcaacgcgcagcaaccagagcccggagacccaagagagatccccgaccgcggccctctgggtctagaatctggcgaccgtagtccggagtcactcctccctccaatgctcttgcaacccccacaggagtcagtcgagccagcggggccgttagacgtccttggaccgtccctgcagggcagagagtggaccttaatggacttggatatggagctttccctcatgcagcctctggtcccagagcgtggagagccggaattggccgtcaaagggctgaacagcccttccccgggaaaggaccctacactgggggccccgctgctgttggacgtccaggccgccttgggaggcccggctttaggtctgccaggggccttaactatttactcaacccccgaaagcaggacagcatcctatttggggccagaggcaagccccagcccatag

SEQ ID NO: 190421 - DNA, 1389 bp, synthetic construct
  misc_feature 1..1389: note = Description of Artificial Sequence: Synthetic coding sequence
  source 1..1389: mol_type = other DNA
atgcaggaggcccccgccgccctgcccaccgagcccggccccagccccgtgcccgcctttctcgggaagctttgggcactggtcggggatcccgggactgaccatttgatacgctggtcacctagcgggacaagcttcctggtctctgaccagtctcggttcgctaaggaggttcttccacagtacttcaagcacagcaatatggcttcattcgttcggcagctgaacatgtacgggttcaggaaggtggtgtctatcgagcaggggggccttcttcgccctgaacgagatcacgtggagtttcagcacccgagtttcgtgagaggacgggaacagttgttggagcgggtccggcggaaggtgcccgctcttcgaggagacgacggaaggtggcggccggaggacctgggtaggctgctgggagaggttcaggcattacgcggggtccaggagagcaccgaggccaggctgcgcgaactgagacagcagaacgagattctctggcgagaagtggtcacgcttagacaaagccacgggcagcagcatcgggtcataggaaaactgattcagtgtcttttcggtcccctgcaagctggccccagcaatgccgggggcaagaggaaactctcactgatgctggacgagggttcatcctgtccgacgcccgcgaaattcaatacttgtccgcttcctggcgccttgctgcaggacccctacttcatacagtctcccagcacatatagcttatcgcaacgccagatctgggccttggcacttacgggacccggtgccccgtcctctttgacatcccagaaaaccctacaccctctacggggtccagggttcttaccacctgtcatggccggagctcccccaccccttcccgttgcagtcgtccaggctatcttagagggcaagggaagtttttcacctgaggggcctcggaacgcccagcagcccgaacctggagatccacgagaaattccagatcggggtccattaggcctagagagcggggacagatcccctgaatcattgctcccccctatgctgctccaaccgccacaggagtccgtagaacccgccggtcccctcgatgttctgggtccctctctgcagggaagggagtggaccctgatggatttggacatggagctttctttgatgcaacccttagttcccgagcgaggcgaaccggagttagccgtcaagggcttgaacagcccctctcccggaaaagaccctacattgggtgcccctttactgctggacgtgcaagcagctctgggcggcccggcactgggcctgcccggcgccctgaccatatattcaactcctgaatctcgtaccgcttcctacttagggccagaggcttcgccttcaccttag

SEQ ID NO: 190422 - DNA, 1251 bp, synthetic construct
  misc_feature 1..1251: note = Description of Artificial Sequence: Synthetic coding sequence
  source 1..1251: mol_type = other DNA
atgcaggaggcccccgccgccctgcccaccgagcccggccccagcccagttccagcattcttaggaaagctctgggccctggtgggcgaccctggaacggatcatctgatccgatggagcccttccgggacttctttccttgtgagtgatcagtcccgattcgctaaggaggttctgcctcagtacttcaagcattctaatatggcctcattcgtgcgacagctgaatatgtacggctttcgtaaggtggtgagcattgaacagggcggacttctgaggcccgaacgggatcatgtggagtttcagcacccaagcttcgtgcgtgggagggaacagttactggaacgcgttcgccgtaaggtgcccgccttgcggggggacgatggccggtggaggcccgaagatctgggccgcctgctgggagaggttcaggccctgcggggcgtccaggaatcaacagaagcacgactcagagagctccggcagcagaatgagatcctgtggcgagaagttgtcactctccgccaaagccacggccagcagcacagagtgatagggaaattgatccaatgtctatttggccctctccaagctgggcctagcaacgccggaggaaaaagaaaattatcattgatgttggacgaaggatccagctgccccacccccgctaagtttaacacttgtcctcttcccggggccctgcttcaagatccatatttcatacagtcccctcttcccgaaaccaacctgggactgtccccccaccgggcccgagggcctatcatttctgatataccagaggactcccccagtccggaaggaactcgcctgtccccatcatccgatggcagacgcggaccacttggattggagtcgggggacaggtccccggagagcttgctgcctccaatgctgctgcagccaccacaagagtcagtggagccggcaggacctctggacgtgctggggcctagtctccagggaagggaatggacattgatggacttggatatggagttgtccctgatgcagccattggtcccagaaaggggcgagcccgaactggccgtgaaaggactaaatagtccaagccccggcaaagaccctacgctcggagcccctctgctcctggatgtgcaggcagcgttgggaggcccggccctgggtttgcccggcgctctcacaatttactccactccagagagtcgcacagccagctacctgggaccagaggccagcccatctccatag

SEQ ID NO: 190423 - DNA, 1479 bp, synthetic construct
  misc_feature 1..1479: note = Description of Artificial Sequence: Synthetic coding sequence
  source 1..1479: mol_type = other DNA
atgcaggaggcccccgccgccctgcccaccgagcccggccccagcccagtcccagccttcttagggaaactgtgggcacttgtcggcgatccaggcactgaccacctcattagatggagcccctctggcacgagcttccttgtctcagaccagtcacgattcgccaaagaagttcttccacaatattttaaacactccaatatggcatcgtttgtaagacagctgaacatgtatggattcagaaaagtcgtgagcatagaacaggggggactcctcagacccgaaagggaccacgtggagtttcaacaccccagtttcgtgcgggggagggaacagctgttggagcgtgttagacgcaaggttcccgcgctgcgcggtgacgacggtcgctggagacctgaagatctgggacgcctgctgggtgaagtgcaggcactacgtggcgtgcaagaatctacggaggccaggctgagggagttaaggcagcaaaatgagatactctggcgagaagttgtcaccctccgacaaagccacggccagcagcaccgtgtgataggtaagctcattcaatgtctgtttggcccactccaggctggtccatccaacgcaggcgggaagaggaaactgagcctgatgctcgatgagggtagttcatgcccaacccctgccaagttcaacacctgtccactccccggcgcccttcttcaggatccatattttattcagtcacccctccccgaaacaaatctggggcttagccctcaccgcgcccgggggcctatcattagcgacatccccgaggacagccctagcccagagggtacacgactctccccaagttccgatggacgccgggaaaaggggctggcacttctaaaggaagaacctgcttctcctggtggtgatggcgaggccgggctcgctctggcacccaacgagtgtgacttctgcgttaccgcccctcccccgctgcccgttgcagtggtacaggcaattctcgaaggtaaagggagcttcagtcccgaggggcctcgaaacgctcagcaacccgagccaggtgacccacgggagatcccagatagaggtcctctggggcttgaatccggcgaccggtcccctgagtccctccttcccccgatgcttttgcagccgcctcaggagtcagtcgagccagctggccctcttgacgtcctgggcccaagccttcagggaagggagtggacactgatggatttggacatggaactgtcacttatgcagcctctggttcccgaacgcggcgagcccgagctggccgtaaaggggcttaatagcccttcacctggaaaagatccaacactaggggctccactgcttttggatgttcaggcagctctaggggggccggcgcttggattgcccggcgctctcacaatctatagcacacccgagtccaggacagcttcttatcttggccctgaagcctcccccagcccctag

SEQ ID NO: 190424 - skipped

SEQ ID NO: 190425 - DNA, 414 bp, synthetic construct
  misc_feature 1..414: note = Description of Artificial Sequence: Synthetic coding sequence
  source 1..414: mol_type = other DNA
atgagcagcctgatccggcgggtgatcagcaccgccaaggcccccggggcaataggtccctattcccaggcagttctagtggaccgcactatttacatcagcggccagattggcatggatccaagtagtgggcagcttgtctcgggaggtgttgccgaggaagccaaacaggctctgaagaatatgggcgaaatcctcaaagcagcgggatgtgatttcaccaacgtcgtgaaaactacagtgttgctagctgacattaatgatttcaacacagtgaatgaaatatataagcagtatttcaagtccaatttcccggcccgggctgcttatcaggtggccgccctccccaagggcagtcgaatcgagatcgaagccgtggctattcaaggacccctgacaacagccagcttgtag

SEQ ID NO: 190426 - DNA, 14505 bp, synthetic construct
  misc_feature 1..14505: note = Description of Artificial Sequence: Synthetic coding sequence
  source 1..14505: mol_type = other DNA
atgcccagcgagagcttctgcctggccgcccaggcccggctggactcaaaatggttaaaaactgacattcaactggcttttactcgagacggcttatgcgggctctggaatgagatggttaaggacggtgagatagtttatactggtacggaaagcactcagaacggagaacttccacccaggaaggatgacagtgtggaaccctcagggactaagaaggaggatctgaacgataaagagaagaaggacgaggaggaaacccctgctcctatttatcgcgctaagtcaatacttgattcctgggtctgggggaaacagccggacgtaaacgagctgaaggaatgtctctctgttctggtgaaggagcaacaggccctagctgtccagagtgcaactaccacactctcagcgctgcggttgaaacaacgcttggtcatcctggagcgctactttattgcactcaatagaacagtgttccaggagaatgtcaaagtgaagtggaaatcttcaggcataagtctcccaccagtcgacaagaaatcctcaaggcctgcgggaaagggtgtggagggtctggcaagagtggggtctcgcgcagccctttcttttgcttttgcattcctcagacgcgcatggcgctccggcgaagatgccgatctgtgcagcgagctgctccaggagtccctagatgcattgcgagcactgcctgaggctagcctgtttgatgaatctacagtgtctagcgtgtggctcgaggtggtcgagcgcgccaccaggtttttgcgttctgtggtgacaggagatgtccatggtacacctgcgacaaaaggcccaggcagtattccattacaggatcagcatctcgcgctagccattctgcttgagctggctgtacagcggggcacgttgtcccagatgcttagcgcaatcctgttgctgctccagctttgggactctggagctcaggaaacagataacgagagaagcgctcaaggcacctcagcccccctgctcccactgctccagcgcttccagtccatcatttgtaggaaagatgcgccgcatagcgagggagatatgcatctgctgtccggtccactgtcacccaacgaaagcttcctcagatatctaacactgccccaagataacgaactggccattgacctcaggcagacagctgtggtcgtgatggctcacctcgatcggctggcaacaccctgcatgcctcccctctgctcttcccctacaagtcacaaaggcagcctccaggaggtgattggctggggactgattggatggaaatattatgctaatgtcattggaccgatacaatgtgaggggctcgcaaatcttggcgtaacccagattgcctgtgccgagaagagattcctgattctgagcaggaacggaagagtgtacactcaggcatataattctgacacccttgcaccccagttggtgcagggcctcgctagtaggaacattgtgaaaatcgcagcacacagtgatggccatcattatctcgccctggcagctaccggagaggtgtacagttgggggtgcggagatggtggtcgtctcggccacggagatacagtaccccttgaggagcctaaagttatctctgcattcagcggcaagcaggcagggaagcacgttgtacacatagcttgcggctccacctattccgccgcaataaccgcggagggagagctgtacacctggggcaggggcaactacggcagacttggccatggttcatccgaggacgaagccataccaatgctggtagccggcctgaaaggtctgaaggtgatcgatgtggcttgcgggtcaggcgatgcccagacactggcagtcaccgaaaatggacaagtgtggagctggggggacggtgattatggtaaacttggtcgaggcggctctgacgggtgtaaaacaccgaaattgatcgagaaacttcaggatctggacgttgtcaaagtccgatgcgggtcccagttttccatcgcactgaccaaggatggacaggtgtacagctgggggaaaggggacaaccagcggctcggccacgggacggaggagcacgtacggtaccctaagctactggaggggctccaggggaaaaaggtcattgacgtggccgccggttcaacacattgcctagccctgaccgaggacagtgaagttcattcgtggggctcgaacgaccagtgtcaacacttcgatactctgcgggttaccaaaccggaacctgctgccctgcccggactcgacaccaaacacatagttggtatagcatgtggcccagcccaatccttcgcttggagcagctgctctgaatggtccataggcctacgagttcctttcgtggtggacatctgctccatgacttttgaacagttggatctgctgctcagacaggtcagtgagggcatggacgggagcgctgactggcctcctcctcaagagaaggagtgcgtggcagttgcaactctgaacttgctccggttgcagttgcacgcagcgatcagccatcaggttgatcctgagttcctcgggctcggtctggggagcattctgctgaactcactgaagcagactgtcgtcacactggcaagttcagccggtgtactttctactgtgcagtccgccgcccaggccgtcctacagtccggctggtccgtccttctccccacagcagaagaaagggccagagccctgtccgccctcctgccttgtgccgtatcgggtaacgaagtgaatataagcccaggacgtcgattcatgattgacctgcttgtgggtagtctgatggccgacggtggcctcgaatctgccttgcatgctgctattaccgcagaaattcaggatattgaggcaaaaaaagaagcgcagaaagaaaaggagattgatgagcaggaggcaaatgcaagtacgtttcaccgcagccgcaccccgctggacaaagatctaatcaatactggtatttgtgaaagcagcgggaagcagtgcctgccactcgtacaactgattcagcagctgcttaggaacatagccagccaaaccgttgccagactgaaagatgttgctaggagaatttccagctgccttgacttcgagcagcacagcagagaacggagcgccagtctagatctgctcctgagattccagagactgctgatctctaaactgtaccccggcgagtccataggtcagacctctgacattagttcaccggagctgatgggggtaggaagtctcctgaagaagtacacggcgttactgtgcacacacattggagacattttacctgtcgcagcttccatcgcttcaaccagctggcgacactttgctgaagtcgcttacatcgtcgaaggggacttcaccggcgttctgcttcccgaactggtcgtgagtatcgtgttgttgctgtccaagaatgctgggctcatgcaagaagctggggcagtgcccctgctggggggccttctggagcacttggaccgctttaaccacctcgctcctggaaaggaacgcgacgatcatgaagaactggcatggcctgggataatggagagtttctttacgggacagaactgcagaaataacgaggaggtgactttgattaggaaagctgatttagaaaaccacaataaagacggaggtttctggacagtcatcgacgggaaggtgtatgacattaaggacttccagacccagagcctaaccggtaatagtatcctcgcccagtttgctggcgaggacccagtggttgccctagaagctgcactacaattcgaggacactcgggaaagcatgcacgcattctgcgttggacaatatctagagccagaccaagaaatcgtgaccatacctgatctgggctcactgagctcacctctgatagacacagaaagaaatttgggacttctgttggggttgcacgcctcatacctcgctatgagtacacccttgtccccagtggagattgagtgcgcaaagtggctgcagtcttccatttttagcggcggccttcagaccagtcaaatccactactcgtacaatgaagaaaaagatgaagatcattgcagcagtcccggaggcacacccgctagcaagagccgactctgtagtcataggagggccctcggcgatcactcacaggcatttctccaggcaattgccgacaacaatattcaggaccacaacgtgaaagacttcctttgccagatcgaaagatactgtagacagtgccacctgacaacaccaattatgtttcctcctgaacatcctgttgaagaggtgggtagactgctgttgtgctgcttgcttaagcacgaggatctcggccatgtggctctttcactggttcacgcaggggctctcgggatcgaacaggttaaacacaggacgctacccaaatcggtggtagacgtatgcagagtggtctatcaggccaagtgctctttgatcaagacccaccaggaacagggacggtcttataaagaggtgtgcgcgcctgtgatcgaacgccttcggttccttttcaacgagctgagaccagctgtttgtaatgatctgtccattatgtctaagttcaagttgctgagcagcctacctagatggaggagaatagcccagaagataatacgggagaggaggaaaaagagggtcccaaaaaaaccagagagcacagacgatgaggagaaaattgggaacgaggaatcagatctggaagaagcgtgcattctgccccactccccgatcaacgtcgataagagacctattgcgattaagtcccctaaagacaagtggcagcctcttctgtccacggtgaccggggtgcataaatataaatggctgaaacaaaatgtgcagggcctttatccgcagagccccctgctgtctacaatcgccgagttcgccctgaaggaggagcctgtggacgtcgagaaaatgcgaaaatgcttgctgaagcaactggagagggccgaagtgagactggagggtatcgacacaatactgaagctagcaagcaagaattttctgctcccctcagtgcagtatgccatgttttgtgggtggcagcggctgatccctgaaggaatcgatattggagagccccttactgattgtttaaaagacgtagacctcattcccccattcaaccggatgctgctggaggtcacatttgggaagctttacgcatgggcagtgcagaatatccggaatgtgcttatggacgctagcgcaaaattcaaggagctgggcattcagccggtgccgttgcagaccatcacaaatgagaacccatccgggcctagtctcggcaccattccacaggcaaggttcttgctcgtgatgctgtctatgctcaccttgcagcacggcgcaaacaatttggatctgctgctaaatagcggaatgcttgccttgacacagactgccctgcgcctcatcggcccgagctgtgacaacgtggaagaggatatgaacgctagcgctcaaggggcctccgccaccgttttggaagagacacggaaagagacagccccagtacagctccccgtttctggcccagagctcgccgctatgatgaaaatcggcacaagagtcatgaggggagtggattggaagtggggcgaccaggacggaccccccccaggcctcggacgcgtaatcggagagcttggagaagatggctggatccgggttcagtgggatactggatctaccaacagctatcgcatgggcaaggaaggcaaatacgaccttaaacttgccgaactgccagccgcggcacagccgagcgcggaggactcagacactgaagatgacagcgaagcagaacagaccgagagaaacatccatcctacggctatgatgtttacctctacaattaacttgctgcagaccctgtgcttgagcgctggcgtccacgctgagatcatgcagtccgaagccactaagactctatgcggattgctgagaatgctggtggagtccggtaccactgacaaaacctcatccccaaatcggcttgtctaccgagagcaacaccgatcatggtgtaccttaggtttcgttcggtcgatcgctctgacgcctcaagtctgtggcgctctgagtagtccccagtggatcacactgctgatgaaggtggtagaaggacatgctccatttaccgcgacctccctgcagcgccagatcctggctgtccacttacttcaggccgtattaccgagctgggataagacagaaagagcccgggacatgaagtgtttagtggagaaactcttcgacttcctgggctccctgttgaccacctgttcttcagatgtgccattgctccgtgaatccactctgcgacgccgaagggtgcgaccccaggcctccctgacagccacacacagtagcactttggcagaggaggtggtagctctgctgcggaccctgcattccctaacccagtggaatgggttgatcaacaagtatatcaactcccagcttcggtctattacgcatagctttgtcggccgaccctccgagggtgcacaactggaggactacttcccggattcagagaaccccgaagttgggggcttgatggcagtcttagctgttatcggggggatcgacggaagacttcgccttggggggcaggtcatgcatgatgagttcggggagggcacagtgacccggattacaccgaaaggcaaaattaccgtgcagttcagtgacatgcgcacctgccgtgtgtgtcctctcaatcagctgaaacccctgccagcggtggcctttaacgtcaacaacttgccctttactgaacccatgttgagcgtgtgggctcagcttgtaaaccttgccggctctaaacttgagaagcataaaatcaagaagtcaaccaaacaggcattcgccggtcaggtggatctcgatctcctcaggtgtcagcagctgaaactttacatcttgaaagcaggaagagcgcttctgtcgcaccaggataaactgcgtcagatattgtcccagccagcagtgcaggaaacgggaactgtgcacacagatgacggcgcggtcgtatccccggacctgggcgatatgtcccccgaaggtcctcagccccctatgatcttacttcagcaactacttgcctccgctacccagccatctcctgtgaaagctatatttgataagcaagaacttgaagccgccgctctagctgtgtgtcagtgtctggccgtcgagtcaactcatccttccagcccaggcttcgaggattgctcgtcctcagaggccactacacccgtggctgtgcagcacatccggccggctcgggtaaaaaggagaaaacagagtcctgttcctgcattgcccatcgtggtgcagctgatggagatgggctttagcaggcgtaatattgaatttgcgctgaaaagcctaactggagcatccggaaatgccagcagcctaccaggcgtcgaggcccttgtgggctggttattagaccatagtgatatccaagtcaccgaactgtctgacgccgacactgtcagcgacgagtactctgatgaagaggtagtggaggacgtagacgatgctgcatacagcatgagcacaggagccgttgtcacggagtctcaaacttacaagaagcgggccgatttcctttcaaatgatgattacgccgtctatgtacgagagaatatccaggtgggaatgatggtcaggtgttgtagagcatacgaagaggtttgcgaaggggacgtgggcaaggttataaagctagacagggatggactgcacgatctgaacgtccagtgcgattggcagcaaaaggggggtacatactgggtaagatacatacacgtggaattaattggatacccccctccaagctcctcaagccatatcaaaatcggggacaaggtgcgggtgaaggcgagcgtgacaacccctaagtacaagtgggggtctgtcactcatcagtccgtgggagtggttaaagcgttttcggccaacggaaaggatatcatcgtcgattttcctcagcaatcacattggaccggccttttgtctgagatggagctcgtgccgagtatacaccctggagttacttgcgacgggtgtcagatgttcccgataaatggctcccggttcaagtgcagaaattgtgatgatttcgacttctgcgaaacatgtttcaaaacaaaaaagcacaacactcgccatactttcggaaggatcaatgaaccagggcaatccgctgtgttctgtggacgctctgggaagcagcttaagcggtgtcacagctcacaacctgggatgctgttggacagttggtctcgaatggttaagtcgctgaatgtcagctcgagcgtgaaccaagcctcaaggttgatcgacggcagtgaaccgtgctggcagtcttctgggagccaggggaagcactggatccgcttggagatttttcctgacgtcttagttcacaggcttaaaatgattgtagatccagccgattcctcatatatgccatctctggtggtcgtatccggaggcaactccctcaataaccttattgagttaaagactatcaacatcaatccgtccgatacaacggtgccgctactaaatgattgtacagagtatcatcgttatatcgagatcgccattaaacagtgtcggtcttccgggatagactgtaagattcacggactgatcttgctgggtcgtatccgcgcagaagaagaagatctcgctgcggtcccttttctcgcttctgacaatgaggaggaggaagatgaaaaagggaattccggctcgctgattcggaaaaaagccgcaggactcgagtcagctgctaccatacggaccaaggtctttgtgtggggacttaacgacaaagatcaattgggcggcttgaaggggagcaaaattaaagtcccctctttctccgaaactctttcagcactcaatgtggttcaagtcgccggcggttccaaaagtttgttcgccgttaccgtagagggaaaggtgtatgcatgcggagaggctacgaacggcagactcggattgggaatcagctccggcaccgtcccaattccaagacagatcaccgcactctcaagctatgtggtgaaaaaagtggccgtacattccggcgggagacacgcgactgctctaacagttgacggcaaagtctttagttggggcgagggagacgacggaaagctcggtcactttagcagaatgaattgcgataagcccaggctcatcgaggcccttaagacaaaaagaatccgcgacatagcatgtggctcaagccattccgctgcccttacctcaagtggcgagctgtatacttgggggttgggagaatatggtcggctcgggcatggcgacaataccacacagctgaagcccaagatggtaaaggtccttctcggtcatcgagtgattcaggttgcttgtggcagccgtgatgcgcagactcttgccctcacggatgaggggctggtcttctcatggggcgacggagacttcggtaagttggggagggggggatctgaggggtgtaacataccccagaacattgagagattgaacggacagggtgtttgtcagatcgaatgcggggcacagttttctcttgcacttaccaaaagtggggtggtctggacctggggaaaaggggactatttccgcttgggacatggcagcgatgtacacgtccgaaaacctcaggttgtggaaggtcttaggggcaaaaaaatcgtccacgttgctgtgggggcactccattgccttgcagtcacagatagcggacaagtttatgcctggggggacaatgatcatgggcagcaagggaatggcaccactaccgtaaataggaagccaaccctggtccaagggctggagggccagaagatcacccgagtggcctgtggatcatcccactccgtcgcctggaccactgttgacgtcgcaacgccatccgtgcacgaaccagtcctgttccaaacagctcgggatccactgggggcctcctatttgggcgtaccttctgacgctgactccagtgctgcttccaacaaaatctcaggagcaagcaactctaagcctaatagacccagcctcgctaagatcctgttatcactggatgggaacctcgcaaaacagcaggcactgtctcacattttgaccgccctgcagatcatgtatgcccgtgacgccgtggtcggcgccctgatgccggccgcgatgatcgcacctgtcgagtgccccagtttctctagtgctgccccgtctgatgcgagtgcaatggcgagcccaatgaatggtgaggaatgtatgctggctgtcgatatagaggaccgactgtccccaaacccctggcaggagaaacgggagatcgtgagtagtgaagatgcggtgacccctagcgccgttacgcccagcgctccatctgcttctgcacgccccttcataccagttaccgacgatttgggagctgcctccatcattgcagagacgatgactaagaccaaggaggacgtcgaaagccagaacaaggcagctggccccgaaccacaagctctggacgagttcacctctttattaatcgcagatgacacgcgggtggtcgtggacttactgaaactgagcgtgtgtagcagagccggggatcgaggacgggacgtactgtctgcagtcctctctggcatgggcacagcctatccacaagtcgccgacatgctgctagaattatgcgtgacagaactcgaggacgttgcaacagattcacagagtggacggttaagcagccagccggtcgtcgtggaatcaagccacccgtacacagacgatactagcaccagcggcactgtaaagattcccggggccgagggcttgagggttgaatttgacagacagtgcagtactgagcggcgtcacgacccccttacagtgatggacggagtcaatcggatcgtctccgtgaggtcagggagggagtggtcagactggtcaagcgagctcagaatccctggtgacgaattaaagtggaagttcatctctgatggcagcgtgaacggctggggttggagattcacagtgtacccaataatgccagctgccggtccaaaggagctcctcagcgatcgatgcgtgctgtcttgcccatctatggatctggttacctgccttctcgattttaggctcaacctggcctctaaccgcagcattgttccccgcctcgcagcctccttggcggcatgtgctcagcttagtgcccttgccgctagtcatagaatgtgggctttacagagactcagaaagctgctgactactgagtttggacaaagcattaacatcaatcgccttttgggcgaaaacgatggggagacccgggctctgtctttcaccggatcagctctagccgcgctagtgaagggcctgcctgaggctctccaaaggcaattcgagtacgaggaccccattgtgcgaggtgggaagcagctgctccactctcccttcttcaaagtcctggttgctcttgcctgcgacctggagcttgacactctgccctgctgcgcagaaactcacaaatgggcctggttcaggaggtactgtatggcctcccgcgtggcagtcgctctggacaaaaggacacctctgcctcgcctgttcctcgacgaagtggccaaaaagatcagggaactcatggctgatagcgaaaacatggatgtgcttcacgaatctcacgatatcttcaagagggagcaagacgaacaactcgtgcagtggatgaacagaaggccagatgattggacactatccgcgggaggctctggaacaatctacgggtggggtcataatcatcgaggtcagctgggcggaattgagggggctaaggtgaaggtgcccactccatgcgaagccctggctaccctgcgacccgtgcagctcatcggcggcgagcagacgcttttcgccgtgacagccgatggaaagctgtacgctacaggatatggcgccggagggaggctgggcattgggggaactgagtccgtttcgactccgaccttgctagagtcgatccagcacgtctttatcaaaaaagtcgcagttaattccggaggcaagcattgtctcgcccttagctctgagggtgaggtctactcttggggggaggcagaagacggaaaactcggtcatggtaatagaagcccctgcgaccgtccgcgagttattgagagtctccgtggcatcgaggtcgtggacgtagctgctggtggcgcgcacagtgcttgtgtaaccgctgccggagatctatatacttggggcaagggccggtatggccgcctaggacacagtgattcagaggaccagttgaaaccaaaactcgtcgaggccctgcagggccaccgcgtggttgacattgcctgcgggtcgggggacgcacaaaccttatgcttaaccgacgatgacaccgtatggtcttggggggatggcgattacggcaaactgggtcggggaggcagcgacggctgcaaggtcccgatgaaaatagatagccttacaggcctgggagtcgtgaaggtggaatgcggctctcaatttagtgtcgcgctgaccaagtcgggcgccgtttacacctggggtaagggtgattatcacaggttgggccacggatccgacgatcatgtcaggcgcccgcgccaagtgcagggcctccaaggaaagaaggtgatcgcaattgctacagggtccctccactgcgtgtgttgcaccgaggatggggaggtgtacacatggggtgataacgatgaaggtcagttgggcgatgggacgactaacgcgatacaacggccgaggttagtggctgctctgcaggggaagaaggtgaaccgcgtggcctgcggctcagcacatacactcgcttggtcaacctcaaaacctgctagcgccggcaagctgccggcacaggtgcctatggagtacaatcacttgcaagagatacccatcatcgcgctgcggaacaggctgctcctgcttcatcaccttagcgagctgttctgtccgtgtattcccatgtttgacctggaaggcagtctggacgaaaccggcctcggacctagcgttgggtttgacacgttgagaggcattctgatcagccagggcaaagaggcggcattcaggaaggttgtccaggctacaatggtaagggataggcagcacggccccgtggtggagctgaataggatccaggtgaaacgcagtaggtctaaaggaggtctggcgggacctgatggcacaaagagcgtgtttggccagatgtgtgcaaaaatgtcctcttttggccccgacagtctccttctgccacacagggtgtggaaggtgaaatttgtaggcgagtcggtcgatgattgtggcggggggtattcagaaagcatcgccgaaatttgcgaggaactgcaaaatggattaactccgctgctcatagttacccccaacggtagggatgaatcaggagcgaatagagattgttacctgttatcgcctgcagctagagcgccagtacactctagcatgtttcgcttcttgggcgtgctgctcgggatagcaatccggacaggctcaccattgagtttgaacctagccgaacccgtgtggaaacaactcgcaggaatgtcccttaccatcgccgacctctccgaggtggacaaggactttatccctggcctgatgtatatcagggacaacgaagccaccagtgaggaatttgaagccatgtccctgcctttcaccgtgccaagcgccagtggtcaggacattcaactgagctccaagcacacccatattacactggacaatcgagcagagtacgtccgactggcgataaactatcggctgcacgagttcgatgagcaggtggcagccgtgagagaagggatggcacgcgtcgtccccgtccctctgctcagcctgttcactggctatgagctcgagacaatggtgtgcggcagcccagacattcctctgcatcttctgaaaagcgtggcgacgtacaaggggatcgagcccagtgcttctttgatccagtggttttgggaagtcatggaaagtttctctaacactgagaggtccctcttcctgagattcgtttggggaagaacgcgattgcccaggaccattgccgactttcgaggcagagatttcgtcatacaagtactggataagtataatcctccggaccactttctgcccgaaagttatacttgtttctttctactgaagctgcccagatactcctgtaaacaggttctggaagaaaaacttaagtatgccatacatttttgcaaatcaatcgacactgatgattatgctaggatcgctctcaccggcgagcctgcagctgacgactccagcgacgacagtgataatgaggatgttgatagttttgcatccgactctacacaagattacttgaccgggcattag

SEQ ID NO: 190427 - DNA, 3075 bp, synthetic construct
  misc_feature 1..3075: note = Description of Artificial Sequence: Synthetic coding sequence
  source 1..3075: mol_type = other DNA
atggagcggcggagccggcggaagagccggcggaacggccggagcacagctggtaaagcagccgccacacagcccgccaagtcgcctggagctcagttatggctgttccccagtgcggccggtctacacagggcattgctgcggagggtagaagtaacgcgtcagctatgctgcagccctggacgtctagccgtcctcgaaagaggaggcgccggcgtccaggtgcatcagttgcttgcaggaagcgggggcgcccgcacccccaaatgcataaagcttggaaagaatatgaaaatacattccgttgaccagggcgccgagcacatgctgatcctgtcatccgacggcaaaccctttgagtatgataactacagtatgaagcatttgcggtttgagtcgattctgcaggagaagaaaatcatacagatcacttgcggtgactatcactcgctcgccttaagtaagggcggcgaactgttcgcatgggggcaaaatttacatgggcagctcggcgttggacgaaaatttccatccaccaccactccacagatcgtggaacacttggccggcgtgccactggcacagatcagcgccggcgaggctcactccatggccctgtcaatgtctggcaacatatacagctgggggaagaacgagtgcggtcaactcggactgggtcacaccgagagcaaggacgacccatccctgatcgaggggcttgacaatcagaaggtggagttcgtggcatgcggtggatcccacagcgcacttctgactcaggatggccttctctttacttttggcgctggcaaacatggccagctgggtcataactctacccagaacgagctgcgaccctgcctcgtggccgaactggtgggttatagggttacccagatcgcctgtggccgctggcatactttggcatatgtgagcgatctggggaaggtgttcagcttcggaagtggaaaggatggccagctgggaaatgggggcacacgtgatcagctgatgcctttgccagtcaaggtctcctcttccgaagagctgaaactggaatcgcacacctctgaaaaagaattgatcatgatagcagggggcaatcagtctatactcttgtggattaagaaggagaactcatatgtaaatctgaaacggaccattccaaccctaaacgaaggaacggtcaagagatggattgctgatgtcgagaccaaacgctggcagtcaaccaagcgcgagatccaagagatcttctcttctcctgcctgcctaacggggtcttttctgcggaagaggagaaccactgagatgatgcctgtgtacctggatctcaataaggctcggaatatctttaaggagctgacccagaaggactggattaccaatatgatcaccacatgtttgaaagataatctgctaaagcggctgccattccattcgccaccacaggaggctcttgaaatattttttctattgcccgaatgccccatgatgcatatatcgaataattgggagtccctggtagtgccctttgctaaagtagtctgcaagatgtcagatcagtcctcgctggttcttgaggagtactgggctactttgcaggaatcaaccttttctaagttggtccagatgttcaaaacagcagtaatctgccagctagactactgggacgaaagtgcagaagaaaatgggaatgtgcaggccctccttgagatgttgaagaagcttcaccgcgttaatcaggtgaagtgccagttgcccgaatccatattccaggtggacgagttacttcaccgcctcaactttttcgtggaggtctgccgccgctacctctggaaaatgaccgttgacgccagcgaaaacgtgcagtgttgtgtgattttttctcacttccctttcatttttaataatttgtctaagatcaagttattacacacagacaccctgctgaagatcgagtccaagaagcataaggcctatcttcgctcagcagctatcgaggaggagcgcgagagtgaattcgctctccgcccaacatttgacctgacagtcaggaggaaccaccttatagaggacgtgttaaaccagctgagtcagttcgagaacgaagatctcagaaaagagttatgggtgagcttctctggtgagatcgggtatgatctgggaggggtgaagaaggagtttttctactgtctgttcgctgagatgatccagcctgaatatggcatgtttatgtacccagaaggtgctagctgtatgtggtttccggtcaagccaaaatttgaaaaaaaacggtatttcttctttggcgtgctgtgcggactgagcctcttcaactgcaacgtcgccaacctcccgttcccccttgcactctttaaaaagttgttagatcaaatgcctagcttggaggacttgaaggaactatctccagacctggggaagaacttgcagacattgctggatgacgaaggtgataatttcgaagaagttttttacatccacttcaatgtgcactgggacagaaacgacaccaatttgatcccgaatgggtcttccattacagtgaatcagactaacaaacgtgactatgtgagcaagtatatcaactatatattcaacgactccgtgaaagccgtgtatgaagagttcaggcgtggtttctataagatgtgtgacgaggatattataaaactttttcatccagaggagctgaaggatgtgatcgtcggcaataccgattatgactggaaaaccttcgaaaagaacgcacgatatgaacctggctacaatagttctcacccgacaatcgttatgttctggaaggcattccacaaactgactctggaagagaaaaaaaagttcttggtgttcctgacaggtacagaccgactgcagatgaaagatcttaataacatgaagatcacattctgttgtcctgagtcctggaacgagagagacccaatccgggctctgacatgcttctccgtgctgttccttccaaaatacagcaccatggaaactgtcgaggaggccttgcaggaggctattaacaataataggggtttcggatag

SEQ ID NO: 190428 - DNA, 1854 bp, synthetic construct
  misc_feature 1..1854: note = Description of Artificial Sequence: Synthetic coding sequence
  source 1..1854: mol_type = other DNA
atgggccccaccctggccgtgcccaccccctacggctgcatcggctgcaaactgcctcagcccgagtatcctcccgccctaattatcttcatgttctgcgccatggtgattaccatagttgtcgatctgataggcaatagcatggtcatactagcagtcaccaagaataagaagctcagaaactccggtaatatctttgtggtcagtctgagcgtcgccgatatgcttgtggcaatttacccatatccattgatgctgcatgccatgagcatcggcggatgggatctgtcccagctgcagtgccagatggttggctttatcacaggactctcggtggtgggcagcatctttaatattgtagcaatcgctattaaccgctactgctatatttgccattcattacagtacgagcggatcttttctgtgcggaacacttgcatttacctcgtcatcacttggattatgaccgtgctcgcggtgttgccgaatatgtacatcggtactattgagtacgacccccggacttatacttgtatcttcaactatctgaacaatcccgtgtttaccgtcacgattgtctgcattcatttcgtcctgcccttactgattgtgggattttgttatgtgcgaatctggacaaaggtgctggctgctcgcgaccccgcgggtcaaaatcctgacaaccagctggccgaggtgcgcaacttcctaacaatgttcgtgatctttctcctgtttgccgtctgttggtgtcctataaacgttctgacggttctcgtggcggtttcccccaaagaaatggcaggcaaaatccccaattggctgtatctagctgcctatttcatcgcctattttaactcttgcctgaatgccgtgatttatggcctgctgaacgaaaactttagacgggaatattggactattttccacgccatgcgtcacccaatcatttttttttccggattgatttccgacatcagagaaatgcaggaggctcggaccctggcacgggcccgtgctcacgcacgtgatcaggctcgggaacaggatcgggcacacgcctgtcctgccgttgaggagaccccaatgaatgtccgaaacgtccctctgccaggtgacgcagcagcaggacaccccgatagggctagcggccatcctaagccgcactcaaggtccagctcggcttaccgaaagagcgcttcaactcaccacaaatccgtattctctcattcaaaagctgcaagcggccacctgaagccagtatccggacactcgaaacccgccagtggacatccaaagtcagcgactgtttaccctaaaccggcatccgtccatttcaaggcggacagcgtacacttcaagggagattctgtgcactttaaacccgatagcgttcacttcaagccagcatctagtaatcctaaacctatcaccggccatcacgtaagcgccggctctcatagtaaatctgcattcagtgccgcaacctcacaccccaagccaactaccggccacatcaaacccgctacctcacatgccgagcccacaacagcggactaccccaagccggccactactagccaccccaaacctaccgcagccgataatcctgagctttctgccagtcactgccccgagatccctgcaattgcccatcccgttagcgacgattcagatttgcccgagtctgccagcagccccgcagctggacccaccaaacccgcagcatctcaacttgaaagcgacacaatcgcagaccttcctgaccccacagtggtgacgacaagcaccaacgattatcatgacgtcgtggtgatcgatgtggaggacgatcccgatgagatggccgtatag
